United States Patent Application Publication US 2015/0315605 A1 - sequence listing, part 20

SEQ ID NO: 30810 - DNA, 6497 bp, Zea Mays
atggcgccgcctcgcgtcaccaggaagaaggggaagggcgccggcggcaagaccgacctgcgtcccgaccggaagcagttcaaaaggcaccacaaggaggatgcagccgctgagcagggggatggcaacggagagcggcagcagtcggcagcgccgggttctgcagcgctcctcgccgcagcttctgacgaagctgactttccaagagggggacacagcctcctgagcaaggatgagatggcggaggctcgtgcggaggcggagcaggatttcgagagggaggcgaagaaggggaagggaaaaaggaagaggagtggcggcgagtcgtctggttttggcgtggatgacgacttggggatactcttcggtggggccaccactgggaagctcccacgctttgctaatcgcatcacagtaaagaatatttcaccaaatatgaagctctggggtgttgtaattgaggttaaccagaaagatattgtgttaagtctacctggtggaattagaggctttgttcgctcagaggatgtttgcgacattgctttgcaggaaaatcgtaaggatagtgggaacaatttatgcgcagaagttgttcatgttggtcagcttgttccttgtatagtcctacgagtcgacgatgatagtagagaaggaaaagtaaacaaacgggtttggctatcattgcgattaagcctattgtacaagggacttgccctggatggcttgcaggaaggaatggtacttactgcccaagtcaaaagcatcgaggatcatggttacattcttcattttggagtatcttcctttagcggatttatgcagaaggatgacaaagaagatgtgaagactgagcgccgacaactgatgcaatgtgttgtgaaggcgattgacaaaactcgggccattgttcacttgagttctgatgaagacttgctttctaaatctactattaaggatctgaaaggcctttctattgatcatttgattcctgggatgatggttaatgcacgtgtccattcatttcttgaaaatggactcatgttatcatttcttacttatttcagtggaacagttgatatttttaatttgttgaattccttcccctctggtaattggaaagatgattacagtaagaataagaaggtaaatgctcgcatcctgttcgttgatccatcaacaagagcagttgggcttacattgaacaaacatttacttcatcttgaagtaccccctattaatctaaaagctggagatatctacgataaatcaaaggtgctgagggtagataaaaaggccggtctctttcttgaaataccttctccaactccatcacctggatttattagtatacgtgatgtgtcagacaaggatgcaaaaaacttggagaagttcaaggaaggcagtagcttacgtgtccgtatacttggagtgcggaatcttgaaggagttgcaataggcaccataaaagacagtgcttttgaagggtctgttttcactcatgatgatgttaaacctggaatgttagtgagagctaaggttgctactgttgagccattcggtgctattgtacagttttcaagtggcgtgaaagcactttgtccgcttcctcacatgtcagagttggaacatgttgttaaaccaccaaagaaatttaaggttggagctgagcttcttttccgtgtgttgggctgcaaatccaagagagttacagtgacatacaagaagtctctggtgaaatcaaaacttgatgtgctttcatcatatgctgatgcaaaaattggtttagtgactcatggatggattactcatattgaaaagcacggttgctttgtaaaattctacaatggagttcaaggttttgttagcagatctgaccttggattagaggctggaactgaagcagaaaatgtttatcatgttggccaagtggtcaaatgtagaattatcaatgtgatccctgcttcaaggaaactaaatgttagttttgtcatatcccataataggattgctccaatagacactccaaagttgggcagtattgtctctggtgttgtggaacggcttactcctgcagctgttgttgttagtgtaaatggcttctccaaggggacaatactgaatgaacatttggcagaccatcatggtcaagctgctcagttgaagaatgtgttgaaacctgggcacgagttcaaccaactcttagttctcggtgaagtcaactaacttcatttgttatcaatgcactttgaaaaaaaaacagaacaaccctttttctgttaataaacatttgacgcattggacatttttacacagttatgttgtaaaaattatagcaaaaaatgaatctaaagtcactacgtcatgaccagtacttttttttgaactgatggaggatcaagcatacactgtctgaagtgttgtatatctagagggagtaccatactaccacgtaacagtttatgaaaggatgtgcagaatttcacaatggcaagtaggaagttcgctgttttgcatgcacacttgtagcgtgtcatgatactgaaggtcaaaatttagttctttcggcaaagcactcacttataaattgtgcaaatgacattccttcagagatatcacagatgcatcctggtgttgtagttcatggttacatctgcaacattattgaagctggttgttttgtccgtttcctcggacatttgactggtttctctcccaaggacaaagtaagattttttcagctccatcattctttttgttgttttgaaaagaatgtctaatttttcttgtttcacaaaggcagttgataggtggatagaaaagctttctgatgcgttctatgttggccagtcagttcggagtcatatactcagcgtaaatgcagaaactgctagagtaaaactcgcacttcaacagtcaatgtgctcctcaatggattcttcatttattcagggatactttcttctggatcagaagattgcagcattgaagtactcaagcaatgactgggctcgccattttggcattggtagcttagttgaggcggaggtgggagctatagaagaatatggtattatccttaacttcaaagaccatctggatactgttggtttaatcgagcaccatcaacttggtggcagtagtgtggaagtgggatcttctgtgaagggtcttgttttggatttatctgatggagttgttaacttgtccgtcaaaccagagctaattgacagtgtcagaattgttggaaaaaagaagaaacgccaaagggccgtagttgcagacttggagcttcatgaggaagtgaatgcagtcgtggaaataatcaaagacagctatatggtcctttccatccctgagtacaattatgcaattgggttttcaccactgatggattataactcacaactgcttccccaccaccactatgataatggacaacgcattactgtggttgttggaaatatcccaagttctgactcttctggaagacttatcttactaccaaaagcttcagcacagtattcttccctctctgattctaaaagggctaagaagaaatcaggctacaaaattgggtcacttgttgaagcagagattattgatatcaaaccgcttgagcttctactgaaatttggtggcaatcttcatggaagaatccatattactgagattcttgaagaggattctgctgagcatccctttagtgaactcagaatagggcaaaagcttactgccagaattgtttcagaggctgaaccttctggaaagagtggcaaaaaattcaaatgggaattgtctattaggccatgtatagtcaatggagagtttgctcaaaaagaacaaaatcacaccacaaatgggattgtacgtgcttatgttgtcaaggtggataaggaatgggtctggttaactgtatcaagaaatgttatggctcatttatttttacttgatagttcttccgagcccagcgaactgaaagaattccagcagcgctttagtgttggccaagcagtgaaaggtcgtgttatcagtgtgaaccaggagaaaaggttacttcggttgaaggcacttgataaccaatgcacacaaccgaatatagatgaaacacaagaaccaaagtcctctgtgtttggacaaacaaaacaaggagatatcattggtggacgtgttcaaaaaattctacctggtgttggtgggctcgtcgttcagattggacctcatctccatgggagggttcattatactgaaattgttgactcttgggtgtctgaacccttgtctggattccatgagggccagtttgtgaagtgcaaggtcctgtctgtgagccgctcatcagaaggatcacttcgagttgatctatcactccgttcatcaaacctgatcagagactctaacaactcaagactagatgatctggaaacctgtacctcccggattgagaagatcaaggatctgctccctggaactgagattaagggctatgtgaagaacgtgaattccaaaggatgttttattatgctttctcgaatggttgatgctaggattactctatcaaatttatcagatgaatatgttgaaaatccacagaaggatttccccgttggaatgcttgtacacggaaggatcctgtctacagacccatcatcagggagagttgaggcatcacttaggaagaccactggttcaaaattggaaaagctggatgatattagttatagtgacttgcatgttggggatatcgttgatggccaagttaagcgggtggaatcctttggattattcgttacaattcggagaagtgaattggttggtctgtgccatgtatcagaactttctgatgaacctgtcgttgatattaactcttgctataaagctggtgatatggttaaagccaaaattctgaagattgatgagacgcggcatcgagtatcacttggaatgaagaagtcatactttgattctgatctgactgctgacacaaatgatgatgaaagtgctcttatggacatcagcgttgcccctcagatggttgaatatcataacagaaatttagttcaccgcaaagcagaaccaagggcttctgttctgcctcttcaggtttccttggatgaatcggaaggttccgacctagaggataatattagtaatacatgtcttgaaattgctaatggaactgaagcaaatgctaaaaagagtgataaacagttaaagaaggaagcaagaaaacaaagggaactagaaatcagtgctatggaggaaagggctttgcaggaagatataccacaaactccagatgattttgagaagttagttaggagctccccaaatagtagttttatctggataaagtatatggcaactttgttagatcttgcagatgttgagaaagcacgtgcagtagctgagagggctttaaaaacaataatccccagagaagaagaagagaaactaaatgtttgggtagcatatttcaatctggaaaatgaatacggtagtccaagggaggatgctgtgaaaaaggtattccaaagagccttgcaatattgtgatcccaaaaagctgcacttggctcttcttgcgatgtacgagaggaccgaacagtatgagcttgcagatgaacttctagacagaatgaccaaaaggttcaaaacttcctgcaagatatggttatgccgcattcagtttgctctcaagcaaggcaaggatgttgagtacatcaaagccattgtaaaccgtgcacttctaagtttgccacacagaaagcgcataaaattcctctcacaaactgctattctagaattcaaatgtggggtgcctgaagaaggaagatccagatttgaactaatattgcgggagtacccaaaaagaacagacctttggagtgtttatctagaccaagaaatccgccttggtgacgtagaagttatacgggcattgtttgagagggtgacttgtctgaccctacctccaaaaaagatgcagttcttgttcaagaagtatcttaatttcgagaagtcactgggtaaagacaacgaaagaattcagcttgtgcaacagaaggcaatcgaatatgttcagagttcactgccgtcacaagacaactcttgaactacatggagacttaataagcccacaaacaatcattaggaaataccagtcgtactgtagatgtgatctctttgatgactccttgaacattattgtgaaaaggtcaatgtaaaatgtgggctgttcaaaattttgtttgaaacctttatataagttatgagtctagtatgtcatgtttcacccaattttttggaaggaactattctaagccggatctggttcgaatattgaccttttctatctgtggtattgactgatgaggcacaattgaatgggtaactgtctgtgctactctgtcacacccgggtttcggacaccaagacacgggcgcgaacataatcacctggtgttgctgggatcaggtcttacacatatgatgaatcatg

SEQ ID NO: 30811 - DNA, 1196 bp, Zea Mays
atgtttgctaaattctcaccaaggcgaagccacggtaaccgccaccgtcatggtgcccccgacggccactgcgatgcccgtcttcctctccgcggcgccccctcctttttccacccgccgtcggcgcagccgccttcctgccatttccgcatccctttcgccgtccccttcctcttcggaggagccgctgctggtgcgcgcggcgcggggcgaggacggcctcccacgcccacccgcgtggatgatgcgacaggcagggcggtacatggcggagtaccaggcgctggccaagcgccacccctcgttccgggagcgctccgagaacacggacctcatcgtcgagatcacgctgcagccgtggcgtgccttcgcgcctgacggcgtcatcctgttctcagacatactcacgcccctaccggccatcggggtaccgttcgatatctcggactccaaggggcccgtgatccaatcgccagtgcggtccgaagggcaggtgagggagctcgtccccatcgaccttgatatgctccagttcgtcggagagtcactaaagattctgcgaaatgagattgatggaaaagctgctttgctaggatttgtgggggccccatggacaattgcaacttacattgttgaaggggggatgaccaacacatacacaaatataaagaacatgtgccatacagctcccgatgtcttgaggtgtcttctatctcatcttgcagaagcgatatctgactatatcatttaccaagttaactccggggcccagtgtatacagatatttgattcatggggtggacaacttccacctcatgtgtgggagcagtggtcaaaaccatatatcaaaaagattgtgaataggattaagaaagagtgccctcatgtaccccttgtgttgtatataaatggaaatggaggtttacttgagcgcatgaaggacacaagagttgatgttattgggcttgactggacagtggacatggctgatggaaggaagcgccttggtaatggaattagtgtacaagggaatgtggatccagcatttctgttctcaccattaccagtactgactgatgaaattcgtaggaccttcgtacaggggaagtgattgggactggccgtcgctgtagagctgctcctcgcctctacatcttggacactttgcggcttccctccttggctacgtctctagc

SEQ ID NO: 30812 - DNA, 2624 bp, Zea Mays
  misc_feature (2623)..(2624): n is a, c, g, or t
caccaccacgctaatcagcagcagctggtagcaacgcgggggttgcgctgctctgcttcccaagcaacgcaccaaagccaacgcggcgcggtactattataccaccacaccacccaccgatcccacagctcataccagcgcaggagcagcgcagcgcagcgcagagcggcgccgcgcgcagcacctccacgcccccagctgcctgcacatgtgagcggccgcggagggcgagagctaggtacatttcgttgtgccgccgctgcggggtccgtgcgcgaccgagatccggtggggcggtggacagagatggaggcgagcgcggggctggtggccggctcgcacaaccggaacgagctggtggtgatccgccgcgagtcaggagcgggcggcggcggaggaggcggcgcggcgcggcgggcggaggcgccgtgccagatatgcggcgacgaggttggggtgggcttcgacggggagcccttcgtggcgtgcaacgagtgcgccttccccgtctgccgcgcctgctacgagtacgagcgccgcgagggctcgcaggcgtgcccgcagtgcaggacccgctacaagcgcctcaagggttgcccgcgggtggctggggacgaggaggaggacggcgtcgacgacctggagggcgagttcggcctgcaggacggcgccggccacgaggacgacccgcagtacgtcgccgagtccatgctgcgggcgcagatgagctacggccgcggcggcgacgcgcacccggacttcaaccccgtccccaacgtgccgctcctcaccaacggccagatggttgatgacatcccgccggagcagcacgcgctcgtgccgtcctacatgggcagcggcggcggcggcaagaggatccacccgctccccttcgcagattccaaccttccagtgcaaccgagatccatggacccgtccaaggatttggccgcctacggctacggcagcgtggcttggaaggaaaggatggagggctggaagcagaagcaggagcgcctgcagcatgtcaggagcgagggtggcggtgattgggatggcgacaatgcagatctgccactaatggatgaagctcggcagccattgtccagaaaagttccaatatcgtcaagccgaataaatccctacaggatgattatcgttatccgttcccaaagtggcttccaattgagagagagacttacctggaccgtttgtcgctaaggtttgacaaggaaggtcaaccctctcagcttgctccaattgacttctttgtcagtacggttgatcccacaaaggaacctcccttggtcacagcgaacactgtcctttccatcctttccgtggattatccggttgagaaggtctcctgctatgtttctgatgatggtgctgcaatgcttacgtttgaagcattgtctgaaacatctgaatttgcaaagaaatgggttcctttctccaaaaagtttaatattgagcctcgtgctcctgagtggtacttccaacagaagatagactacctgaaagacaaggttgccgcttcatttgttagggagaggagggcgatgaagagagaatatgaggaattcaaggtaaggatcaatgccttggttgcaaaagcccaaaaggtacccgaggaaggatggacaatgcaagatggaagcctctggcctggaaacaatgtacgcgatcatcctggaatgattcaggtattccttggccaaagtggtggtcgcgatgtggaaggaaatgagttgcctcgccttgtttatgtctcgagagaaaagaggccaggttataaccatcacaagaaggctggtgccatgaatgcactggtccgtgtctctgctgtcttatcaaatgctccatacctattgaacttggactgcgatcactacatcaacaatagcaaggccataaaagaggctatgtgtttcatgatggatcctttggtggggaagaaagtgtgctatgtacagttccctcagaggttcgatggtattgaccgtcatgatcgatatgctaacaggaacgtcgtcttttttgatatcaacatgaaaggtttggatggtattcaagggcccatctatgtgggtactggatgtgttttcagacggcaggcactatatggttatgatgctcctaaaacaaagaagccaccatcaagaacttgcaactgctggcccaagtggtgcctctcttgctgctgcagcaggaacaagaataaaaagaagactacgaaaccaaagacggagaagaagaaaagattatttttcaagaaagcagaaaacccatctcctgcatatgctttgggtgaaattgaggaaggcgctccaggtgcagatattgagaaggctggaattgtaaatcaacagaaactagaaaagaaatttgggcagtcttctgtttttgttgcatcgacacttcttgagaatggtgggaccctgaagagtgcaagcccagcttctcttctaaaggaagctatacatgttatcagctgcggctatgaagacaagactgactggggaaaagaggtctatataccatatataacctgattcaaagacttttgactgttctatttaaataaagatataatgtgctaagtggatcgtggtttgttgcnn

SEQ ID NO: 30813 - DNA, 1399 bp, Zea Mays
ggcttcccagagccttgcatcaggagggaggcaagagacagagcaatacccagctaaacctgcctattcaataatgatatgtaattcggcctgcgtttgggacaaggaggtctcgatgttaaccgtactgatcgtttgcttgtttattatgagagacaagagaacttggcaaggttgtgggacattcttgcagtgtattcatggattgataaagacatagggtattgtcagggaatgagtgatctttgttcaccaatatcaatcattctggaaaatgaagcagatgctttttggtgctttgagcgtctaatgcgcagggtgcgaggaaatttcaaaagtacttctacttccattggagttcgagctcaactaactaccttgtctaccataatgaaatctgttgacccaaagctgcatgaacatttagaaaatcttgatggaggggaatacttatttgccttccgaatgctgatggttcttttccgtagggaattctcatttgttgatacgatgtacctttgggaagtaagttgtctggacaaaaaagttataataaatttcataagtagtgcatattattaacaattcaatctgaccaccactaatatcaaataattacttctgttatacatctaaatataggcccagtaatgctagaattatgaattggtttatgcatgaaacactactgtacaacttcaaaatgttgcagctcatgtggtctatggagtacaatcctaatctcttttcaatgttggagagtgacactggcacatccagcgcaagcacaaaggatgaaagtgttctaggacagtgtggaaagtttgagcggaaaaaattgcaagcagctaagaaagatgaccagatccctctatctgtctttgttgttgctagtgttcttgaggctagaaacaagaagttattgggtgaggcaaaaggtctagacgatgttgtcaagattttaaatgaaatcactggtagtctggatgcaaaaaaggcatgcagagaagcattgcagattcacgagaagtatcttaaaacggtaaaagcatcataaggacatgtacagcttcacttggatgggctatttatttattttttggactagagaagatataccacagaacttttgttatcctttgtttgtgtattgtgtaattctgacacatttgtaacattgcatttacacaaccaaaagaaaggacgaggatttcattcaaaaataaaaaaaagaaggggaaaaaggatgctgatcttgtaaagacgcgagacaaaatgtttataccataataacgtcatcatgattcttttctgttcgtcgtcagctctaatattagttcactttatgtgaacaatatgttgtactttgaagataaatatcactgtatacgggtgtatt

SEQ ID NO: 30814 - DNA, 3540 bp, Zea Mays
cggtcccgctcttttgactgaggcggagcccagcccagagcccaccgtgagctcaacgacgcccacgcccggtgccggtgcaaaccaaacgccaactccaatctccaactccaagagcgaagaaaccaatacccaaacccaaaggttcgtccgcattgtcggccagccagctcccactccactgcccgttccgttctgcgctcgtcatcgtcggggccggccgggcaagccatcagcggccgtgatggtgatggcgccggcgattctgctggcagtgctagtgctcgcggcggtggcagcggcgacggcgtcggcgttcgccgtggcgtccaacaacgcgacggtggtggccgggaagctgaacgtgcacctggtgcctcactcccacgacgacgtcgggtggctcaagaccgtcgaccagtactatgtcggctccaacaacagcatccagggcgcgtgcgtgatgaacaccctcgactccgtggtggacgcgctcgccagggatcccgcccgcaagttcgtcgtcgtcgagcaggctttcttccaaaggtggtgggccgagaaaagccccacaatccaggacatagtccacaaactggttgattccggacagctagagttcataaatggtgggtggtgtatgcacgatgaagctgccgtgcattacattgacatgattgatcagaccacgcttggtcaccggatgatcaagaaacagttcaataagactccaagagctggctggcaaattgatccttttggtcactctgcagtgcaagcttatttgcttggagcagagcttggttttgattctgtacatttcgcaagaattgattaccaagatagggcaacacggaaagcagacaaaggcctagaggttatatggcgtggctcaagaactttcggctcatcttcacagatcttcacgaatgcctttcctgtccattatagcccaccagatggctttggcttcgaagttttggatgaaaatatcatacctgttcaggatgacctgtcactttttgactacaatgtccaagaacgtgtagatgattttgttgctgcagccttagcacaggcaaatgttacacgtacagaccacataatgtggaccatgggggatgattttaactaccagtacgctgaatcctggttccggaatatggacaaacttatccaacatgtgaacaaggacggcagagtgcatgcgttgtattctactccgtctatctacacagatgctaagcatgcatcgaatgaatcttggccagtaaaatatgacgactatttcccctacgctgattcaacgaatgcatactggactgggtactttacgagccgtccaactttcaagcgatatgttcgagtacacagcggatactacttggctgcacgtcagatagagtttttggtgggcggtaggagctccttgggattgttcacttccagcttggaagatgcgatggggattgcccagcatcacgatgcagtctcaggtactgcgaaacagcacacgactgatgactacgcgaaacggcttgcgctgggagcagcaaaggttgaaaaaggtgtaaacaccgctctggcttgtctgaccagctccaacgggacatgtggatcctctgttgtaaaatttagtcagtgttcacttctcaatataagctactgcccttcgaccgaggaagcaatttcatcaacaaagcgtttagttgtagttgtttacaatcctcttggatgggaacgtagtgacttcataagagttcctgtcaatgatcaaaacctagttgtaaaaggctctgatggaaatattgttgagtcacagctagttgaggttgataatgtgacgagaaatttaagaaagttttatgtgaaggcttatcttggaatcacaacacacaaggcccctaagtattggctactatttcaagcttctgtaccaccaatgggctggaattcctacttcatttcaaaatcaactggagcaggatacaacagtactgagcatgtctcggacgtggtttccccaagtaacagcacgattgaagttggaccaggacatctaaagatgtccttctcaaaagcatctggacaactcaataggatattcaattccatctcaggagtggatttaccagttcaacaaagctttctttggtacagatcaagtgagggtgatgcctcagactcacaggcatctggagcatatatatttcgaccagatggtaatacaccgactacggtttcatcctcggtgccactgaaagttatccgtggaccactggttgacgaagtgcatcagcaattcagctcatggatttatcagataacacgactctacaaaaacaaggagcatgctgaagttgaatacacgattgggccgatccctgtcgatgatgatgtagggaaggaggtcatcacacggctgacagcaaatatggtcacaaacagtacgttttatacagactccaatggaagggatttcctcaaaagggtgagaaactacagggaggactggaatcttcaagtaactcaaccagttgcaggaaattactatccggtgaacctaggagtgtatgtagcagatgaaaaatatgagctatctgtgcttgtggaccgtgctgtcggagcatcaagcattcaggatggtcagctagagattatgctacacaggcgtttacttaaggatgatggcaggggtgtcggagagccacttgacgaggtggtttgcgtggatcaagattgccaagggcttacggccaggggcaattactacgtcaatgtcgagaagctagggcatggagctcactggcgacgtacatatggccagcaagtctactcaccctttctccttgctttcactcatgaggatgagaccagctcgaaatcctacagcgtggccaaagctggtatgatgaatgccaactacagccttcctgataatgtcgccattgttactttgcagaatctagatgatggtaccacactactccgcttggcccatctctttcaagctgctgaggacccgagatattccaaggtggcaaaggttgatctgaaaaaggtgttcggaaagagaactatcaaggaattgacggagactagcctctccgcgaaccaaaagaagtcagacatgaagaagctcagctggagggtcattgggaacactgaaactggtcctgccgcagtaaaaggtggcccagttgacagtagggctctagtcgttgaactaggacccatggagatacgcaccttcttgctgaaattttagtggcagttgttcttttgtttgtaaacaaacaatagtccatagagtaatttctaccttttcattaacgtgcccaaatcttagttcaaataggatcaaatacttgggcaatggaggtgcacacccacaccaagtttgttcatgtaataatagctacatgtcgggaaaaaaaaaaggaacggttgtggtgcttttcattgtgtaaagcgggtatttcttcctagcggataccgttatctgttgggctgattgggctgatctcgggtctggtttga

SEQ ID NO: 30815 - DNA, 2758 bp, Zea Mays
tgagaccagaggagcacgagcgcaacctccgtcacccctaagatctcctcaccattgtggccatcctgcaagatcagtactcattatctattaagaaggttacggttagcttggtgtaggataggcactggagagtttgacttgcgatatttgagtacatcccattgctggcgctccgagtatctggccatactattgattcacataccagctaaatttaggaccatcccgattgaaggctcttcccacttaagtgattcttccttctgaatccattttttagcttattcattcggattatgacccataattatgtttttttgtttgcttgaattcggtcaaacaaactgagaaaagcgtggatcctctgaagaatgtctgaaaaaaatgatagacaagtccctagatttaccccaatttcacttgctctatagatttatagttctataatatgtgcttccttatcaatctttgttactcaattatgctagataatcacttgtccttaatctaattaacagtgttgtcatcatagatgaagctgacaacttagttgattccttgaataagatatacaagtcaaagcttacatcttcttaggttactctcacctttcattaacctttccatcacagtctggcaaatagtattttgccttgtgccataggtcattatacttagttgcaattgtattgctttgtgtttcattcaatgaacataaacatctacattccatgttgtccattagttatgatttttgctggaacataaatggcatatagctctgtattttgtgtgcctgatgctcattcagtactattgtcaaagcacaaaagggagatttaggaatttatttggcttataaaggggcataaacaaagagggtcttttagtggtggagttagcttagcttgcctatggggttgtatggcacattataagagattctatatatggtttcatctggtttaggtttagaattttcattttgaaagcaacattcagtccatacatgacttgagcatgctttctaaattgacatttttggtgtttacttgggctaaaaactaggattcttgcatttttctgccatgtgctgtttacaggtgaaattgtgttgttcagaaacaaactttggcatccgtttctcattctcctaactgcatttacatgtattcattttccttttggattgtagctgaaagcagtcctttcccacctagatgaataccttaatagattttacaatgttttgggagctaggaattgatgatacatccagaccttggtagttttaacaaggtcttccacacatgttctgatcaacaatcaagatggtagcactgtgtcttctatgaccacaaaccaattcttgttttcccttgacatcgataacataaacatagttgaattttgtcactttgtgaaagacatcaatataatccacaaggtaaatttcttaatctataaccactgtttgaaattggtagtctacaatctatttgatgctttaagtgaactttagaagtttatatcatttccaagaaaagtttacattaccttttccaattaatgttgactcaacatatataagtaactaccaaaatttatttggaatagaaattgaatattaacaaacaaaaaatatcttgtacttaaaatttgtatactaatataacagaactgcgacaaactcaatgatgggcacaaaagagctttgcacaatctcattccaggatcaacgactcatagatgtttttatcaacactgcacacattgtttgctgaaattagctcatgttattgatggtgtttgaaagaaacattaaagttttgcttcgacaaatgtcttttgctcagggcatctggcttggtgtttcttgtttggtgatacctgtacaagcaaatttggtgacctgctacttaaaaactgtttctgcaaagaggtcgtcttgactgatcgcaatgatgaagttctggagtgttgttgttatgatgaaggcagacccaagtattgaaagggatgatctgattttgctctaggagattgccatgtacatgcttcttgcatgtggagctgtctatgtgatcttgataagaaagatttgtggatgttgacccaacaggaaattgctactgaggtgcaaagtgaatccaagtgaaagtaattaggggagttagctatgtcaaatggaaagagagtggttgctaaaggataggaagctgaagctggatgaaggaagcaactacatgcaaccgatggcaataatgcattgcagggttgaggctcgttagaaatgtcaagttggtcccggacgtgggtatggtgcccgcaaggccgacagagctgagatcaagcactgagatcgtgccctcgtgcctacggctgcatgtcacacctggccagaggcataggctaccactactgttctaagaggacaacctgctcgatagctagcctaggatggccttcagttccagcaaggcttgtcggctcgtctcactgcagaacgctattgttggcgcctaattgaacgaagttgataccggtaggatcccatgaagcaacataagcagcagaagtctgacgaggaatgacatagatgcagtgctttcgtttgttgctactgaaaaaagatctgaaccaagtatttctgtaagtataccaacaagttagttgctactactttgtatattgatcttcgttggccgaatgtttgagtttttttcaaggcacaaacactttattttgagatcta

SEQ ID NO: 30816 - DNA, 4545 bp, Zea Mays
accgattctagcgtagtctacgagccaggccggcgtcccccaaaatcaccggcaggttttcctcggttcccgttacgtatgtggacacctgaactcaacgcaaagaccacgaactgccgtcagagaagacgctagtaaaccgcccgccgccccaactcacgaatcggcaccgccacccaacggggctgaaggcccagccctccaccctccgggcaccagtgcgtgcgccgtcgacttcctctcaccttctcgctcctcgagaacgactccatagcgcaccacaccagcgcggcgacagacagcccgcgaggagaaaaggtagaagaggaggggcagggagagccatacatactcaccggttggattcggtccaatccaatccagccggccgcggcgtgaccagccgatccagagggcgccgaatcgatctgcgggggcggcgcggcgatgcggagggctaccgctggggatcccggtcgccgcgggggatgcgcatgagggcgtccggcccgcgaatcttctggtttggcgggagcccagggggcgcgcaccccggatcggcggcgcgcggcgcgggcaggatcgtgtcggtggggctgcggcagtgaccgcgggcgcgggggagggtgagaagcggcaactagcacttcgagtcgagcgggcgcgatggtgagcggccacatcttccactgccggaagaactcgtggccggcggaggagtacgtcggccggaccgcgctgcagctgttggatttcgatggcggggcgccgccggagcaggcgtggcggaggcggctcaacagccacgcgaacatcctcaaggagttcagtgtcactttcatggaggcaatgaggatgatgagccttggcctgagactatggtcgtatgttcgggaggaggcgtcacatggacggaaagcaccgatcgatccgttcacaaaagagcgctgtaaaccgtcagcttcccagggtgtgccacttggtgggatggggagcggaagcatttcgagaggtttcaggggagagttcaagaattggcacatcatacctggtctttgtgaaagttcgccggtcatggagaaccagttctctatatttgtatctcgagacgggggtaataagaaatactcatcagttttggctcctggacatcatgaaggtctgaagaaaaatagtgactctggaatttcttcatgggactggaatttaagtggtcaacactcgacctatcatgcattgttccctcgggcatggactgtttatgatggtgaacctgatccagaccttaaaatctcatgtcgtcaaatatcacctttcattcctcatgattacaaggatagcagtcttccaacatctgtatttgtgtatactctagtaaacactgggagagatcgtgcaaaagtaagcctgttaatgacatgggcgaattctattggaggtttttcgcataattcaggaggccactacaatgagcccttcattgcggaagatggagtatcaggagtgcttctgcatcacaaaacagccaaggataatccacctgtcacttttgctgttgctgcctgcgaaactcagaatgtgaatgtgacagtcttgccagtgtttggtctttctggagaaaaccatgtttccgcaaaggaaatgtggaacaccatgctacagaatggtcactttgatcgggaaaatttcagtgctggtcccagtatgccttcttctccaggacagaaactctgtgcagctgtctcagcctcaacttgggttgagccacatggtagatgtactgttgtgtttgctctggcttggtcctcacctaaagtaaagtttcaaaaaggatgcacatataacaggaggtacacccaattctacggaacttctgagaaatcggctgttaatttggtacatgatgccttaacaaaatataaactttgggaagaagaaattgagaagtggcaaaaccccatactgaaggatgaaaggcttccagaatggtataagttcactctttttaatgagctttactttctggtagctggggggactgtttggacagatggtcaacccccagcaatcgatgagaaaaagagtcctggttttaatcaccagaagtcctcaaagaggggtactaaagacaccaatcagggatctgttaaagatagacatgtcaacctggcagtggagcaagtacctcatggtggttacatggctaatggtgatgatcacagtgtatccaagttcgcagcagttcatggatcagaaatgcaagaacaaatcaatggactcaagtcagaagagccaattccttacttgatttcaaaggatggccctgaacacgttggcaagtttttgtatctagaaggagtggaatacatcatgtggaacacatatgatgtgcatttctatgcatcttttgctctccttgatttgttcccaaaaatagagttgagtatccaacgtgattttgccaatgctgtgctgtatgaagatcggcgcaaagtaaaatttttggctgatggtacatccggaatccgcaaggttaaaggtgcagtgcctcatgacctcggaacgcatgatccgtggcatgaaatgaatgcatataacatacacgatacaagcaaatggaaagatttgaaccccaaatttgtgctccagatatacagagactttgctgctacaggtgatatgcaattcggtcgagatgtttggcctgcagtctgtgctgctatggactatatggatcagtttgaccgtgatggtgatggtctcattgagaatgatggatttcctgatcaaacctatgatgcttggactgttcatggaatcagtgcttactgtggttgtctttggcttgctgcacttcaagctgcagctacaatggctcatcgccttggggatcggcactttgctgagaagtacaagctcaagtttataaaagccaaagcagtatatgaggcgaagttatggaatgggtcatatttcaattacgacagcggcacaagtagcaacagtagatccattcaggctgatcagctggcaggacagtggtatgctgcctcgtcgggcttgcccccgcttttcgatgagcacaagataagaactgctctgcaaaaaatatttgaattcaacgtgatgaaggttaaaggaggacggatgggagctgtaaatggtatgactccaaagggaaaggtggacgagacatgcatgcaatcacgtgaaatctggactggtgttacatacgctgttgctgcaaatatgctgctccatggaatggagcatcaaggctttacgaccgcagaaggaatttttactgcgggatggtcagaagaaggatatgggtattggttccaaacaccagaaggatggaccacagatgggcattatagatccctcgtatacatgcggcctcttgccatttgggcgatccagtatgcagtttctcctcccaaggctattcttgaggcccccaaagttaacctaatggaccgaatacatatctcccctcacatggtccgagcaattagcgagataagcattagaaaggtagcacccgacaatagatgtttccctagctctgccttccactgtgaatgctgatccgaaggtaaacatgcagctgctgagcaacttgcaaccttttttttggcttttttcggtttctccttgccccccccccccctttcaaggtccaggtgggggggctcaggagttcttttcttggatcagagggcttatccaaaccaccaccaaactcgtgactcaagagagttcatgttgtataattgtacagcaaactgttagtcacataatctttttttttcactttgaaagttttgtgctgttcacttgaatagagctagaaataaaagaactgggaagctggtgtctacggctaaccgtagggctgttggaagttaacgtcccatagctaggcaggtagcgttggaagttaatttaactttcgacggaatcacaagaagttgctgactacgacaccgtgttgccactcgtttggtctactcatcttttttttgttgctggaagttttgtgctgccaaagtaaccacatttcacaagaatagagctagaaataaaaggaaatctggtggtagttaggttttcatatcggcacttgtgttgggagttgggacatgtgcatgcaatccctatatcaaatattagctgtgttcattttgttgctcttggcgcccgagctttgccgcagcaccaatggcggaggaggagagaagaaacgcaagaaagtgcaagcagtatgtcgcacgtgttaatcaagctccaatgtataaaatgtattagtcgaacgaggttttaagctagcacgcacctggtgtctaatgtattgcacctcacttcctctctctctcatcttttcactcatctttgcaccttcttctgttagcaaacacaatatatgcagacgccctaataagcatgcatatttctgtgttacatgtatatatgaaccatttattgtaggttaaggttgctttgaatttttaaagtcaattctctcctgcttggagcactcca

SEQ ID NO: 30817 - DNA, 2685 bp, Zea Mays
acaaggacaaggttaccaaacgctccaagtccaaacccctctcctcccccgcgtcccgcgagctccgtcaccgccgccgctggcgagatgtcatcggtgacccgccctcagcgggaggccgactttgcacgcttcccgtcgtccacccccatcgtcatcgacaacggcgcttctaccttccgcatcgggtgggcgggcgaggcggagccgcgcctttcgttccgcaatgtcgtgcagaggccgcgccaccgcagcactggtgaaactgtctcaattgttggggacactgacccatctctaatgaaattctttgactgcacaagatcggcagttcgctctccatttgacgatgatgttgtctatcagttcgagtacatggaatatattcttgactatggctttgatcgattaggtgtcgattcagaggtgggccatccaattcttatgacagaatgtgaatgtaatccgtccttttctcgagcccgaatgtcagaactacttttcgagacatatggtgtaccatccatagcatttggcattgacaacgcgtttagttataagtacaatcagaaacttggaaactgtaacgaagacgggctggctatttcatgtgaacatggaacttgtcatgttgttccatttttgaaaggacagcctgtgttggggggcttgctgcagaaccaatatcggtggatttcacattactgattttctgaggcagcttctctgtctaaaatatccctatcacacggcaagtatttcatgggaaaaggctgaagagctgaagaaggaacattgttatatagctcctgattatatggcagagttgcagatatttaaaaacaataaggaagaagctgatgagaaaatgaggtattggcagctaccatgggtccccccaccaaaggaagaaccaccatctgaggaagaacttgcaaggaaagcagctttgaaggaaaaggctggtcagcgtttgcgagacatggctgctgcaaagagatctcagaagatagtggaactagaaaaacaactttcctatctggaggaactaatggaacaacttgatgaagctgaggaagaagaagcaacagctattctaggtagctctggatatctttcccagcaggaaatcagatctgccattttaaaagcatcacaatctttaaggaaagcaaaaggggagtccaatggcaatgatgagaaaacagatgcctcagcagttgataagtatccacttgtatctgttcctgatgagacactgacgccagaacagttaaaggaaaagaagaaacagatattacttaaaaccacaacagagggcaaattgcgcgcaaagcagaaacgtgctgaagaggaggctttgcgggagaaacaagaagaaaagaggcggagaacccagagttataccttgaagagcttcgggcccgatattcagaactttctgataaatttgagcagaggaagcgacagaaagttaatggtagtcagacaaatgggaaccatagttcatctgcaggtgtaggccgtggagaaagactaaatgcagctcagaaagaaaggatgcggctgcttgcctcagctgcttttgatcggggcaaaggtgaggacacttttggaatgagagacgaggattggttagtgtacaacaagatgagcaaagacaatgatgatgacagcaatgatgatgatgaatcggaacttgttcgaatttcatcgaagctccaggagattgatcctacatttgtgtccaaatccgaagctgttcaactgactccggagccacccaaagtccggccactaaccgctgaggattacagaattgccattgggatcgagcggttccgttgccctgaagtcctcttccagccaggcatgattggaatcgaccaggccggcatcgatgagatggtcagcatctcactcaggagattaatggaggacgagtctgtgaaggagcgcctctgccagtcgatccttgtcactggcgggagctccctgttccctggcatgatccctcggctggagtctgggatacggcaatatcggccctaccttgctcccctgaagcttgtcggagcagctgaccccattttagacgcgtggaggggtgctgccgcctttgcggcatcaagcaagttcggcaaacaaacgttcagcctagctgattacggagagcatggagagaacctgtttcatcggtacaacattgtttactcactataaccggaaaatgacatagtgatcgaaccatctcagtcaggctatttatttaacagctgatacaaattgatgtagcaacaaagtttttcaaaactgcaattgatatttttatgtgattggaattggagggttcaaatggtgaaggaatttcataaacctataatatgtgtgcctttttttagtcttcccagggcacaacttgtttaagaacaggtgagctgaatcctctataaagctaaggtcactatcgactatatggatggataaaaagaacaaagttgtccatggttacttgcataggggcatttctttttcattttcttttttagtctctattttgttatatctaccattaattaaaaaaaggaacacagtcttatatagggggtatgcctttttattttatttttaaatcttctgtttcttcagggttcctaaatctattttttgttttctttaacacac

SEQ ID NO: 30818 - DNA, 2537 bp, Zea Mays
catcgaggccgccccgtccatccgtcgacacgtgtcggagcacccttctataagtaaccccgggtacagctgcgcgatgttccattccaaaagctctcgagacttcctcagcaatcaatcagctttccagcgatcggcagctcctcgatcgtttcgaagctccaatccgcccggccgcctccgcctgttgccactagctaggtgatcgatcgaatggactgcggtggcgcgctgcagctcccgcctgggttccgcttccaccccaccgatgacgagctggtgatgtactatctcctccgcaagtgcggcggcctgccgctcgccgcgccggtcatcgccgaggtggatctctacaagttcgacccatggcagctcccagctggcatggtgatcggtggttgcagagaaggcgttcggtggggagaaggagtggtacttcttctcgccgcgcgaccgcaagtacccgaatggctccaggcctaaccgggcggccgggacagggtactggaaggccaccggcgccgacaagccggtagggtcgccgcgccccgtggccatcaagaaggcgctcgtcttctacgccgggaagccgcccaagggcgtcaagaccaactggatcatgcacgagtaccgcctcgcggacgtcgaccgctcggccgccgcacgcaagaagaccaacaacgcgctcagggtaattcactacaccatgacctttctcaggagaacatatttatctccccgaaatactgacacttgcagttagagggaaaaaatatagagagaagtaaaaaaaaaaagattgatgtttgattttaccaatgctgcaacaagaaacagtggatcgaatcgaaatgtgttgttaggcttgcaactatatatgcagattcttagttaagaggaattgaaaaaggtaggcgtgcaaattgtccatttgcagcaagctcgatcgagttgtccctttcgtgacagcgcgcggctacttgggcaggataggctctagagacatgtaaagcgcgggcggcgtggcgtcacggctcacgcacgccgcgatagagacaagcgcggcaaccatggtccatggccggcgcagagccgccgcctgatcttatcgcccgcgcacaaattaccacatgcgcggcgcgcaccggatccgacgtcacgtcgacctcatctccaagcctcttccaaacactccaatgcctggatgactgggtgctgtgccggatctacaacaagaagggtgttatcgagcggtacgacacagtggacgacgacgacggcgacggcgccgtggccgaagacgtcaagccggtgccggcgccggcggcgtcgaagaacccgcgtgccagtgcccgcgtaggggcagcagcggcggcgccgatgaaggtggagctccccgagtacggcggcggctactacgactacgacgacctggagacgccgtcggcggggatgctgtgcttcgaccgcccgtcggccccggcgcccgcggaccgcgactcaaacaactccgtgccgtggacgacgcaccacacgcacacggacaactccagcagcggctccgagcgcgtgctctcgccgtcgccggacctgcccgaccgcgaccacgccgagagccagcccgccgccgccgccgccgccgccgggtggtggcctgtcggaggcgactggggcagcgccgccgaggacgggttcatggtcgacgtcgacgtcgacgacgggagctcgctgttcgggccgctgtccccggggctgttcgcgcgcgtcgacgccgccgcgttcggcttcggcgacatgctcgcgtcgtacctgcacaaaccgttctgatgcaacgcgacgcgacgcgagcgcggccaccccgcgcctgcgtgctcctctaggccactgaccactgacatggacattctggtcgtcgtgtagctcggttcaggacgaatcgagagccggccggtctaggtgtagtgctgcgaaaccaacaccaccgtgcaggcacactctccgcgggcggcagatcgacggacaatcctgcgcccgtaggtatataccggtcgtcgatcaggtgttcatcagttcttcattcattcaggtcgacgtgcaactggtaattgtacaagatcttgggcagctgccgtatggagatcgatgagtgccgagttagcatggaggacgactggtggtcatggttggtacagagctagctagccgtccgatcgggtatcggattaatctgattgccagttttgtttttttttggtcgcgtcaagtagctgacatcttaagaatgaagcctactggattcagaggcctgttgatggtaatggtatggtgtatgtatatcgtctagtttagtctagcctagctgtacttagaattggttcaggttggtggcaagcagagcgctgtaatttttgttgagtgtttatgcactataattgcaacgtcatgtattagagtcgctctcagcggtcgctttctcgtgatcgaaaattttgcgatgcaaattatcctaataaagttgttgtaagatgtaattacgt

SEQ ID NO: 30819 - DNA, 3389 bp, Zea Mays
gcaaaaaagcataattttgacatttctaaataaattaccgtatttttttcgtctcatcccctctccatttctttcttggtttcctcctctatctctcgtctccctccgaccgaattaaaacgctcgacctgccaagccggactgaaccctaggccccgatccggcgtctcgccgtgctgcttggatttgatcgggcggggttggggtcgtatcggcggcgggatgaccatcccgagcgcggaggggttcctccaggcgtcgagctgcctcccgtgcacggcgacggaggagcgggaggtcgttgacgcgcttaccaaggaggccgagaagaatgtcaagcacggcgatctccgctatctcgtctcgcagagctggtggatggagtggcaaggatatgtgggtctagtcaattatggagaaagtggcaccgagcagtttcctcaggccacaaatagacctggagagattgataactcgaagcttgttttggcagaaaggatcaatggtagtgaggagccagagcttcaaaggaccttgagagaaggggagcactatactttggtgccgcaagaagtttggcaaaggctatatgaatggtataaaggtggaccagaaatccctagaaaagttatttttgacaatccaactgacaagacttacgtagtggatgtctaccctctctgtctaaaactaattgatgcaagggacgactctgagaaagtttttaggataagtagaaaggccaaagttcatgagctttactcaatggtttgctcgctcatgtcagtagagcagtctgagattgtcatctgggattattatcggaggacaaagggcaaggagttgactaatcaaaatgatacactagaagaagctcaacttagtatggaccaggagatcctcttggagatgaagctaggcgggggcagttcaggtttcagtgcaagatccacaaatgatgaattggcattaattccattagaaccctcaacatcatcattttctattgctggagggcctacattttcaaatggtttttcatctgggattggttctagtttttcgcaagataatagctttagtcctttattaagggatggagaagatggttacaatagtctcagcaatggaactaaagatgacactcacggattgagtggattacataacttgggtaatacatgcttcatgaatagtgccatacaatccttggttcatacacctccattggtacagtactttttggaggactatacttgtgaaataaacaaggaaaatccactaggcctccagggggaacttgcaatagcatttggagagctacttagaaaactttggtcgtctggtcgaacttctattgctccacgggcatttaaatcgaaactttctcgatttgccccccagttcagtggatataatcagcatgattctcaggagctacttgcgtttctgttggatggtctgcatgaagatctgaaccgtgtaaaagagaaaccatatattgaggcaaaagatgcagatggccgcccagatgatgaatttgctgaagaatgctggaattaccataaagctcgaaatgactccataattgttgataagtttcaaggtcaatacaagtccacattggtgtgcccagtttgtaacaaaatctctgttacctttgatccatttatgtatttgtcgctaccattgccatcaacagtttactcggatgattactgtaactgtattcagtggtacgggagatgttcttccaatgccttacactgtgactgtacagaaaaatggaaactgccgtgatcttactaaagcccttgctgatgtctgctgcttaaaaaattctgagacattgttgcttgcagaggtatacgaacgtcggatctaccgctacctaacaaatccaattgagggacttcatatcataaaagatgaagatatacttgttgcatacaggctccctgttggtcatgaaaaacttttgaggttggagattctgcattcgagggcagacagatttcttgtggagcctcagtttaatatcaataggaagctcattgggtgccccattgtgacttgtattccaaatgactctactgcaaaatctgatatttatgcggctgtatcttctgtcttggttccatttgtaagagcaaaagcacatagccctgatgtgtctgctgtcaagttaaatggcaatgggccaagtttggacggtattgtcctgaccgataatggcaccaccagtgaggagggtctctctacatcaagatcaagggaggacgataatgcagctgacaatgagcttttaccgtttcagctttcattgactgatgaaaaaggtagtacaagaaatgctatagacatggattctaatcgtgttctaggactagttattagggttttgatggattggggtgagaaagagcatgggatgtacaatattgatcacatggatgtacttcctgaagtcttcaagcctggttttatgtcaaagaagacccgtcaagaagcagtcaatttattttcatgcttggatgcttttctgaaggaggagcctctagggccagatgatatgtggtactgtcctgggtgcaaggaacacaggcaagctagcaagaaactggacttgtggaggttgcctgagatattggtagttcatttgaaaaggttctcgtacagccggtatatgaagaataagcttgatacatttgtgaactttccgatccatgacctcaatatgagcaagtatgtgaagcctacatcaagaggtgaccagcaccccgtgtatgaactctatgcagtgataaatcattatggcggtctcggtggtggacactactctgcatatgcgaagctagttgaagaggacaattggtatcattttgatgacagtcatgtttcctctgttaatgaggatgagatcaggcgatctgcagcatatgttcttttctaccgacgagttggaggttcaagtacagcggcaaacggtggtccagttgacattgaaatggttgattcgctagagacatagttccccagatcaaagcctgagtataacatgtggatcgagatatggagatcagaagagttatggaatttgcatgtctgctccggaatggaatatttgtgtatgaagcctttgacattttgaggcatggcagacaactgaggtcgaaatagcgtggtatccgagaaaacgatgaccttaattgaaaattttgctgatacgctgatgcagcacttagggtctactattgttattggtgtagccaagggattgcaactgggaaaaatggtgtaaaaacgctgcatatttttttttgcctaagctacagctgtgctacagcaaattttgattacggttgtttttttaaaatgcccaatcatca

SEQ ID NO: 30820 - DNA, 3368 bp, Zea Mays
cctcgcaagcctagctagctagctgcctgcctccagcctcctcatattcctccactcaccgttgccatgccaaagctcccacacctctcatgcatgggcagagggttcatggccacggcagcagccgcccacgttcgccgccgcatccaccactcaccacccgatcgatggggagcaccggagcagagcagagagcagcgcgcgcgcgaaccctaaaagccttcggtcgacctgtatggatcggatcagccggagcgcgagcgtccagcctgccacgcctgggctggtgcgcgcgcgggcccacctccccgctataaagcgggaccgccggtacgcgctcctcctcaatgcaatgcaacccaccgccagtcgcctcgcctagattagcggccaaagcacccaggttgctctgtggcgtcgtctggggagtgagtaagcggcagcagtggcggcggcggcccggatggctgccggtccggcgggcgcgcgcgcggtgacagaagagagtgagcacacggccggtgtgacggcaccggcgcggatgtgccgtcgcggccgcgtgctcactgctctctctgtcatccgctggcacaccctcacggcagggcgcggctctcgctcaccgccggccggcgccgcccactgtggctaggctagcccttatatcctccctgcatgacccgtctcttcttaattcgttcgcagtagaatttcgatctcatcttttttgggggcgttttccggccggccgtctttctacacctacattcatggcgctgtttgatttgatggttgatggaatggaacgaccgggggtttactctactactaggtttttttcccttcttgatggcgctgtacttttctcgtcgtttcttcttgggctagctagcttccctccctcggcctcgtacgacgcccctccgctcatcttttccgaggagccctatgccattaggggaagtaccaccacatttttttaactccctttccggcaaggatttaatttactgtaccattcatgaatcacccccccccccccccccccccctctggaatatggcagcgcgcggcatcgtcaggagcaggaatctaccggacggaggatccgtagttccctccaaggtgtttctgaccagatctatttattactagtaccactactcagttcttcccctaccgtactctgtctcttctttcctttccaggcttactgttaggctcgagagccgatccacaaacggcgccgcgtgtgtcagggataagatgagctcagcaagaggcagagtggaggaggaggtgaggaaagagcaaggaaaggcacaatacggtggcacggtcggcagatctatcccggcctgccgccgtttccgcactaccatgcatgtcatcaggattgtgtctccatcggtcagttttatcttctactgtagtcctttctgttcttgaatagtcatgtcgctggggtggtattcaaagtaggagtaatggtgtatatggctccggatatatatatatatatatatatatatatatatatatatatatatatatatatatgtgcaggagatactgttgagatacagcttgctagcggctgttccattcatggtgcttgtgcttgcattgtactcgtcagaatccctggccgcacacgccattcgtttgactttctgctgtcggactagtaaattcacggaccgacgaccggcgatataataatacattcatggattacattaagtttatatatatatgctgcccttcgatgttcacaaaaaagagattgttttgaataatgaaaacaaatactcctagttccgcgcgaataataattggaggatttactttctactatgattaattatttggggtttataacttaacagtatatcctagcctcaccgttcctagcaatggaagtttcgttttttcttttgctgtttttatatatgggcaagcaatgaacttcgtccagctggataatgatgtgcacaacaacaaagcagggacgacacgtactagtctggtcatatattcgttaggaaataaacatttctggtacaatatagggcaaccatcgcgttgctaaatctgagcctgccagctcctcacgagcaggagaatgttgattttccacacacaaaatgacaattttgctgacctcaaaatttgtaagtttgcatatgttcttggctgaaaaggcatgggatcggtgcaagtgagtgcacatatgtttttctatatcaacaaaagaagggcgccaagctagttactgctattctttttgctggacaaccgttggactttcaactactacctaggttgcaatatcacatgcttccttcaatagtataataaagtcagattgttaccttaaaattgctagcctactagcaaaacaccaatatatatttttgttagtttttcccaagttccaacatgcctggcaccggctaatggcaattctattatacataaagtttcaagtatataaaggcctgggaccgatcatggtgatatatacttttttcataagcatgtaacaacctgtatcatctcactcccacttttattgttccataatgtttgtttgctcaaacttatctcaaatctactatgtgtggctatatgcacctgcacatcaaagcttccttttgctatggcaaggtggtcatgtagaggtggtggtctggtggacatcgatccctggagaatggcttgaacctttcatttgcgtgattctagcatagacatctgaatatctgatggttagtgaaaggctggataccatcatatatacgtgtcatatgccatttgaagtgtgccatactaaaattgtagtcccaggagtattatgctttggctgtaattaaactttaaatagtgttctgtacatatgtattacagtgcctcattgtctcacacatgggctatcagggtagccccgaccatatatggatgaaggagaggaagaaaactatgtataaaagatatatagaggatcagagggagaagaaaaagagaggaagaaagagaaagaaaaggagaagaaaattgtgtatgatgttactattcagatttattcatggtcagctattcagagattgatgcatggtcatgtagccctttcatattctaccacataacaagagattcacaatcaaataaagcttaccaggactgctaggtatcgaatcttagggcatagctactcaagtttgatgtattaagaacaaggtcattccacattagctgataatcaaatgggggaaacttccagtgtcaaagcatctttgaaaaatacctgtggcgtgttcaatatctggttcaactcaaattgaatgctactctaccacccttttata

SEQ ID NO: 30821 - DNA, 2735 bp, Zea Mays
tcgttctcgtctcccagccccgtcgccgctgacgtggcgcccaccgcgcggaaaaaaatattgcagatattttcctcaccgctccttcccccctctctgctcgtccttgcctcccaccgcaccgccggctcttgctctgctcggttcctcctggcagcaaccgaatgtctcccgacgccgacgccgccgccgggggaggaggaggtggagaggcgagcgccggcgccggcgccggcgcgtcgtcgcctcccgcgtccgcgtccgcggcggcgaacggccgggcgctggtgcggtgggaccagatcctgccgcgccgctccctgcgggtgcttctcgtcgagcacgacgactccacgcgccagatcgtcaccgcgctcctccgcaagtgcggctaccgcgtggccgcggtcgcggacgggatgaaggcgtgggaggtcatgcgggagcgtgcctacgacttcgacctcgtcctcaccgaggtcgccatgccctccctctccggcatccagctgctctccaggatcgccgccgccgccgagtgcaagaacatccccgtcatcaatgaattgccagacaaatggatcagaaaataatgcagccagcaatcatgtaagtaccaatgttgctaatgggtcaaagacaggagaaaacaatgatgaggaaagtgatgcccaaagctttggtaacaaaagggagactgaaattaagagtgctgagacgttaccagatattcgtagagatgaaatggctggctcatccaaaaaaattgaactacaaaataagtctaatgatggagtaaacacaaaagtggatgcgtcaaaagatagcgatggtgctccaagtgaaagtgagaagaatgtgcgttccaaatgccttaatggtattacttctgcaaaggtggctgagcaaataatggataatgccttgaggatcacggatgcaagttcacgtcgtccaaccaatcttggcaaagatttggctatgactgaaccagcagctgatagaaaatgccaatctttagtgatggaaaataatgctgtcaaagaaaagaaccctggtgaaaagtcgaagagtgctgtaataggtcatgctgattcttacccctcccaatttctcgagaccaacttgggaaaacaacagtatcgtaatggttacaagaatcaagaattcagggaaaaagatatctttaatcactcgaattcttctgccttctcgagatatggcaatagaaggatagaatcatcaggtgagatacagtttcttccttctcgttgcattgttgggcaagagcagcatgttcatggcaaggacccagttttccaacccaatggggtcttgctgcctcccaatgaccataatacaggtgagagtacaaggcaagctcgaattactctggacagtagcatggagggtgctgacatcatttgctccagtagtgctagggaagatgctggtgcaagtagttcttcccatagaaaggacagtatgagccatccctcatatgggtttgtacctgttccaattcctgtcggtgccatgatgccctatcattgtggtgcaattctgcagccagtatactacccacagggtccacttatgcactgtaattcatctgcaatcaacaaggcaacaattcatcaaacctctggccaatctaactaccgtgaagattgtggtagtggtagaccatctcaggttgatgaacacaaacagtcagaggaaaagcaccagttgcatcattcaagacaaattcatcgggaatcaggacaaccagttgacatggttagagctcacatggatcatgctaaccagagtgcaagctgcagccgggatatctgtaaaggaagcggatgcacgggtagcggtgaagccgataccaatgcgaacacgacggttgccctagagagtggcaacgagagtggcatccaaaatagtgacaggtctcaccgagaagctgctttgatgaagttccgcatgaaaaggaaagacagatgcttcgataaaaaggtcaggtatcatagcaggaagaagcttgcggagcagaggccaagagttaaggggcagtttgtaagccagaagctgaaagcagctatggcaacggaagccgaaactgactcgtgacgggcgctagtccagaactgtaattttggttcttcccttcgcgccaggtgtgggcgattggactggtaagtctgaaggctggcaaaagtttttttttcttccttccatggttagcctttctgtacaaaggtgaactccacgtcgggtgtttgttggcatccaagccttattttttgcgaggtacatcaagttgacaaaatgttcggagggatagggtgaaaacggtgcaagcgccatatttcgtccatacgcttaggtgtttgtggagtgtgaaagcagagcctgtacagcatattcaccacccattctgttgccattacaattgtagtaacttgtaattactactatgacaaaagtagacactgttgtagaacttacagccagcaggtcttttccatatgggacagtagcattttatttattaattggttgatcatatgaggacagtcccgaatgcaggacagttaagatttgtttgatccaatccaatcatccagcattttgcttgccttaaactggacaaggaatcagcagggtgcacaccttgtccttgtcagctattggtacacagcagcatatatcctttgcctgtgtttgctgtactactactctgg

SEQ ID NO: 30822 - DNA, 1224 bp, Zea Mays
tatatatctactacttattaagacactaagagtagcctgtcgttctgccttcgatcgatctcgaccgtccacgtccggctcgctcgttcctcccatctgctcaaccgtccgcccacacgaactcgtcggttcgtcacctcattctcgacgcccaccttgcttccacgccctcacaaaactcacggaggccattgtcatcggcgcccttccgcctcatcctttccacgcccactactcttgccccctcccacgacctcaactctgccatggcacctcttcacgaagtattcctcctccacgacgcccttgccctccagtggtcgacgcctccacctcgagcacacctgcctcatgcccgcggcctaatctgctcaactgagggagagcgaggtggtggtagcacgtcgacaattcggtcgggagtcgacactcgggcttggggtatcgtctcgcttgcccgtagcccctttgcttcttgccatccggcttctcggcggcggagaagaggaggggaatggcgcaccgactgttgtgggacgtgcaggcgaacgggtgggagcgatcaaatttcaccatcgtctgcgagtcatgcctcggcgacaaaccctacgtccagatgatatagagttcatgaaaaagaaacttaaggaccttggtaagccaatgaagaggagcaatgataagctgctcaaaattgagcatgaattatgtgagaggattgatccagcataatgtcgaggagactggagactaaacttggaggtgctactgaaggatgtgactttgagtcaaagggtaaaagtgataatgagatgtgtgtgttgtattttcattcctcgggacaataatgttatttgtaggtagaagttattgtacatatgttatgtgttttctgcctgatcgtcgtttatgcttgcctcttaaagtaacaagtagcacatggagagcttgaattgaattcaagcttggatatgattggaaaatatttgtattagatcacctagaagggtgattgatgcttgttattggccaagcaggtagtcagatgaagattgtaaaaaacaagcatgctcaacccttcaagaatacacagtttgagcttgaatttggaaaggggatatgccacaattcagagttttttgaacagaatttctagagcagttgttcctataaaataatattttaggtcttgaagccaccaccgttggattgacatgatctgtg

SEQ ID NO: 30823 - DNA, 294 bp, Zea Mays
aagcattcgatcggtgtatagatgagatctctgtttcttgtttcgcctcagaaccagattcaacataacacatgtactagtaccattcaacgttcatgcccatggatcgaattgatcctgcaatccccaggacgccgtgctgttgtagtagagatctcttggtccagatgcttcagatgtccaacccatcagaagaatatcctggcgtcgctgcccggagattgcgtgatggtacacgcgtatcatctgagtctcgtgcaggccgacagccaggcagtgcatgagatgatccat

SEQ ID NO: 30824 - DNA, 763 bp, Zea Mays
ctcgaaccttaagctcactaggataagggacacatcagcagctgaagcaagggcaggaaaggatatacaaggtataccatgggagaggatacacatagccaggcaagactaccgaaaagctaggttggaacagtataagaactatgaaaatttccctcaatcaggagagctcatggataagcaagtggagaagagcagcaagtattatgagtttcagcataacactagatcagtgaagccatcaattctccattttcagaggttcttgacttctctgggcacattgctccggtggagaagcatcctggcagtttgctagaaggtttctctggggttcaagttagcacacttgctgtgaatgagggtttgttggtagctggtggttttcaaggagaactgattggcaaggatttggaaggatgtaatataaaattctgtgcaaggacaactttgagtgacaatgctataacaaatgccatagatatacacagatcgacaagtggaagcttgcgcattacggtatctaataacgattgcggtgttcgtgaatacgatatggagagatttcagctcttgaaccactaccgatataactggccagttaatgcctgatggagcctccacgtgagggggagtattggagtataaatgagttgcccacctttccataatcagcttaagaatttgggttgaaatgatcagtgcatgcaacttaataatatatttaatgctttgacattcattatttgcttctataacaaca

SEQ ID NO: 30825 - DNA, 2611 bp, Zea Mays
ttccgttccgttccgttccgttcatctcctccttataatcctcctcctccgcccgtcgcctgccgcaccgcacccgccccggcctcctccgcagtcccatgagccaggccgcgcccgtggcgaaccctgctcgcgccgcgcctgcccattccccctctgccgccggtgcccggagtgcagatccgtctgaccgcgccgccgccgctctcggatatcgctttatccttcgtataattgtattgtcaaactggcacccaccggaatcatatagcctggataaccagcaagctgctctccgtctcctctcatcagtatgtatccagcttttaaaggtgataaatccaagattctgccagtaaagatgccgatctgtagctgtgaagaaactatccatgagttcgagatgttaacacgcgatgctgggcgtgtacagaaggatacactgaaaaagatcctcgagttgaatgctgatgctgaatatctgaacaagttcggcctcaatggcaggactgatgtagagagctacaaatcctgcatcccgctgtgtgtgcacagtgatcttgagccatacatccataagattgctgatggtgatagctccccactcctcactgggaagcccgtcacctccctttccctcagttctggtacaacgcagggaaggcctaagttcttgccgtttactgatgaattgcttgagaccacacttcaaatattccagacttcatatgcatttaggaaccgtgagtatccaattggaagaggaaaagccttgcagtttatctatggtagcaagcaagtggtaacaaaaggcggcatccttgccacaactgcaacaacaaacttgtaccggagggcacgatacaaggaggggatgaaggatatccagtctcaatgctgcagccctgatgaagttgtttttggctctgacttccaccagtccttgtattgtcacttgctctgtggtctaatatactctgatgaggtccatcaggtgttctcgacattcgctcacagcttagtccatgcatttcaaacatttgaggaggtttgggaagatctctgtgctgacataagagatggtgtcctctcagagaaagttacagtgccatcggttcgtgaagccgtgacaaaaatcctcaagcccaatcctgagctcgctgactcgatctataagaagtgtacgggcctgagcaactggtacggtgtaatcccagcactctggccaaacgcaaagtatgtgtacggtatcatgacagggtccatggaaccgtatttaaagaaactgaggcactatgctgggcacttgcctctgataagcgcagattacggcgcatctgaaggatgggttggtgctaatataaaccccacacttccacctgaacaggtgacatacgctgttctccctcagaccggttattttgagttcattcctttggaggtggagaatagtgcctcctccattcactacttagaatcagaaccagttggcctgactgaagttgaggttggcaaaacctacgaagtcgtgataactaccttcggaggtctataccgctaccggctaggagatatcgtgaaggtaacgggcttccacaacgcaacaccggagctccggttcatctgccgcagaagcctagtcctgagcatcaacatcgacaagaacaccgagcaagacctccagctggccgtcgaggaggcagcgaagctcctggacgcggagaagctggagatcgtcgatttcaccagcttcgtggagaagtcaagcgaccccggtcgctacgtcatcttctgggagctgagctccgacgcgagcgaggacgtcctgcgaggctgcgcgaactgcctggacctagccttcgtcgatgctgggtatgtgggctcgaggaagatcagagccatcggcccgctggagctgcggattctgaagaggggaaccttcaaggagatcctggatcacttcctgagcctcggtggcgccgtgagccagttcaagacgcctcggttcgtcaacccgttgaacgtcaaggttctgcagatactcagtaggaacaccaccagaagctacttcagtaccgcctatgggctctgataaataagaaacgctgctagtagttccatccatgtaattatatttatataaaaaaatattgcttcactgttctgttctagtctccaggtaaaagaaaacaatctactcatcctagtcctgctggcgccctgctagaatgtctgtaaatccatatgcaagcaaatgcattcagtctctgcctgtgttctgatctttgtgcatagcaagcaaatgcattcacagtctccactccagactccagagtagtagtacgtacacaaatactgtcactgggtattagtgctaatcttttttacttgtcctgacatcagattcagttctacacacatagaaacggacagaagatacatgaaactgaatacgtaaataatcaagcacatatagaacgtcgtggctgcaagagaagatcacaggctgtagttgacgtcgatgaagctgaggatctggtgcacggcgccggcgatgtcctccgccgagtaccttgcctcgccgacgatctatcacacacacatattcaat

SEQ ID NO: 30826 - DNA, 2381 bp, Zea Mays
cgcgagtaaaacagaacacagggagaagaaccggtggcaaacgaacagggaaaagggtaaattcgctttcagaggcaagcgctgcgttgccacacagcgggaatcctgcccagagctgccgaatcgggtccaatcccgtcgacctttctggccgccgccgccactggactccatccagaaattaccttcgattcggccggggccgtgggagcggggatggggctcggggaggcggcggggcggctcctggcggccgtggactgggagcgagaggcctacccggcgtacgacgacttcctcgcgctccccgtcttcgtccttttcttccccaccgtccgctacctcctcgaccgcttcgtcttcgagtgggttgcaaggaggcttataaatagaaatggacatcagagcactaataatgaaacagaagaaggaaggaagaagataagaaaattcaaggaatcagcttggaaatgtgtttatttcctgtctggagagcttttagctttgtcggttacatataacgagccttggttcaccaataccagatatttttgggtaggaccaggagaacaggtctggcctgatcaaaagataaaattgaaacttaaggctgtatatatgtatgctgctggattctacacatattccatatttgcacttatgttttgggaaacaaggcgttcagactttggagtgtcaatgtcacatcatgttgctactgtcgtcctgattgttctatcttacgtgttcagatttgctagagttggctctatagtattggcaattcatgatgcaagtgatgttttcctggaagtagggaagatgtccaagtacagtcattgtgattggcttgccaatgtttcgtttctgttttttgttatttcatgggttcttctccgcctcacttattttccattctggattctgagaagtacaaggtaaattcttctgttctggctcataagtctatcagattcttatgccaagaaaaatcatcgagttcgtaaaagtttgtttgcatatacagtcgaaagtagattggtatcttatttgttctgtactcaaacggttattgtgaaaacttggacagtgacttcctctagtctaaagaacattcctttatatagtcggacagtagcatcttagactctaaagagaattttactatgtacttccattggccacacaaatgaaggtttggatattttttgtatgcaccactggagacttcacacctttgtggacttggctaatcatataactcagtgtccaaaatatatcataataaacaattatagacatgtcaaattctgacaaggtaccatacagattcgccccattgcagtgttggtctggttcacagtttctttgttgtggtgcttgttgagttgctgtgaggttgtggccttcatcatgtgagttggtgttgttttctgttgtaactgtagttttccctctgttcttctccttctcaattaatacataggcctactgttaacctgctggcttttttaaaacaaacaaacaaacccagtttcaccacttcgctttagaataaactaattgaatgtttctggattcttttcacatgatctgactgaacccatttgtctcagctatgaggtcttgttgactttggacaaaaagaagcacaattttgatggtcctatatactattatgtgttcaattcccttctattttcactacttgttctccacatatattggtgggtcttaatatatcggatgcttctgagacaaatcaagacaagaaatgttggagatgatgttcgatctgattctgaaggagaagacgaccatgaagactgattggcgtcaccatcttagtttgcatattatgtcggtgctagaagcatcacccccaataccgtccctgagcttatacattctttggctggattccaagaatacgtgcagattatgagaggacgagcatttgttcctcacgagaatcaccgaagccgggctacgatttcttctgtctcgactgctcatttgtgttgtactaagtatgcattagaaacagcgctgcaatgtgttaaaaaagttggatgtcggatataacattcttgtgagtgttcagacaaagtgcagcggtaaatgtagcattccagaaaaaggactggctgtaaactatatggcctttctttcgacaaaccattgtaaaaattgtgtatgccaggatagccttgcttgggatttaccacaatcccaatcagaaactgtcccttctgaagcatgtatttcaccattcagtgattcgcctgatgataatttgataaattcatttatccaacacacctgatgcatatttgctgaaaaatggttcccagttacatatttatcataggggagaccgg

SEQ ID NO: 30827 - DNA, 1448 bp, Zea Mays
gcgagtggcggggagaggaggcggcggcggcaagggcgcgacgggggaggatgatgtcgctgcagcctgcaggagttgtgttctctggccttgagagaaaggagtcgccaattttagtgggctcctgttgtgtttttcggtccattcctcccaaggcccagcatctgccagtcgcatgccgtgacgcacaaaacccacggcggcacggctccattccgcgtccgcactctctatataaagtgtccctctcttccctccaagccctagacgcaccccttcctcgtttcgccgcctccgccgacaccgactgcctacctcagctgccgtcgccatgggcagaaggcctgctagatgctatcgccagatcaagaacaagccgtaccctaagtccaggtactgccgtggtgtccctgaccccaagatcaggatctacgatgtcgggatgaagaggaagggtgttgatgagttcccctactgtgtgcaccttgtctcttgggagaaggagaatgtctccagtgaggcgctcgaggctgcccgcattgcctgcaacaagtacatgaccaagtctgcaggaaaggatgccttccaccttaggactggaatgaggggtgcctttggcaagcctcagggcacctgtgctagggtggacattggtcaggtcctcctttccgtgcgatgcaaggacaacaatgctgcccatgccagcgaagctctgcgtcgcgctaagttcaagttccctggccgccaaaagatcattgagagcagaaagtggggcttcaccaagttcagccgcgctgactacctgaagtacaagagcgagggcagaattgttcctgatggtgtcaacgcaaagctgctcggcaaccacggcagacttgagaagcgtgctcctgggaaggctttcctcgatgccgttgcttaagtgcggatgcgaatcctgacgttttgctttagcgtatcttactttgcttcgtggaacatgaatttcaagtgttttgagggtattacagtgccttatgtgaacttgcctatcttgtgctgaacatcggaataatacgtatttgtgtgccatcgcctttccggagctcaccaaacagtcgttcctgcagcagcgtgaaactggacttcagagagaatattgggacgagagtgcgcggcggagttgtacattttttttgtttttcttctaaaataggatttaggattaggtgttttggatttgttggagttgctctcaggtttaattatttttaatccctaaaataccaaacggatgactaaaataggtattctaaataggatttctagtgactagggtttaggagggtaactaatgggatgtttggtttgaggaatgatctagtctattatcttctcactcaatatttttgtttggtttgtggaatagaatgggttgatccatcaccgtctcattctgtatagttatt

SEQ ID NO: 30828 - DNA, 2178 bp, Zea Mays
cggacgaacactgtgcggatctgtaaccgtggcaagagcaggcaatggcggaggcgaatgcggggaaggagaagaaggaagtggtgcggctggagcgcgagtccgtgatccccatcatgaagcccaagctcaccatgaagctcgcctacctcatcgaacatcagtctgacagagaagaattcttgaagctctgcaggagggttgagtacaccataagggcttggtaccatctccagtttgatgatatgatggaactgttcgctctcttcgatcctgtgcatggtgctaaaaaactcgagcagcagaacttcctacctgaggaaatcgacacgcttgagcagaacttcctgtcctatttctttcgggtgatggaaaagagcaattttaacatagtaaatgacgatgaggttgaacttgctcattctggacaatatctgttgaatcttcccattaaagttgatgaatcaaagttagatgacaaacttctgtcgaagtattttaaggagcaccgtcatgaaaacctgcccgacttctcagacaagtatgttatatttcgtaggggcattggattggaccgcactagcaactttttcttcatggagaaagtggacatgatcatagctcgtgcatggcgaaggttccttgagaagacgagactgcaaaagctgttctcaagaaagaaaaatagtaagccaaagatagattccaagaagaatgatgatttagctagtgaaatagaagacaaggagctttatgttgaacgcatacgtcttgaaacaatggatttaagctttgggaatttatttggcaaggtcacaattcaagagcctacatttgaagaggtgattgtcttgtataggagaaaaagtccaaagggccaggatgatagggcaattcatgtaaagcacttcaaaaatatcccaatggcagacatggagttggttctgcctgagaagaaaaacccgagcctcacacctatggactgggttcaatttattgtttctgttgtcattggacttgttacactcatcagttcactggaaatgcctaaagctgatttctgggttgtaattgcaatcctctctgcactggcaggatattgcgcgaagatctatttctcgtttcaacagaatatggcaacctaccaaaacttaatcactcaatcaatgtatgacaaacaactagatagtgggaaaggcacactcctccacctctgtgatgatgtgattcaacaggaggtcaaggaggtcataattgcctactacattttgatggagaatggaaaggctaccagtgatgatcttgacttgcaatgcgaggagttaatccaggaagagtttggcttgcaatgcaattttgaggtgatggatgcagttcagaagctggagaggcttggtgtcattacaagagtgagttctcacttgtttctttttcttctcatggtgccacctgatcagagcatagggacgttttcttacagatacagtgcacagaataacgatttttgcagacacgtttacagggccagaagtttttgcatctactgaccatcatgttgtcacgtattgttctctgcttctttttttctttttctttctgcccaatactgaaggccgttttgcatccaggactctattggaaggatttgctgtgtccctctaaagcgtgccaatgagatcatcggcgcgaccacggaagaactggttatgaaagccaggcaaagctagcaatctattattttgaacaatgtagccgcattgtagattcttgcctgatggcgctgtaacgtttatggttactccagaaagtccaaacactgaactcttgcacaccaggagataagtacattctggtcatctccacagtagttctgggagagctacaagaaaatgtggttgtatttatttttttttatttttttggtggggggtactatggtttgtggaacgtcgtcgagggtgttgtaagcatgtagcattcttttgataacaagcgtggtaggaaggatgtttgaagaacacatacaagggctattatgttgctggattgatgctgtgaaccatgtattcttttcgtcagaacagtaaacttccgtaatgctgacggttcactgcggtgtgtacactgggccactggcattggcaacttgacccgtttctggcttctgctcgtgttcct

SEQ ID NO: 30829 - DNA, 2500 bp, Zea Mays
gtcctcgtcgccttcctgggaaatctccagctactgcccactgccccttcccttcagtccctttccccgggctgtggcactagtactagcaccagcatctcttcaggtctccaccaagcgcagacaccgcagcagcggcagcggcacgatctggtgacccccccgccgcgtcaagcctgctcctccggtgatcgccggactggcggggtaggaaccagcggagcgcagcccgcctccttccgctgtgtctgacagcagcagatcctcgatggagatggatggggttctgcaagccgcggatgccaaggattgggtttacaagggggaaggcgccgcgaatcttatcctcagctacaccggctcgtcgccctccatgcttggcaaggtactgcggctcaagaagattctaaaaaacaagtcgcagcgggcaccaagttgtattgtattctcaagtcatgagcaactcctgtggggccatatcccagaactggttgagtcggtcaaacaagattgcttggctcaagcctatgcagtgcatgttatgagccaacacctgggtgccaatcatgtcgatggtggggtatggttcagattcagttcatttatgtcctgttattgtgattttgattggtaacatattgacaacctcgacacttggggtcagattcagttcacttatggaagaaattggagaattgtgataatttatctataatcacccctactgaaatagaaataacatggcatcaatgtgcatgctattggattttgacacgaatatgctttattctatcatatgttggtaattccagcaggcagcaggcactactctttggatccacgtgacttgacaaagaaatcatgccatctttccacaatgcaggtccgtgtacgtgtttctagggattttctggagcttgtcgaaaagaatgttcttagcagccgtcctgctgggagagtaaatgcaagttcaattgataacactgctgatgccgctcttctgatagcagaccactctttattttctggcaatcctaagggtagcagctgcatagctgtagagataaaggccaaatgtgggtttctgccatcatcagaatatatatcagaagataatactatcaagaaacaagtaacgagatataagatgcatcagcacctcaaattttatcaggatatcgaagactagtgagtacaatcctcttgatctattttctgggtcaaaagagagaatatgcatggccatcaagtcccttttctcaactcctcagaacaacttaaggatttttgtcaatggatctttagcttttggtggcatgggaggtggtgcagatagtgttcatcctgctgacactcttaagtgtcttgaagatctcagcaagattagtggcctaaaactccctgacttcactgagctcctgtcagagacaatttttaggtctgaggtattaggcaacctgttggccactcaaaagttggatgatcatgacattgaaggggtaattcatctgtactacaacataatttctcagccttgtttagtctgcaaaaacctaactgatgtagagctattgcggaagtacactttcttgcattctcttccgttggacaaaagcctgaagatcgttagggacttcctcatttctgctaccgcaaaggactgtagcctgatgatcagctttcggccaagagagaatggtagtacagattctgagtatgattcagtgtttcttgaatcagtgaagcgaacctatgagtacaaggcatatttccttgatctggatgtgaaacctctggataagatggagcattattttaaactggatcagaggatagtcaatttctacacaagaaatgggggaggtcttgccatctccaaagggcagtaataccaaagacacttcgaggatttatacatctggagaagggtgcatcagggagtgttggttgttgttcctgctgcttggtgctgctgttgtaacttcatgagtacagtcccaaggttgggaggctcgacccttaacgcctggaaagggcacagggagctgtgttgtccgtcagtcgctgttgtaactcaaactagtgcatacaccgtggcttgtcacggtaatttccgaagatgtccaacgttagttgagacaaccgaactgcttaccgtggcaatcactcattgtaacatcaagttgaaaatgagggctgaagtttccctcacaggctaccatatgtcagatatgtcctttgtaccactaataagtgcccctggggtcatgtatgaatgtatctcaatttgctattgcagaaatgtttggtgaaactttcatcctcccatgctttgagcaaagctaacctaacttctttgaatctgttgggcttattccagcaaatcctggctgacggatggacctgcgatgctgtctgctttggctgtgatggctacagcctacgggcacaagcgcctgtcggctgtcgccctccagccgctgttcttgtctcatgaaga

SEQ ID NO: 30830 - DNA, 1945 bp, Zea Mays
atcgggtctacatgtgtacacccatgcgctttactgggttcgccccctgatgttagaattaggaagttgtatgcatgctagaagcctataattcgctgagcagtggacactttctctggtatcagaggatcaatgtccaattattatgatgactacgatgacattgacgggatggaggatgattatgatatggatgatcccattgatgacatggtagacgagcagcaagggattagggattctgatgtggaagataatgattatggacaaccaaatgataagatcccagatacttcatcagcagatgcaagaaaaggaagggacattcaaggaataccctgggagcagataaacataacccgtaaaaaatacagacagtccagattagaacagtacaaaaattatgagaatgtacctaactctggagaagaagctatgaaggattgcaaaccaacagagaaaggtgggatatactatgagtttagacgaaatactagatcggttaaatcaactattctacattttcagcttagaaatttggtatgggcaacgtccaagcacgacatctacctagtatctcattactcaattcgtcactggtcagcattgagtggtgtggatactgaacttatcaacgtccaaggacatgtggcaccaagggagaagcatgcaggaagtttattagaggggttttatcagactcaagttagtaccttgacagtcaaggacaatttactggtagctggtgggtttcaaggagagctgatctgtaaacaccttgatcaggaaggtattagtttttgctgtcgaacaacttatgatgataatgctattacaaatgcggttgagatatttaatacctctagtggcgccgttcacttcatggcatcaaataacgactctggtgtgagatactatgacatggagagattccagctattcaagcattttcagtttgaatggccagtgaatcatgcttcgttgagtcctgacagaaaggtggttgttattgtgggtgatgatcctgatggtctacttattgatgcaaactctggaaagacagttcattccataaaaggacatcgggactactcatttgcatcggcttggagccctgatgggcgaacatttgctaccggcaaccaagacaagacatgccgaatctgggacgtgaggaacctttcaaaatccgtccatgtgttgaggggtaaccttggagccatccggtccatccgcttcacctcggatggccagttcatgtccatggctgaacctgctgactttgtgcacatctacgacgtgaagagtgactacaacaaaaggcaggagctggacttctttggcgagatatccggcacatcgttcagcccagacactgacacgcttttcgttggtgtgtgggataggatgtatggcagcctgctacaatttggccgcctgtacaactactcgtatcttgactccctgttttgatgtggatccaaacgggtgttgaactgttgggttttggtgtacctcagtgctctgaatgttgtcagcataaattaggtggttatccctaatcaggatattaagttgcaaagataattgaattaataaatgttgtaccgtgcccgatgtgtatatgtaaaaagaaatgtatacatgtgcctattgagagaccgagttgagatgtgacttaggggttgtttgtttgggattataatctattcagattatataatctaatttatttgttttaggggttgtttgtttgggattataaatataatctaacttatttgtttgtttgagattagtctagcttgaaaagtatgtttgaccttgtgtgcataggattgaatacagtgtgtgtagtttcatgtagacgcaggtaatgtatgtttctgtcacgggactgaccggccgtggtaggaatgtgtgtcgaaggaaaatatcttttggc

SEQ ID NO: 30831 - DNA, 3644 bp, Zea Mays
cccacaaggcccccgctatttatgcgcacttgcttgccgggagactgggagagttgtgtcgccggcggaggtgggcgtccgtcctcccgttccaccagagctcactgcttcgctccacccaccgttaagcaggagtggtacctggtgtttttttgtttttcaaaaagaagacagaaatgtcttcctcgaggcctgcccactcttcaagttcatccagcaggactcgccagagctcccgggcaaggatattagcacaaacaacccttgatgctgaactcaatgcagagtacgaagaatctggtgattcctttgattactccaagttggttgaagcacagcggagcactccacctgagcagcaagggcgatcgggaaaggtcatagcctacttgcagcatattcaaagaggaaagcttatccaaccatttggttgcctgttggcccttgacgagaagagcttcagggtcattgcattcagtgagaatgcacctgaaatgcttacaacggtcagccatgctgtgccgaacgttgatgatcccccgaagctaggaattggcaccaatgtgcgatcccttttcactgaccctggtgctacagcactgcagaaggcacttggatttgctgatgtttctttgctgaatcctatcctggttcagtgcaagacctcaggcaagccattctatgccattgttcatagggcaactggttgtctggtggtagattttgagcctgtgaagcctacagaatttcctgccactgctgctggggctttgcagtcctacaagcttgctgccaaggcaatctccaagatccagtcactaccaggtggaagcatggaggccttatgcaataccgtggttaaggaagtctttgacctgacaggttatgacagggttatggcttacaagttccatgaagatgagcatggggaggtcttcgctgagatcaccaaacctggtattgagccctatataggcctgcactatccagccactgatatccctcaagctgccaggtttctcttcatgaagaacaaagtcagaatgatctgtgattgccgtgcaagatccgtgaagattattgaagatgaggcactctccattgatattagcttgtgtggttcaactcttagagcaccacatagctgtcaccttaagtatatggagaacatgaactcgattgcatcccttgtcatggctgttgtggtcaatgaaaatgaagaggatgatgaacccgagcctgaacaaccaccacaacagcagaagaagaagaggctgtggggtctcattgtttgccaccatgagagccccagatatgtccctttcccactgcggtatgcctgtgaattcttggcccaagtgtttgctgtccatgtaaacaaggagtttgaattggagaagcagatacgagagaaaaacattctgcgaatgcaaacaatgctctctgacatgctgttcaaggaatcatctcccttgagtatcgtgtctgggagtccaaatatcatggacctagttaagtgtgatggcgctgctcttttgtatggggacaaagtatggcggcttcaaacggctccaaccgagtctcagattcgtgatattgccttctggctttcagaagttcatggggattccactggcttgagtactgatagcctccaggatgctggatatccaggagctgcttcccttggtgacatgatttgtggaatggcagtggccaagatcacgtccaaggacattcttttctggttcaggtcacatacagctgctgaaatcaaatggggaggtgcaaagcatgatccatctgataaggatgacaacagaaggatgcaccctaggttatcctttaaggctttccttgaggttgtcaagacgaagagtttgccatggagtgactacgagatggatgctattcactcattgcagcttattcttagaggtacactgaatgatgcctcgaagccggcccaggcatctggtttagataaccagatcggtgatctaaaacttgatgggcttgctgaattgcaagcagtgacaagtgaaatggtccgcctgatggaaacagcaactgttccgatcttggcagtagatggcaatggattggtcaatggatggaaccaaaaggtagcggagttgtcagggctgagagttgatgaggctataggaagacacatacttacacttgtggaggattcttctgtatcacttgttcagaggatgctatatttagctctgcaaggcagagaagagaaggaagttcgatttgagctgaaaacacatggctccaagagggatgatggccctgttatcttggtcgtaaatgcttgtgccagtcgtgatcttcatgaccatgttgttggggtgtgctttgtagcccaggacatgactgttcacaagttggtcatggacaaatttactcgggtcgagggggactacaaggcaatcatccacaacccgaacccactcattcctcctatatttggtgctgaccagtttggatggtgctctgagtggaatgcagccatgaccaagcttaccgggtggcacagagatgaagtggttgataagatgctccttggcgaggtttttaacagcagcaatgcttcctgccttctgaagagcaaagatgcctttgtacgtctttgcattgtcatcaacagcgcattagctggtgaagaggcagaaaaggcttcattcggcttctttgaccgcaatgagaaatatgtcgaatgccttctgtcggtgaacaggaaagtaaatgcagatggtgttgtcactggagtgttctgtttcatccatgttcctagtgatgacctgcagcatgcgctacatgtgcagcaagcctctgagcagacagcacaaagaaagttgaaggctttctcgtacatgcgacatgccatcaacaaacctctctcaggtatgctttattctagggaaacactcaagagcacaggtctgaatgaagagcagatgaggcaggttcgcgtcggagacaattgccatcgccagctaaacaagatacttgccgacttggatcaagataacatcactgacaagtcaagctgcttggatttggatatggctgaatttgtgttgcaagatgtggtggtgtctgctgtaagtcaagtgctgataggttgccaggctaaaggtatcagagttgcttgcaacctgccagagagatccatgaagcaaaaggtttacggggatggtatccgactccagcagatcgtctctgacttcctatttgtttcggtgaagttctctcctgctggtggctctgttgacatctcttccaagctgactaagaacagcattggggaaaaccttcacctcatagacttcgaacttaggatcaagcaccgaggagcaggagtcccagcggaaatattgtcgcaaatgtatgaggaggacaataaagagcagtcagaggagggcttcagccttgctgtttctagaaaccttctgaggctcatgaatggtgacattcgtcacctcagggaagctggcatgtcaaccttcattctcactgctgaacttgctgctgctccttcagcagttggacgatgagggcaaactgcaacaagtgtcaaatgatacgtagatctcctgcatattctcggaaaacaatacagaacagag

SEQ ID NO: 30832 - DNA, 2429 bp, Zea Mays
aagaaagttgactgaaagcaatgaaagtggaccggcaaattatgatcctaattcagccacggcaattgttgtttacaagcctgggtcaaattcaattccaccaatgcagaatgaaacaacagcacaggaggagaattcaaagaaggcatgttcacatttcatcgaactatggaagcagaagcatgaaactggacaatggattgaagttgaacctgaagcaatttctacacgctctgaatttcctccatttaatgcatctggcattgtgttgatgggagacaacatgaagcaaaacctggaatcagggtctattaatggagagccaaatggcgaggatggagctaaagctgatcagaagtccagccagcagatggggtctcatgctgcatatcctccatgggcaatgcatcctgcatctggtgcagttctttacccaccttatcctatgcaaggaatgcctttctatcctggggtgaatccctactaccctccatatcctccagtggatgatcccagttcaggtggaggaaattctcatggtcacaagtcacatagaaaggggaagaggtctggaaagaagcctagtgtagttgttatcaagaatgtgaatgtaacatctaagaagtgtggctcatcagagagtgaatcacaatcaagttctgaagttgagtctgctgacagtgacaactcacactccaaatcaagagaaagaaagcataaaagctcatgttcaaaggagggtaggagaactacttttgatccgggagatgagtataacaaggatgaaacatcgaatggccatggtgttgagcaaggcaactggagtgcattccaaaatttcttgttgagagcagaagaaaaaacaagatctagtgatgcagacctgtttgctggtgagaaagaacccccatcacggagaaaacagaatgtaaacacagcagatcctattattttagttgagagagatggtggcaacgtctgtgagcagaacaaaataggttttgattcagccaatgggaggactagagttatccgggtcatgtccaatgatgaacttgttatgtctggagaagggagaatctatatggattgtgaaatgaaggagattgaagctggtggaggaaggtacaggagagggacaggtgacgactacatggtttatggtcagggatgtcagatagacagacattgtttgttggatcctcttgcagaggcccagtacaagaatcctgttcagcaggacaataataggaatggtgttacggatgagtcctttatgattcctcttaggtccagctcacaggataatatcggagcagagagcagaactactatggacatagatgttgagcttccttctagcattcataaagcatcagataaaaaggctgggcatcagcttttttacgaacctgatgaactgagtactgtgaaggttgaagatgcaaaaccagaggatgtcttgccggtcactgacggtgtacagaaggtagagaaagagaagctaaagaacgcaagggatggttcagataaaagaacgaaggattccctattgaggagactatcggcgccaaggaccccactgaatgatgcacaaaaacgtgcacagaacctgcgtgcatataaagcagaccttcagaaactgaagaaagagcaggaagaagagcaaataaagcgattggagaggcttaaattggataggcaaaagtggatcgccgcaagaggtaatggaaagggtccagggaacgatgctcctagagcgaacggtatgaatggacttagtaaatcagttccaaccttcactgggatgaaaagggttgaaaacggaacgactgaatcactcagcggtcgactgaagaggctttctgaacccaaaagcattgttggggcagagcattcgttgaacccaaagtcagctggtgcaggccgttcacgaagaagtatggcatgagttgatgtgagatggagaactgaatagcttgagtccatcgtgccactcgctagcccggtaacttacttactagaaacgtgaaaggcatctcaaaaggctttttgtacaggaaaaaaggaaatggctggctctgtagcattgtctgcttccaagatttgtgatggaaaatcgagctatctttcaatggcatggcgttggactttcaattttaacataattatttcattcttttgattcagggtggcttgtgatagctgtaaacctggtttttttcccaatgtggagctatattgtgggtgtatttatggaatggattgatctgtgtttgagatatattgtggtatttatatagtgtataaatgtccgactttggattggacgagatgggccaattcaatttgtacggcagtagtatgacacgctgaagttggatgtccaagtattcacaacctctgcatcgaaggcacaaagagcagat

SEQ ID NO: 30833 - DNA, 1407 bp, Zea Mays
ccgaacacttgtacaacaaactgccaatttgcatctttggcgttgcatgagttcgccacatataagattccgctctgatgatgctaaggaggtagtccattatcaaacaatctcaccaaagaacttagctaaatctgttcttgaggaaggtggctggtcaacctttatgtgttcaagggaggatactgagaagcatgttgatgttgccattgtttttattggctcaaagctacaatcatcagacatatcgaaagataagcaagttgatccagctttagcagatacattgaagctctccttcacagaatcagagttttctatggcattcccctacgtttccacatcagacgatgagaaactggaggagtcattgctatcaggcttcactgagaactgtaaaagtggttttggaagaaaccgtatcacctacacagacacgtgcgccgtgagtggccaagatctgaagacgtatcacaacatggatgctatcaatgacttggtagtgtcaggaagaaccaacccgagtggacagactgatgtaatcgtcttctgcagcggcgggttcgagaagttaggcaccacggaatcggaaggggagctgctttcccagcttgtcgacttgctgaagctgtctggggctagacacacgattctctacgcttcccagccatctggttatctactggagaacccttccggctcgccagtggctaggcaccttgcggagaggactaacggtacaaaaactggcctactgagcaaatgtgacggagagtgcctagtcaaatcaactcttcttgaaggaacctttgtcggaatagtgctccttatcatcttgatatcagggctcatgtgtatgatgggaatcgatactccctccaagtttgaagctccccaggagtcttgatctcccttcgaagcagaacccttgttttgttggtctgcactgtggatagatattattcagtttccccctttgaaagcgcctttcgtataattattattatttttttactgagccatctgttatttacgatgtgctcaaacttttgacaccaaacgaatgcatgtgtgtgaggcttgtgctgtgaccagacatagcattgcctccaggtgttttctgtgaataacctggaatttcaggtgggtactgtgcatcaaataaaaaagatgaaatcttgctgttgcaccttgtgcctcaaccaaaaactgtaaaatgtcatggtcgatgttgtcagcatccatgattaggacagaaacaaaagccaacttttgtagctttcactgcttgcgcggttacggtcactgcgcagccttaccgcgcaagcaagtgatcaagtcaggagccatgcatcgattatgatctgcttctaaaagaaatgggatccactcctgtcttgatttccg

SEQ ID NO: 30834 - DNA, 291 bp, Zea Mays
tgtagctataaattattttaaaatatgtcataaatttttattcttcgttgcgttagcaacacctaaattttctggcgtcctccgccaccggtcacctagcacattttttaacactatcttccacgctgctacatccacctgcaaatgcttcctcccttcttctttgctcggcctcgtcctcttgcattaatccaagttcacaatatatctcactttcacgtggcatgtcatgtcttctttcgtcgtcccatgcatccgacaatatcatagcgtcccaatcgacttgatttg

SEQ ID NO: 30835 - DNA, 1836 bp, Zea Mays
ctctcgtccgactcatcttgtactgcggcggtggcgcccggcttccctcgacgaactccaccgacggcgaccggctccctcgtcctccaccggtcgcgcccggccctctacctccatcgatcgcgcccgaccctctgcctccaccgtcgtcgctcgctcaggttttgcacttggattacttgaacaaatcagacaagaagtggctagatagaatacaactggaatgattctatgtacggatgcatgcaaagggttagaaaatgcaataaagcttgttttccctcaggttgaccaaagagaatgatttaggcatctcatgcataattttgtgaaaaggtttggaggtgacatatcctctaagatgtaccctacacctagggcatataggccagaagtttcatagtactttttcaatcaagttgtagaagcctcccaagatgtaaagaaatggctagatgcttaccacaagctgaattggaggaggagtcagtttaaccctaccatcaagtgtgattatgtcaccaacaatctagctgaagtattcaacaactggattaaagattggaatgaccttcctgttgcggagcttgcagacaagtgtagcgagatgataatggtgttgtgggaaacggaggagacatgggggaaagcttactggcaagatcttacctgctgttttgcagcagttgaaagcaaggactagaggcctaggacatctataagtgacaaaggcagttgaggacagcacaaacattcataataggcatgtggtgaagtcatatttgcattagtgtacataccttgagtggcagcacactgacaaaccttgcccacatgcattggccttgattacagcagaaggattttgtgcatgaatactactcagtccaaaggttcaaaaaagtatacaagagaataattaaaccactaccaaataggtctcaatggccacaagtggaacaaccctatgtggttggtgcaccacttgacaagataggaagaggaaggtataaaaaaactaagaattaagagttgtttggaaggtgggaacaacaaaggaaaaaggtagctaaagaaaaaggcaaggaaactcacaaggatgcagtcctagaggctgacatggaggctacaaaccaatctaagaagggaaaaaagaagatgatgtgaggcaaaagaaagtgcaaaagatgtggagagttaaatcatagcgaaactagctacaagtgcccgttaaatggaacaaagaaaagaaagagaaggcctcacattaataaaacaaagtatggggagaataccaagatccccaaaagccgacttgaagaaggtgtccaaggtgaaggtgttatccaaggtgaagctgttgtctaagatcatggtgttgtccaaattgaagctgttgttcaagttggtccaagtggaagtttctcttccagtgcaaagcccaattatacgaacaagggagtctattttacaggacaacttgataagtcagcttgctatgctactaggagatggttagattgaaatccagtcacctcctaataatacaactcctaagaagtttctagtgaagaagctcacagcaagctgaagagaacgtgacaagattctaagaaactactgttttatgtgttacccaagatttaaataagctagtgttagaagtgaacattttatgctatcagatgaactatatttggatagagatagtagttattttgatgtgtgatgttatcttaaacaagtgtcaggtttggatgtgttttgttatctgaaacaaatgttcagaagctgaaaatgttgtctctattagtgtacacatgttaccagtttctg

SEQ ID NO: 30836 - DNA, 1253 bp, Zea Mays
ttgtcagcacgactccaactcggaggcatcacgtaggaaccgacatcgagacggggtgaccgaacgacgacggcaagataaaggctggagacgaccggatatcaacgacaagtactagagttttagttttacgacgagctgttgtaatggaacgtcgatacactattcatggcaattaggagatcgacgtaggcggaactgatagccgaacaggaactacgcagatcgacgatacaagactcgatctggcgagcatgatgcaagggatcgcagctgctgcttcgacatgaattacttgctgctgagcacgacggaagcctgggagctgccgacggtcggcccgagaacgacgtcggagcagcggacggacgagcaggaaaacattagagaaagggctcgcgccggtcaacagagaagcgcgcggcgagcatcagggaaacggacgagcggctgccatgggagggactctgagtagaggaaaaactgcgcgcggggaaggaggcctcggcacagcggccatggccggacagagaggggatgggacggcgcgcagactaggcgagtagagaagagtggctgagctgggcgagctcggaccggcgagcagaacagagggcagggcgcggcagcctgcaggaaataacgcagtccgagcgccggccatggagagacctcggcaggacgctctcccatgggagatacagggagatgggaactcgagttgaagggagctccggtcgggctggggattgggcgagctgcacggccgggagctccatggctgggagaaggagcgctcggctggccggactggaaaagagaagaacaggggcgccatggctggatgcgagcaagaggagagagagagctcagctgggagaatgacgacggtaaaaatcccagcagcagataagaagagacagcaggaatttcaacagaagaacagtggcgggattttgcttttgctttccagaatacagcgacgcggcatatcagatggaagagagaaagcggtggagagataaggcgagggaagggagatgtacgtatgggatttttgaagaagagcctgcgcgctagaaaaggctgagcggccagcaacttcaacaaaaatcagatcgatgaaatatcagagtggaggataggaacgcagagaagattttccttccgtgcgtggatgagaacgaagactagaaaaatctgcgtagcgtacgtgaggagataaggagagagagcactgtgagaagattttt

SEQ ID NO: 30837 - DNA, 2272 bp, Zea Mays
  misc_feature (1)..(1): n is a, c, g, or t
nggttataccattaaaaaaaagaatccgtgcaaaaatctacaaggtcgcacagtcatgatcgacccgccgttgatgttcaatcctgctaatgcctagtacctattttgtttatgatgtaaactgaagacctgccattcgtttttgttagcaacttagtgagaaacctgcttgataggataacaacgcatccaatttcgaaccggtgtcatcgtcacctagcagcaaagcaaggtaccctgttgcttttctgagacgctcagcaaccgcagagcagattagctacctggtagcaccagagattttgttccgatgacccatcaaccaatctggggttcccggtctgtggtataaatttcttggaaaaatggcagtcacaagactacaagagtcagttggtctcattttgaagctgaccgaaggctgccaaccaacctttccctggttggttggctgcttctgagaaaaatctaacaccagggaattggaaagcattcctatgttgtagagtttcttggtctgcctaatatctctgccctcttttcaacggccgggtgccgccaagatacagttatccagtacctcctttagaaattttgtgcccataccgtgacctaattgtctcggtacatatccaacaatgttgacctcacgttcctccaggactcgtaccaacttgtggctgtacctaaaggtgaagttagacagaaataaaaccaagatagtggatgctggtgcacttgagcccctgcttggttatttgcgatcaagcgatccaaatttgcaggagtacgcaactgctgctctccttacactttcagcctcatccaccactaagcctgtcataagtgcctcaggagcaatccctctacttgtggaagtcctcaaaggagggaatccccaagccaagaatgatgctgtgatggccctgtacaacctctccacaatcgcagacaaccttcaagctatcctttccgcccagccgatcccccctttaatagagctactgaagggtggcaagaggtcctccaagacagccgacaaatgctgtgctctcctcgagtcgttgctcgcttttgaccagtgtcgggtggccttgacatccgaggaaggcgcagtgctcgccgtcgtagaggtgcttgaggagggctcccttcagggcagagaacacgccgtgggagcgctcctgacaatgtgcgagagcgaccgcagcaggtatagggacctcatcctgaacgaaggggcgattcctggtcttctcgagcttacggtccacggcacgcccaagtcccggatgaaggcccacgtccttcttgacctgctgcggaactcgccgtactcgagaccaaagctgccggcagacacgctggaaaacatcgtgaccaacattgcctcccagatagatggcgaagaccgcggcggcaaagccaagaagatgcttgctgagatggtgaaggtgagcatggagcagagcctgaggcacttgcagcgtcgggcctccttcgcctgaaactgcatccaggtggcgggtgccccaccccccttattttgcaatggagatagaagatagtccaagaataatgagatttctggtgatgccggtccaggccttgacaggaccgagtgaccggtctatgccgtcgtatactaagctcttgacgtagaactccttttcccccctttcactcgccaatcttgtgttctcgttatatgaagaaaagaggttgtgatcatgaggctggtgaccatttcattgctaatctgaccacacgcgcgagagatcggccatcgcagatttgttttctttccgtgccaaagggagatcgtgtggtgggggtgtaccgatcttatccaccggatggtcggacgtcgacggggggcgtgggggctctcgcgtgcggaggcggagcttctgcttctgcacgcctcgttccacctccatcgtctgaatctgaatagtgggggtgtacagttcagcagcagcatgcggtgtattttccgttggcgaacgtcccggtgcccgacagcaatcggacacgcagacggcttcggtaggaaggctgctacgtcacacggtcacacctgcacgtctgcacctctcaacaaaactaaaacggaaccaataaaaaggttccttcggacgtgacggaaacgcttttgtgctctcaagcatcgccgtcgcagcaactgtactgctctttattatctttctataaaacggcaacgacaaggttagcactactgcatcgccgtatcagaccgcactgcgtagtg

SEQ ID NO: 30838 - DNA, 1252 bp, Zea Mays
cttactttcgtcggccaacaactgacagcccacgtctaaatttagccgaaaggaacccaacccacgaagcatccgccacagccgaactggcccgatgtcgctggttgcctacgatgcctcctccgatgaggaagacgccggcgagcctgccgccgccgcggcgccacaccctgcccccatcggtccgcagccaaggcctccgtctcctacggcagtgagccctgctcctcggcctacgcctacgcttacgccgccgccgccagcagccagccagagtgtagcaccaattagttcgagtgatgtctctctgcccacatcatcattagatctcccagatgttgcagatctctttgctccccctgcagacaatgcatcaaggaagagggaatcaaatgggtctgctcttcatgactcgcgcaataaatttccaaggatgcaatcacaatcccaaggcataggaagtgctgcagggaacgccctaattccaccgcagcttcgtggaaggttagtttcttttttttttctttccatttctcttcggcgccttgtgaaagtgagaccagcttattatatgtattctctagtctatacccccctcagctaacgagtcaaatgcttacagtgaactataatatgagacatgtaggcgcattcccaggtgtatttgccaaaatgttcacattatatatttcgcatccctgagtgatgtctacctttttgttactgcttcacaggagcaatgttgttaccgaagacatgagcaaactctttgtggctaaacgaaaagagtagcatcttaaccttttctggacctgaacctctgtttggactccatagactgataaacgcatgtactgagtgcaatggatgtgccggcatgatccaaggttgttgctgaatcctaaagaaccggacgaaggatgctaacggtaggacgacctggtctcttagcctaccgtgggctgttgtcagatgtcaaaaatgccctcttagaagtttagaacatttctttggtgctcactcgcgtttcatgttcaacggtgctacatgactggtgctggatgcatgtaaactctgcaaccctatcatgttatggcagctagatgctactacgtctatcttttggtcggtgattacaaccatgtattacgtctagtagtggtaatagatcgcgatccaaatgcttcttaataaaatagtagaactctaaataattttagttaaaaaatgaatagaaataagattctgattt

SEQ ID NO: 30839 - DNA, 2293 bp, Zea Mays
gtgcggggttctccccaattttgctccatgcggtgcggcgttcgatttgttcagtacagtccgccatgattaagcaaatcctcggccggcttcccaagaagccgaccaaggccggcgagaaggagctggccggcgcgggcccgtcgctgcccagcccgacgtccgacgcgagaaccaccaccgatctgaccgcgtctagcaggcttgtcagccccagcaactacgcctccgcggcaacaaatccaggccagagctacgcgcccagggccgccgggctcggcgccggcgccagcaacgggttcgcgggctcggcggccgggtacgaggcgctgccgagcttcagggacgtgccggcgtccgagaagccgggcctgctcctcgggaagctggccatgtgctgcgtggtgttcgacttcgcggacccgaccaaggacgtgcgggagaaggaggtcaagaggcagacgctgctcgagctggtggactacatcacctccgccaccagcaagttcccggagcccgtcgtgcaggaggtcgtcaggatggtgtctgtgaatctgttcagggtgcccacccctgccccgagagagaacaaggcgctcgagtcgttcgacatggaggaggaggagcccgtcatggaccccgcgtggtcgcacttgcagatcgtgtatgagctgttcttgaggtttattcagtctccggagacggacgcgaagctggccaagagatacattgaccacggcttcattatcaggcttctcgacctcttcgactcagaggatcctagggagagagagtacctgaagacgatccttcacaggatatacggcaagttcatggtgcatcgccccttcatcaggaaggcaatcaacaatatcttctaccggtttatattcgagacggagaagcataatggtatcgcagagctgttagagattctggggagtataattaatggctttgctttgccgctcaaggaagagcacaaattgtttctagtccgagcgctgattccactccacaaaccaaaatgtgttgccatgtaccatcagcaactgtcgtactgcgtcactcagtttgttgagaaagattgcaagcttgctgatactgtcataagggggttactcaagtattggcccatcacaaatagctcaaaggaggtgatgtttttgggtgagttagaggaggtgctggaagctacacagccagcagagtttcagaggtgtatggtgccacttttccgtcagattgcccgctgtttaagcagttctcactttcaggtggcagagagggctctctttctatggaacaacgaccatatcgagggtttgatcaaacagaacaacaaggttatactgcccataatcttcccagcgttagaacgaaacacgaaaggccactggaaccaggcggttcaaagcttgagtctaaatgtccggaaaatattcatggaccatgatcccgcgctgtttgaggagtgtcacaagaagtttgaggaagaggaagcccaagaagctggcgtaaggtcaagacgggaggctagatggaggcgcctagaagaaatcgcctcgtcaaagtctcctcagtgaagtagcgcgtcctcctgaggctgtagttcttcatcagtagagttcttctagctatcttgtcttggggacttgcatattagcagctcttttggacaggatcaagtaaatgctgatgatgtagttgctggatgtcttcttgccgcctgttacttgtgaccgaacgttctacaggccgacatgtaaatacgaggcacatgatgggctgtgaagcttcaacagagcctcggcgggttctctttgccgtgtgatccactgatgacagtgtcggtttcatcatcataggacaaaggaaaggaggtaaaatggtctttttccgggtcaatgtcttgatccaaggactgttaggagcacttgaaagacgaggaaggaggcaggtagcacttgctcttgctgatggtgattttgctgaaatgtaatactatgctttatgtatgatgcatggtaacttgaagccatgtctggtgataatatgtaatcctggtgtacatgtcttttccttcctttgatgtatacagaaatttggaatgaagccctgattgaaggctgttttctacaagtttgaccccactcatgtgggctgtctttttttaaaatcaggtgtttagggtcaccggagggaggggctcctgaataggtgcaagatcagggatgcgtacgccaagtttggtgtcatgaaccgaatgtaatgttgagcttgcatcatggtg

SEQ ID NO: 30840 - DNA, 4775 bp, Zea Mays
atccaccccctccttccccagtccgccattaccaccgcctgccagtacgccctccttaaatggccgcactgccgcgccacacaccgggcggaaaggcgcgggcagcggcagctagggtttggtgtggcgggggagaccgatcgggggcgagatgtgggcggcggaggcggcgttctcgcgctccgggtcgtggcgggaggcggaggacgagcgggaggcgctgcggtgggccgcgctgcagcggctgcccaccgtcacccgcgcgcgacggggcctgctcaggtccccggctcccgacggggccgcggccgtcgagggcgacgacgtgctctgcgaggtcgacgtcgccgggctctcctccggggaccgcaccgcgctcgtcgaccgcctcgtcgccgactctggcgactccgagcacttcttccgacgcatacgcagccgcttcgacgcagtgcagatagagttccccaagatcgaagtgaggtatgaggatgtgacagtggacgcttacgtgcatgttgggagcagggctctaccgaccatcccgaacttcatatgcaacatgacagaggcttttctgaggcatctgaggatctatcgaggaggaagagttaaactgccgattttggacaacatcagtggggtaattcgcccatcaagaatgacactgcttttgggccctccaagttccgggaagaccaccttgcttcttgctcttgctggacggctcggtcctggactaaagatgtctgggaacattacttacaatggccaccatttgaacgaattcgtgcctcagcgaacatctgcttatgtcagtcagcaagactggcatgcttcagaaatgacggtcagagaaacgctggagtttgccgggcgctgtcagggtgttggaataaagtatgacatgcttgttgaactgttgaggagagaaaagaatgcggggataaaacctgacgaggacctagatgtgttcatgaaggcgttggctcttgagggtaagcagacaagcctcgtagcagagtatataatgaagccaagattttaggactggacgtctgtgctgatactattgttggagatgaaatgatcaaagggatctccggagggcaaaagaagcgcctgacaacaggtgaattgctagttggttctgcccgcgtgctgttcatggatgagatatcgacaggccttgacagtgcaactacatatcagattatcaaatacctaaggaattcaacacatgctcttgacggaactacaatcatatccttgcttcagccagctccggaaacatatgagctatttgatgatgtcattcttatagccgaaggtcaaatcgtataccaaggtccacgtgaatatgcagttgacttttttggtgctatgggattcaggtgtccagaaagaaaaaacgtggctgattttttgcaagaagttttgtccaagaaagatcaacagcagtattggtgccactatgattatccataccaatttgtttctgtatcaaaatttgctgaagccttcaaaacatttattattggtaagagattgcatcaggaattaactgttccatacaaccgacatcacaatcatcctgcagctctttgtacatcaagttacggtgtcaagaggcttgagcttctcaagtccaactaccagtggcagcgtctgctcatgaaaaggaactcattcatatatgtcttcaaattcattcagcttctacttgttgcccttatcacaatgacagtgtttttcagatcaacaatgcaccatgactcagttgatgatggaatcatttatctcggtgccctttactttgcaatagttatgattctgttcaatggcttcactgaagtctcaatgctggttacaaagcttcctgttctttacaagcacagggacctgcacttctacccaccttgggcgtacacacttccttcttggctcttgagcatccccacctcactttacgaatccggaatgtgggtgcttgtaacatattatgtggttggttatgatccccaatttacaagatttttgggacaatttttgttgcttttctttctgcaccaaacatctttggctcttttccgagtcatggcctctttgggccgcaatatgatagtcgctaacacctttggatcattcgctttgttggttgttatgatccttggaggattcatcataaccaaagaaagcataccagtatggtggatatggggttattgggtatctcctatgatgtatgcacaaaatgctatttctgtcaacgaattccatggtcattcttggaacaagcaatttgcaaaccagaacatcacaatgggtgaagcgatactcactggatatgggttattcaaggaaaaatactggttttggatcggtgttggagcattgtttggttatgcaattattttgaacatcttgttcacaatgttcttgacacttctcaaccctattggtaatctgcaagctgttgtggccaaagatcaagtacggcacagggattctaggaggaagaatgacagggtagccctagagctaagatcatatctgcattcaaattcactaagtggtaatctcaaggaacagaaggggatggtgttaccttttcaacccctttctatgtgcttcaggaatatcaactactatgttgatgtaccagtggaattaaaaaagcaaggtgtagcagaagaccgcctgcagctgcttgttgatgtcactggagcttttaggccagggatactaacagctcttgttggagtcagtggagctggcaaaaccaccctcatggatgttttagctggcaggaagactggaggtctcatagaaggaagcatcactatatccgggtatcctaagaaccaagagactttcactaggatatccggatattgtgaacagaatgatgttcactcaccttgcttgactgtgatcgagtctttgttatactcagcatgccttcggttgccttctcatgttgatgcagacactcaaagggcttttgttgaagaggtgatggaacttgttgagttgaatcccttaagcggtgctcttgttggtctgcctggggtaaatggtttatcgactgaacaacgtaaaaggttgacaatcgctgtggaacttgttgcaaatccttctattgtgttcatggatgaacccacgtcaggattggatgctagatctgcagccattgtaatgaggacagtgcgtaatattgttaatacaggacggaccattgtctgcacaatccatcagccaagtattgacatatttgaatcttttgatgagcttttattcatgaagcgtggaggacagcttatatacgctggtcccttaggtgccaaatcgcgtaatctggttgacttttttgaggcaattccaggagtgcctaaaatcagggacggctataatcctgctgcatggatgttggaagttacaagcacccaaatggagcagattcttggagtggattttgctgaatactatcggcaatcaaaattatttcaacagaccagagaaatcgtcgaggccctaagcagaccgagcagtgaatcaaaagaacttactttcgccacgaagtatgctcaaccattttgtgctcagtatatggcttgcctatggaagcacaacctatcgtactggaggaaccctcagtacaccgcagttagattcttctacacagttattatttccttgatgtttgggacaatttgctggaaattcggttctagaagggggacccaacatgatatattcaatgcgatgggtgccatgtatgcagcggtgctgttcataggaattaccaacgccacttctgttcagcctgtgatctccatcgaaagatttgtatcttatagagagcgagctgctgggatgtattcagcgttgccttttgcattttctctggtcactgtggagttcccttacatccttgtgcagtcactcatatacggttcaatcttctacagtttgggatcatttgagtggacagcagccaagtttctgtggtacctgttcttcatgtacttcacgttgctgtacttcactttctatggcatgatgacgacggcgatcactccaaaccataccattgcgcctattattgcggctccattctacacgctgtggaatctcttctgtggattcatgatcccaagaaagcgcatcccagtttggtggaggtggtactactgggccaacccggtgtcgtggacgctctacgggctcctgacctctcagttcggcgacctggaccagcccctgcttatggccgacggcgtcacctccaccaccgtggtggctttcctggaggagcacttcgggtttcgccacgacttcctcggcgccgttgcggccatggtggccggcttctgcgtcctcttcgccgtcgtcttcgccctggccatcaagtacctcaacttccagcggcgatgagagagcaagtggttcagctagctagctagtatagtagccaccgccgacacagacccaccaaacggatcgcagcctactgtacatgcatacaccgatcagtgcaggagggcagcagcacaatgaattatgaatgcgatgtacctaccagcgcgtcgtattggcacagttaatttgcccattacccccagaacatttcgccggggtaaataatcttccggtcggtcacgggagcgagagtgagaaaaagtaaagggtactgtatagccagctattccatgtacttgctgccttggcctcccctccatcgttatacggtggcgtcgcttcatgcagggttt

SEQ ID NO: 30841 - DNA, 959 bp, Zea Mays
gcacttgaagatcgtcctctgttcgtttacccctgtacatagaggaaacattgaagacttcgtcaagaggcccaagatagacaacaatgttattaaaacgacaaaacgttcatggatgatgatcatgaatacaactcagaaagctaatttggtggaacaagatgctaaggtttttgtgaaacaagccccacagttcaaaaggtgggggcgaaaacatccatttgttcggtatgggttaccactcatttccttgacagtgtttggtgcagtgggacttgctcaccttatacagggcagcaaagaagtgaccaaggaaaaggaggatatggaatgggaggttgtagagacaacaaaagctctaagtcgaacagggccagtggaaggagcctataagcctaagaaactctctctagaggacgaactgaaggctttgcagcagaaggttgacataaacagctacgactacaagcccatcccaagacccagtgagaaataagtgaagatgaagaccgtttgctagtgcgtcgagtggatgtttgtttcttgatactttcgtcgtctcgtcttgtcacaagttttgtatgaatgtacggagctgattcaagtttgaaattagaatatgaataggaataagtgaagctgtagagaactggtacgaggatccttgaaccgtttgcatatgtttgtttccccccccccccccccccccccccttttttgggttagtaaattctgatgtgtctgatcagttttctagtgtttatttacagaggaaaaaatataaaggtacagtgcatcgtgttgatctagtttttttgtcgtattattaccagcttgtgtttcattttttttgctcttcatttgttttttattacacatttgtatggttctggcagacaaagaggtaataattcattttttactcacagtgcacataagcaaccggttgtgaatctaag

SEQ ID NO: 30842 - DNA, 3250 bp, Zea Mays
caccactacaccagtcagtcaccagaccactctgccgtcgccgcctacctcggcaacagtcaggacttaggacgcaactcatccccgccgcgagcaacgccaatgctccgaccgctacacgctacagccgccgccaccgctagctaggcccagccgcctcctcccttcccctccacgacgatggacccgaccacgcccgtccttgcgctctccaaggccttcgcctcctcccgcaccaagcccttcctcctcctcgccccgcaccgccgccgctccctcttcgccgcccgcgcgtctgccccctcctcgtcctccgtgccgggcgacctcctcatctcgctcgcgcggctcgcgctccgcggccccggaccccccgcggcgcctcggcggtggttcgcgagtgtctcttctgcctcgcctctcgcctcgggtggtccgccccgcggcggaggcggtcgggggaacggtgatggtgacggcggtggtggtggcgacggctggaagcgcccgcgcgcttcccagggagcgggtgtggtggaggaagcggcagcgcagggagccgatgtcatcgtccttgacgttgggggaatgtcgtgtggtggatgcgcagcaagcgtgaaacgtattctggagagtgagccccaggtacggtcagcaactgttaaccttgccactgagatggcagtcgtctgggcagtgcccgaggatagtgttgttcaggattggaaggagcagctgggtgagaagcttgccaatcagttgacgacatgtggctataaatccaatcttcgagattcttcaaaggttggttcacaaacagttttcgaaagaaagatgcaagacaaacttgaacagctgaaacaaagtggtagagaacttgctgtatcatgggcattatgtgcggtttgccttgtgggacacatttctcacctttttggagttaatatgccactgatgcacgtcattcattccactggatttcatttgtctctgtcaatatttacatttgtcggtcctggtcgaagactaatacttgatggcctaaagagtctgttgaaggggtctccgaacatgaatacgctggttggtttaggtgctttgtcatcctttgcagtcagctcaattgcagccttcattccgaagctggggtggaagacattttttgaggaaccagttatgttgatagcttttgttcttctagggaagaatctggagcagagggcaaaacttaaagctaccagtgatatgactggactgcttagtattcttccatctaaagcacgcctaatggtggataatgatgctgagaaatcatcattgattgaagtcccatgtgatactctagctgttggggactatgttgttgtgctacctggggatcacatcccagcagacggtattgtgaaagctggaaggagtacagttgatgaatcaagtttgacaggtgaacctatgcctgtaacaaagataacaggggcagaagtatcagcaggaagtattaacttgaatggtaaactcactgttgaagttagaagacctggtggtgagactgtcatgtctgacatacttcacttagttgaagaagcccagacaagggcggcccctgttcaacgattggctgacaaggttgcagggaactttacatatggagtcatggcactttctgctgctacttacatgttctggagtattttgggttctcaacttgtacctgctgctatccaacatggaggtgcaatgtctttggcattacaactttcttgcagtgttctggtaattgcttgtccttgtgctcttgggcttgccactcccactgctgtactggtgtcattttgtcaggttggcacttcattaggtgcaacaagaggacttcttttacgtggtggggatgttttggagaagttctctgatgttgatgccgttgtgtttgacaagactggaactttaacaattggtagacctgtgataactaaagtaataccttctagaggcatgggcgatgcgaatacaaaggatttgggggccaaccagtgggcagaggctgacattctgagttttgctgctggagtggaatcaaatacaaaccacccgcttggaaaagccatcatggaagctgcaggggctgccaactgcgtcattatgaaggcaaatgatggatccttcatggaagaaccaggatctggtgctgtggctaccattggtgagaagcaggtttctgttggaacattagattggattagaaggcatggggtcattcacaaccccttcccagaagcagagcattttggccagtctgttgcatatgtagcagtgaatggtgctctggctggtcttatttgttttgaggataagctcaggggagattctcgtcaagttatcgagacactatctaaacaaggaattagtgtatatatgttatctggggacaaggaaagtgctgctatgaatgtggcttcagttgtcggtatccaggcagacaaggttcttgctgaagttaaaccacatgagaaaaagaagttcatatctgaactccagaaagagcacaaggtagtcgccatggttggtgacggcattaatgatgccgcagcactagcttcagctgatgttggaatcgcaatgggtggaggtgttggggcagctagtgatgtatcttcagttgtacttatgggcaacaggttatcccagcttatcgatgctttagagttgagtaaagagaccatgaagacggtgaagcaaaatctttggtgggctttcctgtataacattgttggactacccattgctgctggagcattgcttccagctacggggacgatactgacaccatcaatagctggagctctgatgggttttagttcggtcggtgtgatggccaactcgttgcttttgagggtgaggctgagctcaaggcggaagcgagaaccactgaaagccatctctgatgaggttgagaaaaattactcatcgaaatggagtacctgagtagttcggatcttagaccatgttcacgttcactcattcatatgatttggacacacgcatcaaaggcagttgtcagttgaacaaatgaaacagatgtagtatgcaattgctgaggtcagtcagttcctgtggtttggtagatcttcatggtgtgctataatataataccccctctattccaatttataaattttttgacttttttttaccaagtttgattagcttgtcttatttattttttttcgaaaaaatagaaatttcacttaaa

SEQ ID NO: 30843 - DNA, 1871 bp, Zea Mays
atacgtgtcgtcccgctcgccgctcctcgctcgggcagccgaggctccccactacccagaaaaggagggaggaggaagcgcttcacaaagccacagcgcctcgttgcctccccactttccttttcttcccctactccccatggcggcccgcgaggcctccgccccggctccggcttcgccccacgcaggcgacgggccgggccgcccgccgcggcccacgctcgccctgcccccgcgctccgccgtcgagtccctcttcgccaccggcgcctcctcctcggccggcgccgccgagaccagccccggcccgctcaccctcgccgccgcgctcttccccgacgcgtcctccccggccttccacggctccttcacccagctcctcgtcggcgccataggctccccggccgtaccctcgccgccctctccgttcgccgtcccgccggggctcagcccggccacgctcttcggctcaccgggcctattctctcccacggggagttttgagatgtcccatcaacaagccttagcacaagtaacagcacaagcagttcattctcagtacaatatgataaatcacacagattacagtattcctttttcgtcgacaacagcaccagctttgatcacagcacagcatgccaattcttctgccaatgtggcatcagcacaggagaaaccagctctgccgtcacatgcaggcagttaagggtggcgagtatccaaggagttactacaaatgtacccacacgagttgtccagttaagaaaaaagtggagcgctcagcagaaggacacatcactcaaataatttatagaggtcagcacaaccaccagcgtccaccaaaaaggaggtccaaagatggtggtggtccactaaatgaagcagatgttcttcatgagaatgaagacatttcaactagatcagaacctggctctcaagaacactctggaaaacatgaagggtcaaatgatggcatattagggccttctgtgtcaagaaggggaggaggagatgagcaattgtcaggctcaagtgatagtgatgaggaacaagatgatgaacaaagggctggcgacgaagaccctggctatgcaaatgcaaacaaaagacatgtgccaactccagctcaaaggataattgtgcaaacaaacagcgaagttgatcttctggatgatggctatcggtggcgcaagtatggacagaaagtggtaaaagggaatccctacccgaggagctactatagatgcacgtaccaaggatgcgatgtgaagaagcatatcgaaagatcatcccaagacccaaaggccgtcataacgacttacgaagggaagcacagccatgatgttccagcagtcaggaacggtagccatgctgctgccaacgccaatgggtcatcttccaccagcttaccagtaccacacagggtccacagttcagcatccagtagtcgcagagcggcagaattacaaagcgcatcctcagcttcttctatgctactaaaagaggaaaacgaaataacataggagttttggagtgtgtagccagggtaaattatatctgttctctgatccatttcctcctaggtgtgctgcttcacgctctgcgccgcagcaaaaattgggcactgcaagcccccaccattggttttagtcaagagcgagctctttcgtttgtgcccttccaaaagctgcacaccctgtttggctgcgcggtgtatgttatgttgtcattaccatttacgcccattggttgtaaatgccatcagtcgttcccccggagaactatatggatgacagcattcatcggcccaagtgtatatactcgatttaaaaaccttttttttaactgagatatggtttgttgtagataca

SEQ ID NO: 30844 - DNA, 1001 bp, Zea Mays
tgcattggcctttttgttttaaatattgatgatgatgaagactggtttcctgaagatccaattgaagcctttaaggttatgcgggaggagaggatgttcgatgtatcagacatgtatactactgcagatgcctggggatggacgtgggaaagagaaataaagaacaagatgccacgtaagtggtcacaagaatgggaggttgagttggctatcaagataatgcacaaggtaatagaactgggtggtactccgacaattggtgattgtgccattatattgcgagctgctatgagagcaccactcccatctgcttttataccaatattgcaaacaacacacagtctaggttataagtttggaagcccactgtatgacgaagtagtcctattgtgccttgatctggaagaaattgacgcagccattgcagtagttgcggaaatggagacttgtggggttaaggtgccagatgaaaccttggacaaggtgcttgcgtccaaacggtctggaaattctgccctcccaccacctacggaggagtaatcaatttggacatgcgagacttctgctgctcgtgcttgacgtgacaccagaaaatcacaagcaatgcatatgtttggagcttctcctggaaaagaacatgctgtatgatagtttgtcggtgctgtgtccaacgatagaggagatatgaagttgttagtatgatacctggcatggtatatttgattagtccgttgaatttttgtatggatggtgaagcatgagaaaaggtcgagtttttttttataactggtggaatggtgtgggtgcgttgtcttagggtgctttgggtttggcttctgggagttgcttttgcttcaaaaagtcaaaagctgattaaagtgatagaaacaagaactttcggattttaactttttgctttttaaaatggtcaaaacagttgtttagagacatagataacaagtagaatttcaagtagaatttctacttgtttgaatcaaata

SEQ ID NO: 30845 - DNA, 1128 bp, Zea Mays
caactcatggatgaggatttatacaaatataaatgatccggtgggctacataggttatagggttgttatatattgtcgtaccaataccagttcaatttgtcaagcaatcggttgctttgatgtgtgatagtaattgtaaagcaagagcgctacaacaagctgcccaagtgacagggacaatcgcagcaggtcagcaccagaatatctgaatgtgctgcgcccatgctgagttcctgaaaacctcacgaactgacctgaccgttaggagacaacacgttcctgggccctgtgttcgcggacggaaacttggcaccacacactcttatccacaacgagagcgtgggtgtgtgtcccaacattctccacgcgttccttccttccctccatctcctctctgttcatagcctcccaagaaacaagagccaaacagcgcttgcgaagctcaagcgccgcagcaatgtctctggccccgtccatcccttccatcaaggtgaaggtgggggccgtctcggtcgctcctccacaccgcgcatgccgatccttcgcggtgatcaggagctccaaggcagagggccccatccggagacctgcggcgcctccgctgtcgccaccgccgccgatgccacccaagacgccggctctgtccactcctcccaccctgtcgcagcctccgacgcccgtgaagcccgctgctccacccacgtcgtcgcagccgatgccaccttctcctgagcccaagccagttgacgccacagcccagatgcggaagccggtggctggggccatgacgctggagtaccagaggaaggtggccaaggacctgcaggagtacttcaagaagaagaagctggaggaggccgaccagggtccgttcttcgggttcttgcccaagaatgagatttccaacggaaggtgggccatgtttgggtttgcagtagggatgctaacagagtatgcaacaggctcggattttgttcagcaaatgaagatccttctctccaattttggaattgtggacttggattaatggtggacttttggtgttttcgttatgtacaagtcttttaaatgtaatgtacttacttgatatggtatatagaaaatttcatattgcacgttaaaaaaaag

SEQ ID NO: 30846 - DNA, 667 bp, Zea Mays
ggacatctcctaaataatcctcagccggtacttctgctagtccgtgccatgcttatactggtgatcaagatgcctatgtctccaccaccgtcgctcagctgcttgcctctgtgttggctcgccggacctactgtttgcgctgtgcttaaggtcctactcaccggtcttctcgtcgacagcgccagtcgtgtctcccaccacgccgacactttttctccatcgctcgactccgtgctcagcgctctcaccatcaccgcgtctctcctcgccggtgttcgccggacatacgctcaacctcgccaccgcactgagctccacccacctcggcgaaggccaccgtccccttcttcactgtgcactcggcatcaacttcctggtgcacaccgacacaacgctctggtcgcgcgccctccatcgcacgctcagacacttgcccctgttcgtcacctcgggacttcgccgtcacccgtacttcgctggttgtcaacttcgctggctgtgttcgacctccagccacgtcaccatcgtgcccttcatccgttcgaagaacacctagaaaaagtgatgtttgaaggagttcacttcagtgcctgttgatccagtggtggagtttcatctaactacttaccagagtagaataattttgggatcttctgctgcaataagg

SEQ ID NO: 30847 - DNA, 2789 bp, Zea Mays
cccatctccatcttcctcgcagcttcgacgctccatcttccgctccctcccttacccgcggtcggcacgcaggcgacgccggcggcgctcaggctcgggctctcatctactgcgtcagcagcttcccctcccgcatctcgccagtcgcctcgcgctctcacctccggtcttccgcacactggccggtgaccctgccttataatattctgccacatcactctgggtgaagcaagattgggtagctttccggtgcctacttcattcttgagtttgtcaatataagccactgaagccaaggatgcatgaaaattaacccaatgaaataaatgctcctacatgagtccaagcatttacctatcaaacttgataatgctggatgctattctcaggcagacctatatggtgatcttgccatttattgtcgtgtttctatgttatggaaattttaagagcgctgatgttacctgtagtgctctttaaatttggaacttggaacatggagcatgtgctgattagtagaaggtttccaactgatcctgctctctaaatttggaacatggagcatgtgctgagtagtagaaggtttccaactgatcccaatgagtataagttatatgaggaaattggagatggtgttagtgccacagtataccgagctctttgtgtcccacttgacatcttggttgccatcaaagtgcttgaccttgagaaatgtaacaatgacctggctggaaacatcttaatagatacaaatggggctgttaagctaggagactttggtgtgtcagcctgtatgttcgatactggaaataggcaaagagcaagaaatacatttgtagggacgccttgctggatggctcctgaagtcatgcaacaactgcatggttatgattacaaagctgacatttggtcctttggaataacggcattagaactagcacatggtcatgctccattttcgaagtaccctccaatgaaggtgttgcttatgaccttgcaaaatgcaccaccaggtttagattatgagagggacaagcggttttcaaagtctttcaaggatttggttgctacatgcttagtcaaggatccacgcaagcgtccttcgtctgaaaagctgctgaagcattctttctttaagcatgctcgctcagctgaatatctggcacggagtattcttgatggcctccctccattgggtgaacgctttagggaactgaagagcaaagaggctgagttgcttctcaataacaaacttggtcaggagagcaaggagcagctatcacagaaagagtacataaggggcatcagtggctggaacttcaatctagaggacttgaaaaatgcagctgcccttatagacagttcaaatggcacttgttatttagatgtcagggagaacagagttaaggatgactcacaagaagcttacaatggtccagaacatatttaccaggaaaggctcaaccatgttgcttctagaaggcctgaagaggatgagatacaagaagttgaagccttgaatgatgctgtctcctcttcgttttcaagccgctcccttgaggcactaaaatcttgctttgatgtttgtggtgttgatgatccgagcccaactgctactgattcaagagcgcaaccaagtgtcggaactttacctttccagcagttgcaaaaatttgagcattgtaaaagtggcgactgcaatggtgaaagcttggaaagaagcgtttctgtacctacgaatctggtcactagtggataccacaagcattcaagtggttctcttatacctgagcaagttctttctccctacttgagcagtgatttggaaagggatggatttcgtcagaaaaacttaagcagcaggaactgtagtggccctttattgttccgccaaatgaaggattcacgcacacatcaatctgttgcgccagacgagtcgtcggaaggaaaaattatccgtcgaagggggcgcttccaggttacatcagatagtatttctgaaaaggtagctacatcatcctgcaacagcagcaggataaatctaccaattgatgcagcacgttcaagtcccaagttgtctgcaattcttccaactttgcaattcttgatgaagcagaatactatgcaaaaggaagtactcagtaggctgatttcttcaattgaggaaacatctgatgattctgaagcaaccggaagcagttcatatcagtcttctggagggcctgcccgagaaaaggaattgcatttgtatgttctccaattgcagcgaagtgtcaccgaacttgctgaggaagtgcaaagattaaagctccaaaacaataagcttgagcatcagatcaatatattgtcaagaaaagatgaaaggtcgtcaacgcaagataactgacaatgatgatatgccccttctaccacattgaaatggaaaagttcaggcctctgctcttacacgcaacgagtcttacaagtttgttgctcaattgctaatcaagaatagacgggaaatgaacataataaacgaaagtgaagctgtgatccttcgaggctgaggtatacaacaattgagaatgttgtggtagttggaggattttgtatagccattgtactgcgctgtcaaatagaatcttttgtctagtaactagcattcatgtttgtcgtctcttatctagacgccactaaaaagatatgttctgtatctgcggctaaaattgtggtagcccctaccaaaccgttgccgaagtttttttttgttaatcacctctgtatcaatactgctagtgctaggtttgggg

SEQ ID NO: 30848 - DNA, 2041 bp, Zea Mays
gttatgatggactttgtcttctctgagtcagaaggtggaatatatgacaataggaatgggatggactatcatattcctgtgtctgattctgttgcaagggaacctccaatgcatattgtacacattgcagtggaaatggctcctatcgcgaaggtcggaggccttggtgatgttgttacaagcctttcacgagctgttcaagatttaggccataaagttgaggttattctgccgaaatatgattgtttaaaccttaacagtgtgaaggatttacgctaccaacaaagttttacttggggtggcacagagataaaagtatggtttggaaaggttgaagatctccctgtttatttcttggaaccacaaaatgggatgttttgggttggatgtgtctacgggaagaatgatgagagtagatttggcttcttctgtcattctgctctggagtttttgctccaaaaaggatcttctcctgatatcatacattgtcatgattggtcaagtgctcccgttgcttggctgtacaaggaacattatgctcttaatgggatcggaaatggtcggattgtatttaccatccacaatcttgagtttggagcgcatcacattggcaaggcaatggcacattgtgacaaagctacaactgtatccgatacatactcgaaggaagtggccggacatggagctattgcacctcactactataaattccatggaattcgaaatggaattgatcctgatatttgggatccatatactgacaaatttattccggtccattatacatcagagaatgttgttgagggcaagagtgctgcaaaaaaggcattgcagcagatgcttggattacagcaaactgatacccctgttgttggaatcatcactcgtctaacagttcagaagggaatccaccttatcaaacatgcaatgcatcgagctcttgaacgcaatggacaggtggttttactgggttctgcaccagatcctcgcatacaaagtgactttacaaatttggccagtaagctgcatggtgaataccatggccgagtgaagctatgtctaacctatgacgagccactgtcacatttgatatatgctggcgcagacttcattctcgttccttccatcttcgaaccttgtggtctaacacagcttattgctatgcgctatggatccatcccagttgttcggaaaactggaggcctgtacgacaccgtttttgatgtcgacaatgataaggatcgggctcaagcacaaggtctcgagccaaatggattcagtttcgaaggagctgatagcagtggtgtggattatgctctcgacagagccataaccacattttatgatgcacgcgactggttcaattccctttgcaagagggtaatggagcaagattggtcatggaacagacctgccctagactacatggagttgtaccattctgctcgcaaaagctgatagcttttaccactagggaaatcaggctcgttttgcccaggttagaagcatctcagcctcaggccttgtgcaaattcatttgtgcactgggaagaaaagagtaccgactggccttgagcatgcccgccgtctaaggatgcaacacacaccgtgtatagttagagaatgctactcgtcgtacgtttcatgcatgtgttttgtgtatacacctcatgtagcttgcaaaacaacagtacgacgtatcccggccgtctaccatgcctgagggcgtatataggctataggcttatgcaaagcatgtaccattaattaattattacatagtctttttatgtcaaagtagtggaggcaaccatgatcttccttcaccgctcctcctcccccccccccccccccgttctatccccggtggttgatggtatgtcggttgtaccagactcagagtaacagatgtcgtggccctcgggtaccctttctcctctcggtggttgttggctccatgttgtagcaatgattgttgttgccgtaaatttagatttatgttcccttatttctcgatactgtcacatgcatgatttatgtt

SEQ ID NO: 30849 - DNA, 1241 bp, Zea Mays
ccagaacgcacgagcctgctaaacctcctgccctagtctcctctctgtctcacagcacagcccctgctttccccccaccgtcccacggccgccacgccgccacgcttcttcttccctttcccgtccaacctccaaccctgccggctgccgcggcggcggattaacacaataccttggcgagagacgtaatagtttctgaactcaccgcgctacgcccgatgtcggagacggcggcgccgatcggcctgtcatgggctcccaagcttccttcctttgcaacgaccagcggcggcagcaagatcgaccacgcgccggatccgagcaccgcgcagggctcgctctggaagcgcacgagcgagctcgtggacgggctgttcgtgcccccgagggaccctaggcagctgaataagctggctaggaagaacgtcaaggacaccgccggcaagggctggttcgacatgcccgcgccgaccatcactcccgagttgaagaaggatctcgagattttgcagctgcccttggatcagtgtgtaggagactagtagggcgaacatggagagcagtttactgcaaccatctgacagtctgaggcatgtaattgacccaaaaaggcacttcaagcgggcaggaaagtccaaggcccttcccaagtacttccaagttggtacggttgttgagcctgcatctgagttctactcaagtaggctgaaaaatagggaacgcaaggcaacattggtggacgagctgctatcagatcaatctcttaagagctacaggatgcgcaaggtacgggaaattcaggagatccgtacaccaggaggcaaccaaaagtggaagaacaagggcaagaaaacactgaagagggcgaaggataggagaaaatgagactggtgcgcccagctttgtgctccagttgtgagggaaccaaggaacgccttcaagtcgctctagtgcttttctctcaactttgcagtatagattctggttccagtgtagtgttgtggacttcatgatgaattgatttgtatttctataaattttataatattgctgtaacagcggaattcagaaatatgagttggtagactctttcaagttagctagcttcatatatgggagaagcactgtctcagctcatttttcttgctgtgctgtgtctgcttatgatcatatctacagtttcatctttcttttgcttttgagagcccatctgggacagagatgttgcatgagaatgtttt

SEQ ID NO: 30850 - DNA, 951 bp, Zea Mays
atgtggagctactcctggctggagttccagcagctcaatgacatctacaggttcaaggcggaggagtactcgcacacgtctgttaacaagttcaacgtgaacccggagtccatcccgggctgtggatccgggagcaaaaaccgtgtcaactgcgcccgtgcgggtgagggatcactagaggctggactcgcgctagagatggtcaaggcaaaagcaagggttcgctatgagcctggaccggcttttgaggaggtcaaagaagaagccatgcttgatatatcaccaacagactcgacagagttttggttaattcagtggcctaaagaccagtgctattttctcatgtttgagattcttcaattccaggcaaatagaattttaaggcaaaagattgctggggatcagtttctcgatcttgttagtgttgaaacagaagtgcgctcagtttacaaagagctctacagcatttacaaaactaccctcaaatccaagagtttaataaatgagccgaggatcatcataaaaccaaaatcctgcaatggtgtttggccattgtgcactgcacaacagatctgctatcatgttcttggccttgttcatggcatatggacacccgttcctcaagctgtggaagattacattgcaactccaaaacctaatggctaccaaagcctacacacaacagtgataccatttttaatgagagtatgtttcatttggaagttcagataagaacagaagatatggatttaatagcagaaagaggcattgctacacattacagtggaagaggagtggtttctggacctgttcggcttggaatatcaagtggaagaaatgccaaggggaaagtaatctgcctgaacaacacaggctttgctctgaggattggttggctcaatgcaatccgcgagtggcaagaaaagtttgttggtaatatgagttctaggg

SEQ ID NO: 30851 - DNA, 1223 bp, Zea Mays
gcctaacttgcgtctttagaacacttgcaagctgtcatttagttctacggatggaactggatatacaaaactttatgcagaaccctcagctgcaggagtttgaattccagaactttccgacttcttacctccgctgtgctgctcatcgtgttgcacaacattatggcttagagactatagtagcagatagtttagtagaaggctcagttagcaggattgttgcaagaaaaacagcagaaagcagattctgatgctgcaagtattatgggaactctttctactggcaaagatgaaccagtaaatgttgacccttctgttgatgaaaccaaagtcagcacaatgaacagtcgttccagagttgctgtttttaaggatactgaaaaggatcgtagtgacccagactacgatcgaaactacaaaaggtatgttaggagctcagtgcctggcttcaacttgagcccaggtgtttttaactttgttgtgcctcagtttatgcagtatgacattggttatgtgcaatctcctggcatgtccacaaaccagcatactatgtactttggccagcctgatctaacaatagggtcttctggagctgctgtttatcgacattggccaaccccaacaatgatgtatccccattgctatgataatgttagtccaatgatgtctcaggttcctctgtaccagtctttcaaccatgattaggagattctgcttgctggaaagttgggaacaattctctgttgaacttgctatgttgtgttgtcctatgttaagtggagttcctttagattcgagccgtttttattacaaaaaattgtataaggagtcctaattcgttgaaactatttcgtgaactagtctggaactgtgatgcttgtctaatgtctagttctcgtttgcaatttgctcccggtttatagttagtagtgtgctgcgactggtcttgaaccgtgtcgcgtggtcgtactggtagaaccaggttgctacttgccagcagtcattgctttgattccgattttttatttaacttctttttaatcaagtatttcaaataatctaccctagaagttacttttacatctagttgtgccagaccacaaggacgacaaaataagattgttaaaatatgaaatgtaaatagaatttgccattgtttttcccattgagtttagagttcaaatgtcacaccggtatattccttaaattttcttatattcctc

SEQ ID NO: 30852 - DNA, 2389 bp, Zea Mays
cccggtttccttctctcgccttctcttttctgtaacgcgcagtatacggcgccgttgtttctccccacggcggcatctcctgcgtggcgccgccttccggcgagagctgcgacggcggcgcactaggcgagttactggacacgagagcgatgggggacggcgccagcggccgcggcggcggaggcggggccgggcggcgggtgggggagtacgagctgctgcgaccgatcgggtcgggggcgtactcgcaggtgtggctggggaggcaccgggcgcggggcacggaggtggcggtgaaggagatcgccatggagcgtctcagcaacaagctccgcgagagcctcctctccgaggtcgacatcctccgtcgcatcagacacgataacgtcattgcactccacgaatccatcaaggaccatgggagcatatatctcatattggagtattgtcgaggtggtgacttacatgcataccttcaacgtcataaaagagtttctgaaaaggttgctaggcatttcatccgtcagttagcatctggtctgcaaatgcttcgcgataataacgtggttcaccgagacctaaaacctcagaacattcttcttgttgaaaataatgaaaattctctgttgaagatcgctgactttggatttgcaaaatttttgcaaccttttgccctagctgaaactctttgtggttcgccactttacatggctccagaagtcatgcaagctcagaagtatgatgcaaaggcagatctgtggagtgtcggtgtcattctatatcaacttgttactggaagaccaccttttaatgggggcaatcagatccagttgcttaaaaatatactcaggacatgtgaaatacgcttcccatctgattgtgacttgagccatggctgcattgacttgtgcagaaagttgctgcggctcaattcagtggagcggcttacagttgaagaatttgtgcaccacccatttctttctgaacatgctccagagaagactttgaggtatgtcttgggcaataatcatgcacctagtagccaacaccatggccattctggtaaagtgaccaaggaaagcaagattcatgaagtacaaggtcaaaaggttgtttatccagaagattcccctatcattgattcattagagtttgtagatcaggaatacgtcttcgtgtctggaccacacctggagggatcatcatcttcaacaaatgcctctcagcagcttaatgtaccagcaaaatatgataattcgtctgtttcaccaccaaagttaactttcatgagtgcaccaatgccgataaatggtttgccgattaatagacaacaacttgctgggactggtagctttgacagccactgttctcctgcatctggcacttcacagggatctgcagatataagtgatgccatggatcagcccccatctgattatctgacgaggattagattgttggagcaatatgcatcagccatagcagggttggtcagagatgagatcaaaggtggcagacacttggaagcgttctctattcagctaattgttcttgcaacctggaagcaagcaattcatataggaaatacctttgtagcttcacctgcaagggagagtccctcacaggatatccctatgaaggggcatattgctggtgcttcccatttgcctgcgaactcaaagctagctgatgatgcctgcatgcagatagagaaacagtttctctctgaagttgaatatgctgaagaactagccagcattgtgggacagatagctgatggtacagagatgccagatgcaattgaaatgatatttcagtcggctttactcataggaaggcgaggcggtgttgatgaaatgtttgggaaagccgcggatgccatgactgggtatatgagggcggtatccatgctgcggtttctcctggtcgaggcaccatcactcgccctcaacccccctttgactctaacgagatccgatcggaatcgactgcgcacatacattgacgctctcaacaccaggctctgtcagatgcagagccagaggcattgactgctgccatgcgccctcaaatcttgtccaggtgttgtacaatattctttcatttgtaaatatatttgttggcccaaactagggcatatgtaacatgtcagaactgtggaactaggcagagcagcgaaaatctattgtaaatatatttgtagtgtggaattaggcagagtgtacgtggtaggttcattctgtgtcgattcaggcagaagcttgaaaaccgaataaccaataatagtcacgtgtggaaatgtaaacagctcggcctctacttcgtagattctttattatatattagtaaattagctcgataaaaaaaattatgcacctaatatcatctc

SEQ ID NO: 30853 - DNA, 2239 bp, Zea Mays
atggaccttgacgcggctgcagaggaggaggagcgccggcttgaggactacaatgaggcgcaggatgctaggtacttcctggggtttggtgacacccatggagatcctattgaggttgatactgttgccggctctcaaattggcactggaaccgaatccactagcccgtcagaagcagtccctaatcctgatcaggctgctaatgctagtggtagcaacatgaagaaaaggtccaagtgctgggatgactttgatgaattgactaagattgtgaatggtaagaaagtcaggagccacgttgtgcctgccgccagccccgacacctccagatgttgcctccatccatcctccgagcttaccgcctcgcccccgcccccaaaccctagaccccctacaatcacgaggaaggggagaacggccgaggaggatgctccgcaaggaaggggaggacggtcgaggatgacgttgttgctcgtcgctgagcatcttcgcgccctcagtgctgccaaggagccctctctatccctgatggcgtcccaaccgttggtaatatctccgcctcggccatgggcattgcaaccctcgattcaatctctcctcttcgatctcaggccgatcgtcggcgatgatgacccagcctccctctccacgtccctgctccccaactcatacaggaattcacaagagcaatatggtacaccaatgccacacattggacaaacaacagttgaagttgatcttttgaattatggtgtgatagaaggtgatgaatcatgtaaacatttctctgaactaaaagtcttacatccatggatgatcaaagatggcatgaatcttacaaaggaacagagattagagaaaattgagtcacaaaaacttgaaaaatatgaagccaaaggtgacaagagacatgacttgaaagatgatcaaagtgtacaggaagaatacataaatgcatattatgaggccttgaggaaaagttggaagaggaagaagcaaaaagcagaatgcagcatgaaggcaagatttttgtccctgatgctcaaagggaacgccaagttgacaataaatacaagcaggatgatgatgaagaaggcattgaataagtattccagctttcttatatggacagtaggaacccaaggtttgctgtgtaatccattatcaacagttgcactcacattagccttgtggcgattcttttcaaaacaggatgatttaaacccatatgttgttccaatggctatgggcatttaacgtcaactagagagtcccttggatatgactacaagtactatcatcaggaggattgttgctaaccatgaagcttacctgtgtattgtcagctttcaaactcgatgaaccaactgagaaagtactgcttatgaagctagagaagcatggaaggagtgttgctgaatcaaaggcaaaagaagaagctggaagagttttgatttgcatgaaggataggtcctcgacacagttcagcagagatgctggctctatgcccaagctgttgaagacgcttctaaagcactagagtattgtagcactgatggaaggccttcgatgaaatgtttccctgaaagttgcatactacatcgctgaagcactacaatattgtaacactgagggaaggcctttgtatcatgacctaaattcatatagggccctctttgatgaggtaattgttgctttggttttcacttttccttacaaccttcgaattatgtggctatgtctgaaaacttaatacttctacagttctcgggtcttcataccattccaatttgtgttagctaataaacaagtcaggctatgtctgaaaccagtatctaatagttctccgcccaacaaggaactgtgcaacataaaaacaaatcttaaacaagttacatgttctgaattttagaaactcaaactccactctaagggctaaccggctaaccgaacatgttatagaacaaactcagtcctaaattgtagacatattggaattctgcgtatgttttttccaacctatcttcaaactatacaagaattattatctaatataaacaatacattgacaataatgtacacaaaaatccatgtatttaatgtgtggacatggtatcatcatgtctgactaacccttttttactttcattgaatgaagttcgtacatgtatttgaggtattttttattttcttcctactataagccttgcttagatactgatctaagatcatctccaag

SEQ ID NO: 30854 - DNA, 3273 bp, Zea Mays
ctctcacagtcacagcatccttccttgcttctcgtctcgtcgcctctcggagatcagaaagagaacaccggacacctagcctgcgcccttgccttccctccgcgcgcgcgtgctatctatggcgatggaagacgtcgcgggtgcctcctcctcctcggtggcggccgccgcctccgaccccacgcacggctggcagacggtgtcgtaccccaagcgccaccgcaagcaggcgcatcagccaccccgcgccatggctcccgatctggcgctgcaggccaacggcaaaggctccggtgtcttcgacgccgtcgagaagcgctcccaggagcgccaccgcgcgctgcagcagcagctcgcatccagggcggccgacctcgacgacgcgcggatcgccccggtcacaggcggcgcttactccgacgactccgactccgacgaggccaccgccccgcgccaggtgggggaggtgaagaagcctaagaagcctaaaaagcctaaggtgacggtcgccgaggctgccgccctgatcgacgccgagaacctcgcagcgcacctcgtcgagatctcgtcatcatacgagaatcaacaggacattcaactcatgaggtttgctgattactttggccgggcatttgtagctgtaagcgcatcccaatttgcatgggcaaagatgttcaaggaatcaacagtgtctaagatggttgacgaggtttatgttttcatgttacattactgtgctgtagtcgcacgtagtgatgtactcgagattcatgcttggtgccaaaatttggaaaatccatgcattaatgtcttcggtttgagaaaccgttatgacacttttgtcgtatcttaacgaactgagagaaccaaccgaggtaagtgtttgaggacaccctattattatagtcaattgtgttgcagtgtactgctggatcaagttatttaattaccatatatttttaagaaacattctctatattaggatgaagttatagtccttcatgggtcacattgatttgttattatgtaattctacaatgctaaaatcttatctgcttgtaattaatgtttctgtatactgatagtagttggcactgttgttctggcttcatgagcatgattgttttttacattacactacgagattttacataataatgcctctgatttctttttcttggtcaatttttttgtgtgcgtttaactagttactgtgtcgagcagatcccactgtgccatattcctgaggctgtcatcaagactgcgagtgattggatcagtcaaagatcttatgatgccctgggagactttgttttgtggtgtatagatagcatcatgtctgaattgtcaggcccatcagcaggacctaagggttcaaagaaggttgcccaacagtctccaagggcccaggttgcaatctttgttgttcttgccatgactttaagaagaaagcctgatgtacttgtaaatgttatgccaaagataatgggaaacaataaatatcttggacaggaaaagcttcccatcattgtctggtttattgctcaggcatctcaaggtgacctagtgactggcatgttttgctgggctcattttctatttcccacgttatgtgcgaagccaagtgggaatccccttgcaagagatttggttttgcagttgcttgaaagaattttatctgtcaccaaagctcgttctatcttattgaatggtgctgttagaaagggggaacgcctagttccccctgtttcatttgacttgttcatgagagccacatttccggtttctggtgctcgggtgaaggctacagaaaggtttgaagtagcttatcgaacaatcaaggagttggctcttgccggttctcctggctctaaaactgtgaaacaagcatcacagcaacttttacctttgtgtgcaaaagcaatgcaagaaaacaatgcagagctcaccagggaggctgttgatgtgttcatttggtgcttgacacaaaatgcagagtcctacaagcagtgggaaagaatttatcctgaaaatactgaagccagtgttgctgtcctgagcaaaattgtgattgattggaaggatgtgtctcctaagctcagttctgaagctctcaaggcaacagtgaagaacttgaaggctaagaatgaggcagcgctggagtcagcaacagatgctggaaagcaggcatctatcaagaagcagacaagcactgcaagacttgagcaggggtcagagcagctgctcggaggccggcctggccctgccctgggtgtgctcgccactgtcgcagagtgctcagtggaacccgcggcacaaactacaaagggacctgactcgaatggcagctcgtcacctctcccacctgtcctccccagcgtctgcttccctcctcggccccgagccatggcgccctgcgcgtccccgtccgccctcgcgctctccgccagcacgcgggtcagcagcttcccactgacgctgcgcccgcggccgcggccggaggcgcgtgtgccgcgcgcgcccggcggcgcccagctccgcccggcgaccgcgtgctcttggccgcgccccttgctgcccgagctcgcgccggcgttccctcgtgccggcgcccgcagcgccggcagaccgcagccgctgttccggccccgcgcaatgatgacgacgtctcagatcgccagctgcgccttcaccgtgggcacggtcgccgtcctccccttctacacgctcatggtcgtcgcccccaacgccgacatcaccaaacgcacggtggagagcagcgccccctacgtcgccctaggcctcctctacgcctacctgctctacctgtcttggacccccgacacccttcgcgccatgttcgcgagcaagtactggctccccgagctgccgggcatcgtcaggatgttcgcgagcgagatgaccgtcgcctccgcatggatccacctcctagcagtcgatctcttcgcggcgaggcaggtctaccacgacggtctcaagaacaacatcgagaccaggcattcggtctcgctgtgcctgctcttctgcccggtcgggatcctggctcatgtggtaaccaaggtattggcaggggcagctggccgctcacattgatgattggaattgggtggttgtatctaggattcccgttttgtttagctggtggagtttatgagatctggatatgaataaagcttgttcaaggcactgattctttcaatgtggggtcaccttaaaggaaagaaattagttagacaaaaaaatagtttaaat

SEQ ID NO: 30855 - DNA, 2575 bp, Zea Mays
cctcgacttagttttatgttctgcataagcagaagggcttgcaacttaagaactagttcatggacctggagctgatattgataccctttgtgttggaccttcatatgtgaaccgagaggaggatttctttgtcacactgcatggcatattagctgagaaggaagaagttgctgagttgcaacctgtacctgatgctcatgtacctgtattgaaatttaagttccgtgggatatcaattgaccttctctatgctagcatctctctttcagtgataccagcgcgcctccagcccttcactcaccctccagctgcctcccctcctctcctacccgccagcatccgccagcccctcctctccaactgccagccgccaccagcagatttcgatatttctcaaggatctgtactttgtgatgttgacgaagcaactgtgcgaagtcttaatggttgcagagtggcggatcagattcttcggcttgttccaaatgttgagaatttccggacaacactcagatgcttgaagtactgggcaaagagaaggggtgtttattctaacattactggtttccttgggggtgtgaactgggctctgctggttgctcgtgtatgccaactctatcctaatgctgtgccaagtatgctggtttctaggttcttcagagtttttactcagtggcaatggccaaatccagtgatgctatgtgcgattgagaataatgatcttggtttttctatatgggatccacgcaaaaatccacgtgacagaaaccatctcatgcccatcatcactccagcctacccatgcatgaactctagttacaatgtttcaaccagcacactgagggttataatggagcaatttcaatttggcaacaaagtttgtcaggaaattgaacttaataaggccaattggaatgccttatttgagcctttccatttttttgaggcatacagaaagtttctagtggttgacatagttgcagaggatgacgatgatcttcgtctttggaagggatggatcgagtctcgtttgagacaacttactttaaagattgagcgggatactaaaggaattttgcagtgccatccgtacccatgcgagtattcagatcccacaatagagtgtgcacattgtgccttctacatgggcttatcaaggaaagaggggttgaaaaaacgtggtcaacagtttgatatccgtgggacagtagatgaatttatgcgtgaaattggcatgtattcattgtggaagcctgggatggatctggctgtcacccatgttcatagggagcaggtcccatcttatgtatttgagcaaggatacaagaaaccctgccctacaatgcatgcaaaccaacaagagcagtctgatggagatggaacatttagcccatatctggagagtcagcttaagagaaagtacatttccgatggagatggtcatgtggatctttgcaaatctgtaaaaagggcttcagtaagcccacctggtgtgggaaccccacctcatcttggaaatagtgtcagtaacgttgtttgtgacagtccagtcaaattcgtttcaagtgtcgtttgcagcggagcgcatgcttcctcatcacatgatgatataaatatagaacaagcacaattaactacttcaccatatggatctgaggatacctcagcatcaggtacaagctgtgcagcagtgggagcagttattttggctgatgaatccagcaagctcggtaacttgacatcagatcttgaagttgatacaattcagacaatgccactgcacacatctttagaatgcgtcgctcaaaagggtgaaacaaagcttgaggaaatcagaaggttggcgagcaacaattgtgctgagtttctagagagctaagttcttgctgacaaggtacacttagacttaggtgggcatgaagtgaattgaaacatcattccagacaagtcaatgaaacatgtggttcgaagcggtttcgaaaggtgatgcaggggtgaagtttgcatagcatcgataggccggaaatcggatttgaggacccaatgatatgccgctgcatggaaagtttcatcatttcatgcctgtggtcggtttgctcgtgaagattgcttttgttcgctgtggaagcgggtgcaagtattacacagcagcaatatcgggactgttgtgaaggatgaagttgagagtcaacatctgagaaccatggagctcaccatacgccacaaaggaactaagctgctggtttaggcatggttaagagagtcagtgctggtcctttaggttaaataaaaactttgcggggctgcacggtgtgcagaaaaggttgagtctagggcactaggctgatggtctatgtatgtgatgtacgcagataggcagatacctatgcgttcaaagtagcgcatcaaattttggccccattattttcactgcagtatcatgatgtgatgttgatagtagagatagagcaagtatgatactccctccgtccaaaagtttgtcgttcttgctttttaaggagtcaaacatcttgaactttgaccatatttatataaaaatattattatttatagt

SEQ ID NO: 30856 - DNA, 1982 bp, Zea Mays
gggctgaaaggaacggagccgatgccgcagcagcagtgaggcccatacgtcattcgcgaatctctctcggcccattgttaactcagaggctggctcccgcgaccgcgccgcgagctaggcgcctaggcgtagcgtagctctctccaagtctccatttcccttcccgaaccctcgcgccgccgcctactccagcctccagcgtgatctgagtcctgaccaagccctaaacgccaccgccctcgcaaatctcctttcccttcgatccatggccgccgccgtcgccgcccccgcgccatcccgcaagacggagacctacaccgacaccaagcgccgcgacgacgtgcgcggcgccaacatcgccgctgcgcgcgccgtcgccgacgccgtgcgcacctcgctgggcccccgtggcatggataagatgatcgcttcgggcgaccaggctcaggaggtcatcatcaccaacgacggtgccaccatcctttcccgcatggcgctcctccagcccgccgcgcgcatgctcgccgagctatcccgctcccaggacgccgccgctggggacggcaccactaccgtcgtcgtcctcgctggatccctcctccgccgcgcccagtcgctcctctccgccggggctcaccccaccgccgctgccgacgccctccaccgtctcgccacgcgcgctgttgagatcctccacgccatggccatccccatcgagctatccgaccgggaatccctcgtcaagtctgcgtccacggctctcaactccaagcttggtggcaccgtggacgatactgagctcatccctggcctcatctttgacaagaaggctagccatgctgctgggggcccaactcggatggagaatgctaagatcgctgtcatacagttccaaatctcaccacccaagactgacattgagcagagtgtcattgtatccgactacgcacagatggaccgcatcctacgtgaggagcgcaattatatccttgggatggcaaagattctggtggtgaaggacgtggagagggatgagatggagttcatcaccaagaccctaaactgccttcccattgccaacattgagcacttccgcacggataagtttgggtatgcagatgttgttgaggaagtctctgttggagagggcaaggttgtgaagatcactggaatcaaggacatgggtaggaccgcaactgtacttgtcaggggatctaaccaattggttattgatgaagctgaacgcagtctccatgatgcactctgtgtcataaggtgcttggtcagcaagagatttttgattgctggtggtggtgctccagaaatagagatgtcaatgcagctggctgcttgggcaaaggagcttcgagggatggagagttactgcatcaaggagtttgctgaggcgcttgaggtcatcccttacacattggctgagaatgctgggctcaacccaatctccattgtcaccgaactcaggaatcgccatgccagaggtgagaagaacactggcatcaatgtgaggaaagggcagatcacaaacatcctggaggagaatgtcgtgcagccgttgctggtgagcacaagtgccattacgttagcctgcgagtgtgtcagaatgatcttgaagattgatgacattgtcactgttaggtaagagcgtgaagttggggtcatgtcagcctgctctgttctgtctggattgattattagttaggttactgcttaatgtaaaacttggttcatgggcgtgtttctacacttggttttgatgttagtactatccttgacatgaaactactaccagggttgcatctgcgatctctattttctttacattggccgtgtatgccttcgtttcggtcggccgcttacgcccatgggatttttttgagccggttgtgttgtaatctgttcttggctttatcagctattcagcttatatattttctttttgagaaatgggaagggtttcattcatt

SEQ ID NO: 30857 - DNA, 302 bp, Zea Mays
gacgcggcaggggcacaggagcgtgcaatgagctcagtgcggcaggagctgggagggcgagctggctggaggagctccggaggagagtggaacgctcggtggtggatttgtagaaatccaggggcggcggctgtagaagataaacacgacttaaaaaaaatctaacagagagagacgtgaggatgaggctgaggaaagaaaatctgttgtgaagacaaaaaatcagccgagggataaggctgatggcgagggatccatgcaccagacgtccagacgtggagaggatcgcaaggaagtgcaga

SEQ ID NO: 30858 - DNA, 2269 bp, Zea Mays
cgaactcacgcaacgcaagctgagcaaccgctgccggccgcgcacggccgcccacccaccagtccaccactaaagcctcacaccgccacagcagctgccgcggccgagccgacgacgaggatgagcggggccgcgctgtgcgcggcgctgacggagctggggttcgacggggaggacccgctggacgcggatgcgctggagtggccgttccagtatgaggaggcgcgaccgctgcttgcctggatctgctcctgcctccgcccctctaacgtcctctccccgtcccacctggcccagtatgaacaactcgtggaagagggaagactgttagaggctgtgtttggatcggaagaaaccattcttgatatccgtgaagcaaaactagcatatagagccgaagtttttgagttacaaaagcagcttgtgcggcagcaagcacaatttgatttgcttgcaggccaggcttcaactcttattcaaggtagaagatcacgtgtatctgctatgtctgcagttagtggagagcttatatcgctagatgagatactttcttccagaaacttggagatgaattcagttcttggaagaatcactgctactacccaggaactagcccattatcattcaggggatgaggaaagtatatatttggcatattcagacttccactcctatgttgttggtgacttggcttgtacgaaagagctaaataggtggttctcaaagcaatttgagaaggggccatttcgacttgttgctgaggaggggaaatccaaatgttcctgggttagtcttgatgacatcactaattgcttgataagaggagattctgaaaaatcgcatcatcaccaacgtgtcgctgagttgcaacgacttcggtccatatttgcaacaagtgaaagacaatggattgaagcgcaggttgagaatgctaaacagcaggctatactctctatattgaaagcacaagtgtcatccgacgaggctcatatacatagggatatccattctcttaggagaaaaggttctgagcttgctggagagctctcgacactttctcaaaaggtgcaagctttggtatctgagacaataccatgcctgtgttcagaacttgctcaacttcaaggcacatatatcttgcaaggggattatgatttaaaggtcatgcgccaggagtactacattaacaggcaaaaaacgttcatcaatcacttggttaatcagcttgccagacaccagtttctgaagattgcttgccaacttgaaaggaagaatatagctagtgcgtactcattgcttagagtaatagaatctgagttacaaagctacctctcagcagtcaatacccgcttgggtcattataattcattgattcaagctgcatctgaagtacgagaacaaggagctattgatgatcgtgacactttcctccatgcagtgcgagatctcctatgtattcactcaaatgtccaagcaacagtgccaacatacatgtcagcacatgcattggttcagcagatatcagcacttcaatctgacttgctttctcttcagtctgagctggagaacacccttccagctgaccggaaaagatgtatcaatgaattatgtactctgattcaaacagtggaacagcttctatttgcgtcgtcaactactgcagaaccaatattgacgccttggccattgatgcgggcacttgatgatatggaaaatgccaacgctcaagtcgaagtttctgtggaagaagtaaccaaggctcgcacccagaagataaagatctttgaaaatcgtgcccatgaggtggggagggagaggcaaatattcgttgatttcttctgcaaccctgaacgcctcaagaatcaagtcagagagctgacctcccgtgtgaaagctctccaggactaacctgtttctgtaggctggtctcacaggtcgtgatgctttttttttctatgtaaagtttgacttcactccagcgtcaggttggggctgctgtgcagggacggtatggaacaatatacccatcatgtagctcgggggggttcaggctgtaggtccttgtgccacccggaataggatggcattgttgtgatattatttgtagcgatatgtatgttgtaaagtatctcagaaatcacgagccctttctttcgtgtatggttttgcttttgagtaggttgtggtggtacagttgttagcgtccaaaggcacaatcggtactgtagtttggataaatgggatcgatttcctcttcactcgcctctca

SEQ ID NO: 30859 - DNA, 2251 bp, Zea Mays
aagcaacataactttccatgatgttttgtctagtaaaatatgcggttgtcatcgtctctgtggtcatattgattggattattcagcatgcagcactttggtactgataaagtcagttggctttttgcgccgatagtatttgtttggttcatactcattggagtcctgggcgctgtaaacatttccaaatatgaccaatctgttctcaaggcttttaatcctatctatgtatatcggtactttaagcgagggaagactagctgggcttctttgggaggaattatgcttagcattacaggaacagaagcactgtttgctgatctctcatatttccctgtacaagctattcagattgctttcacggtggttgtgtttccatgtcttcttttgcagtatacaggccaagctgcctatatagctcagaacaaagatcatgtctcccatgccttctatttttcccttccagattctgtactctggccatcattcattgttgcaacagctgctgcaatagttgctagtcaggcaactatatcgatgacatattcgattatcaagcaagcacttgctctagggtgcttccccagagtgagaattatccatacttccaagaagtatctaggccagatatacagtcccgatattaattggatccttctggtattctgcattgctgtcactgctggatttaaaaaccaaagccagatagcaaatgcatacggtactgccgtgataatggttatgcttgtgacaacatttctcatgatccctataatgctgttggtgtggcgcagccactggaccttggtcatcctgttcaccgtgctgtcactgtttgttgaaattccgtacttcaccgctgtggtgcggaagatcgaccagggtggctgggttccacttgtgtttgctgttgccttcctcatcatcatgtatgtatggcactatggtacgctcaagcggtatgagtttgagatgcacagcaaggtgtccatggcatggatcctaggccttggtccaagcctcggtctggtcagggtgcctggtgtgggcctggtgtacaccgagctggcaagtggtgttcctcacatcttctcacacttcatcaccaacctccctgccatccactccaccctggtctttgtgtgtgtgaaataccttcctgtctacactgtgccactggatgaaaggttccttgtgaagcgaattggtcccaagaacttccacatgtttagatgcgtggcgcggtatggctacaaggacatccacaagaaggatgatgacttcgagcagatgctcttcgacagcctgatgctattcgtcaggctggagagcatgatggaagagtacacggattctgatgagtacagcacccgtgagacgaacctgtcaggcagcgccaacccaagaatcaatggcatcagcgccggttcaaacatggatctcagctacacatcccatgactccattatacaggtgcagtccccaaattatacggggaacagccaggcggtgtcaccaggtcagctgtaccataccgtgggcgacgagattgcgttcctgaacgcgtgcagggacgccggggtggtgcacatcctcgggaacacagtcatcagggcccgcagagattcagggttcatcaagaagattgctatcaattacttgtatgctttccttaggaagatctgcagggagaacagcgccatcttcaatgttccccatgagagcctactgaatgttgggcaggtgttctatgtgtaagcactaaaaccaaacacatgtagtagatgagagttcagcttcggaaccactggagagaatctagctgtgttttgttcataggtaataggagtataatagttgaaagaattgtacagcaaaacagcatctttaatgtgaccatttggagcctgatcagtagtggctagggctggacgaaatacttgtggctcgataactcgctcgactcggctcgttttgattctgtagcgagccaagctagcattttagctcggttctctaatgagccagctcggattagctcgtgagctagctcacgagccaaacgagccaagccacaacacaagtttgtctagtcgtaagtgtcgtctcatctcttatagtctcgatttctcgtagttatgatcagtgatatggacatgtgtggatgcgtcatatgcttacatgtttgcattattgtatggctacatacctacattgcatatttaatatttgatcattggttatggttttgt

SEQ ID NO: 30860 - DNA, 1224 bp, Zea Mays
gtccaccgcaagaattagcgaagcgtgcgaactgcgaagccaagcaaagaactccaaattccacgccgatccgcccccaccactactccaccgcgcgcctcccctcccgaatcccgatccatctccatccagccgccgccggcatccgcgagaggccatggacgtgagcaggaagaagaagtgggtggcctgggcggtggcggccgccatcttcgtcgtcctcatgctcgtcacgcccgccatcccgcaggacgaagcctaccacgacttcgcggaccagcgcacccttttcttagggattcccaacaccttgaatgtgatctcaaacatccctttcttctttgttggcgtcacggggctcatcctgtgccacttcaacaactatttcaggctaagctcgcagggggagctctggagttggacgctgttctttgctggtgtcacggctgttggatttggttcttcctattatcatctcaacccgaatgacgccaccctagtttgggacagactgccaatgacgattgctttcacttctgtcatggctatattcattattgaaagggttgatgatagagcaggggcaaaatcccttgcaccacttgtgattgcgggtgccttgagcatcatgtattggagacactttgatgatcttcgcccgtacgcagtagttcagtttgttccatgcattgctttacctgtgatggctatagtaattccaccgatgtatacacattcaagctactggttgtgggcagcaggataagcttgctccagaagtggaagaccagttgggttgcggtgagagagaggcgtttcaaagatagcagtacagttgatgtggattgcggctacgctgttgtttcaagtatatctgaacagtaaattgtcatgcatctaattaacatgcacgttgtttcaagtattagcatgcatgctgcgcatgtgtatgagagaagatccctgtgaagtattaagaaaccaacctacctagttgagtttgctggtcggagttagctgtgcctgtgggtgacatatcttgtacatagcagaaagcaatacaagtaacggaagcatgtattacaagatttgcgtatatcatttcaatttttttccttgaagagactgatgcgtgccttaaaagtagatgggatattttgatttctagttgatccaacaaattcagcataacattggctgttgcaaattcatgcaataaatgca

SEQ ID NO: 30861 - DNA, 4697 bp, Zea Mays
ggccctggctcgatttgctgtgagggtggttgctccgagctcttagccatccgtcgccgctgtagcccactgctgcgggggtgctcgcggctgccgctggtgtcggagactagggttttgggtctgccaggcggaggagggtgcattggttggcgtgcgcatggggatggtgcccaacgggctcctgcccagtgcgtccgccagggtgacgcggcgactggaccccgagcgctgggcggttgctgagggccgcacggcggagttgatcgcgcgcatccagcccaacgcgtactccgaggggcgaaggctggccgtgtaccactacgtgcagcggctcatcatgaactgcctctcctgccaggtttttacctttgggtcagtccctctcaagacttacttacctgatggtgacattgatgtcactgcttttagtaatagtgaagaactaaaggagatttgggcaaatcttgtccgggatgcattggagcgcgaagagaagaatgaaaatgctgaatttcatgtaaaggaagtccaatatattcaggcagaggtcaagattataaagtgtcttgtggaaaacattgttgttgacatctcatttaatcaagttggtggactatgcacactatgttttcttgaagagattgacaacttgatcagcgaaaatcatttattcaagaggagtatcatattaataaaggcatggtgtttctatgagagtcgtattcttggagctcaccatggtcttatatctacttacgcattggagacgcttgttctgtacatatttcatatattcaacaactctttcaccgggcctcttgaggtgttgtaccgcttcttagaatttttcagcaactttgattgggagaaattttgtttgagcttgtggggcccagttcctattagttcacttccagatatgactgcggaacccccacggattgacagtggtgaattgttgctgaacaagtccttcttggatacctgtagttctgcatatggagttgtgcctcacacccaggagaaccacagtcaaccatttatttcaaagcactttaatgttattgatcctttacgtacaaacaacaatcttggaagaagtgtcagtaaaggaaatttctttagaatacgcagtgcttttgcgtatggggcaaaaagacttggaaaattacttgaatgtccaaaagaagatttaattggtgaattaaaccagttcttcacaaatacatggataagacatgggagtggcagtcgtcctgatgtgcctaccccaagtatagttgatgtgcggcctctgaaggttgttccttctgtagtttcaagcagccagagaagtgtaacatcattcaagaaaaaggctgaaaatcctaagctccatgctactcaggataatcttcgtctgaatcaagataatctcactgaagatggtcacatttatactgacccttctcagccaattcacaaaagtgacatacattatcgtaatctaccaagagcagttaatccatctgtttctcatgttcagcaccaaaaaagttacacagcacaaggcagtgctaaggtctctgaacagcttgaaagaaataattcagctggattgatgcaaagtgaaagggataagagagtgccaaatggtctctttgtcaatgacagaaatgggcagaacaggtctagatttgcaagaacccgatcaagtcctgaactcacagactcttctgcagaaggatttcgtggcaggcggactaatgcagttggtatggaaaaatctttgggtgttgattacagcagcagaagaaacatcctggttccagaaatgtctagcaaccacagcactaagtcttcacaggatgaatcagtgtcttccttgaactgtttatctcaccctagtgcagcagcttcggactcaaatagtgtttcaagcagctatcgtgatgataatggttttgtaatgaatgaagaactcccttctgtttctgaatcgtcggatatgcaccatgacgaacaagttctggttaatttaatggaatccgtgaagttgcatggattcaatggacagattcaattgccaatgcaaataccttctcatatgtctgtagcgcatcccccactgttggctccaacatctttttcacaaaagcatttgaccggggttccaccagctaacttaattgggacaccatggttacccaatatgcagttcctccatggatttgttccacctcctatggcccattacatacacaatccaaattttgcaccaaacattgaggatggtactgagactgaaaagcctaatacatcagatgtgaatcatgatgctggcaaaacctggcatgagtatggtgttgggttttctggacagttcgatcctgaagcaagagatcctcacatctatgatattgatggcaaagaacatttgtctttgcctaatggtgtagcaggtgctcccttggaaaggcagatgaaatttacagttgagaataatggtgtagatgatgaaacctatactggcatgttccaaaatcatacaagtagagaagctgctgtagattactctaagaggagtggctatgtaaatgttccttcttcacatgccagttcatccaaaggcaaaactctggattcgagtccatgggatgaaatgactgcacatacaacaagaccaccaagagaaaaatggggaaaaagatctgcctttgcagcacctgccacgaccacacatgtcaagactgggtggcagatgggaaataccactgagcatctctcgaccgaagttaatgatggccccagaaatgggacagtggtaccaatcattactgaagcttctgagatagtaacagggtctgattctttttcaacacaatcaagaactagtcaagtaccaaatgattttgatccatcacaaattggcatgcctaatccagtgtttgcaccttttcttattggatccccacagcataggcaagctgatagctctggacttacttttgttccaacaggtccaccagttccttttgttgtgctcccgtttgtctcagggaatagcgatggttctggtccccagtttgagagaagcgaaggaattgatcagcttcctgccaatactgtaggtcatttcgttggctcacttcatgatgttcaccaacaagattccagtgctacctcaacagtatcatccagtactatgactgagccatctggtgatcacaagcctgacatcttgaatagtgattttgtcagtcattggcacaatttgcagtatgggcgactctgccagaatcctcgtcccatgggtcctgttttataccctgttccggtgccgccaatgtatttacatggccatgctacatgggatggtcctggaagaccagctgcaccaaatgttaactggacacaaatggtgggcggtcaacgagtatttcctgttatgcctgtacaacctgctacagaaagaaccggtgttcttcagcactatagtgaagatacaccaagataccgtggaggcacaggaacctacttgccaaatcctaaggttcattttagggaccgacactcaaattcaagaaactacagaggaggttataatggtgacaggggtgactatagtgataaggagggaagctgggtaaactcaaaacagcgaaatctgaaccgcggctatggacgtagtcagtcagagaggtccagcatgaggtctgatagacagactactgatgagagccagtctgatagacaaaggcgaacttatagaactgactcgtaccggcatgaggcaagttctcagtatcttgtgcagggccaaccttttggatccacaagttctatgcgcaaacaaggaaacacatcacatggggtttatacaccaccatctacgtcttcaaatggtcccagtgctttatctggccctccaggaccaccattttttatggtgtactcttatgaacaaggctcaaatcatggtgctactgctacctcatctgaaccaattgaatttggatctcttgggccacttcctgcagcagatggtgatgacataccaaggtcgacacgccaaataatggctaatgggttttatgggcaaagacgtggtccatataggggcggttcctctcattcgtctcctgatcaaccatcctcacctcagcctcgtcggtagttgagtcttcatatgatggcttgatcacttggtttctgtcattgaaaccttgcgatagcaatattttggttcacccctcgtgatcatattctgcatgggtgaagatggttgggccatcagcagccacaaaaaaaaaaacacaagtatatgccctagttggttcttggtgctttgtgatctctcagaagcactgaattgtgaataccgtcaaaagcaattatcggcaggttattttaccagtcacaatggtgcttcttggattcaaaacaattatcttcagaagaaatcatggaaccatcaaacccagaatatcttcacacagaaatcagaattgaatagaagattatgagcaaggacgaactctgctctggccgtctcattatatgaattgtgtcaagggtaataacaatattagtatggatggagcaggaacaagcattgtggcgctgcatcagaaacaatctggaatgctttgggttttaatgtgtctgggcgtgcggtttcattcatgatagttattcctagaactgagtccacc

SEQ ID NO: 30862 - DNA, 3006 bp, Zea Mays
agccaatgaattgcaccagttccctgaccctgagtctgcttgttgctccttgacggttcatccacacctgtggtggaataagcatcgcccacagacccaatccccaagcctcaagatacagcagtgatggacattgagcgatgcaggatatggtggccacgccaggagctgcagttcaagcagaaacccttctcaccgaggctcatcctgtttggatggttcttcagcagtgctggttctatcgacatcgtcatctctgcagctgtgccccaagttcacatcctgcactcttttgccacactggacaccctccagaccatcatcctttcctcaaataaaaggatgccagtaagcctgcaagaatctgctgcatttaccattcttggggattgtgtccgacacccccctaaagagttagaaggatactgctttaataaattggagcagctgcccttggatgcaaactttgttcagaaagaacattttggcacgagaagaaacaatgtcatgattggatcagttgggaatggggatcagggtccaagttatgatcataggagatggggatgcgattgttgtgtgttggatggttttctggaagtttgcagaaagtctgcagtcaaagagggcagttgggtgcacttgtattggaagtttggagagaactttaagagcaacctgaatcaagttccagttcttcaccatttgtatcttgatggccaacagattgaaaacaatcgttgccatgtcatactgtatgaggttccgaccattggcagaaaccatttctcactgggtttggatgcaccccgtacgttgaatgtttctttcaaaaagccaaattggataaatgatctacaaaagcaaccatcatttcttgatttgctagactgccggacactcaggaatgttctactacatgctcaggggcttatttcatctttgcatctgtatacgatgtcttagttcaagtaacatggcattgcgtggggatatttttggcttcatcatcaactattctctacatcatgattctaatgtcccggaaatgtttaagccatatgccccagtacttgatgctaaataaggttttcagacattcatggaacaacattcatcttcgcagctgtcaaattctctactggccaattgtcttccaagatgcttccttaagctccactgtgaatgttgaatatgcacacaaagctgcaattcggaagcatgctttgtggtcaagtatcattgtggatctcctgatgggttttgtccttggagcagcattcttattaaatacagagactatttgtatttggactattgctctcgtccaccacatgacagaagcaatcttgagatccggttgtgtgtggctgatgggtgttccagctggatttaagctgaatacagagttagcagagctcttaggcatgatttctcttaatgcagttcaaatttactctaccctttggtttttcgttggaggctacctgagacatataattcaaggcattgcagtctctggaattattttaggacttacagctccagtttcattctttattgacattatccagcttgctacgttgcatgttaccatccttcactggttaatctcatcgttatattcaagacaaattcagacagtagcatcattgtggcgtcttttcagagggcgcaaatggaatcctcttaggcagaggttagatagttatgactacacagttgaacagcacgtggttggttccctgttgtttacaccaatcctacttcttatacctacaacttctgtattctatgtattcttctctatcttgacaacaacggttatctgggtgtgtgtgatgctggaaattgtcattgctctaatccaatccactccttatgctgagttaactctatgggtgatgaggaggcacagatttcctgctggattatttttctttcatctgccatcaaatgggcatacttttgaagatgacgacctatcatcccattcagtcggatgttgcaatgaaacaagaaaggaggatctaatcgacaaactatcagaatcattagtttcagaacttcattgcagctatgcgacttttgttcaagtaatcagatcaaattacgagagagttttcaacaggactggttactccttttgcaaacaattggcatacgggatccttagcggtgaaagggtgccttcatcgcttcatctgcagacgtctccctcatttccctggatgaacatcggtattacggagtattggatgcactgctatgtttgtgtccttcagtgtgcaccaaagagagatacatgatgattgcatttgaacgaaccttggttcttttcggcggttttggtttcaaatagaggttttctatagtggtggttgattattctggaggcaagggaaggtcatctgtacactcatggagccttttccctcgtaacaatagcgatgcgagttttttaagtcagctgtaattttatagttatatgggatttgcacgattatggtgcttctacttgagtacttgacactcgtgtgctagctgtgttttcatgaaagaaactgaatatcagctagactgacgggtgagagaaaaggactcatgctccgctgcaaagatgaacctcattgttgcttcacgataatagcttcttctgcacgtggcaaatagctggcatgtagcaggatattttcttttcaaatatttggggtacctgaccttgcttacccaaaaagccgagtagatttagcttactatgcattggtgatatttttggcaatgaacacgaatcgagaagtcgtagcgttatagcgagctgggccaatgtaagtcagtgttgcacgggatattgtctacatcacatgcagatttttttttcccacgcgaacgatgcagtgaacatgcatttaggttaaactcttaggctcatttggaatgcaacaagtttatagagattgtatttgaattttacagcaatcagtttatttttcatatgaaaaacac

SEQ ID NO: 30863 - DNA, 505 bp, Zea Mays
gccaagcattcttcatgccaattagttggaagcacaattgttggtattggttcaccggatcctcctgcattcgtgtatgacgatgaagactacaaggatgtttttgtgtcagaggcttgcttgctcactcgcgacgagaacgagtggtacagggaaccaatctcggccaatgccacgtctggcaaagaaggtttgcaagcctcggttgctgactgatttaagtcaggttctgtatcagttttgtgactattatacagatacaggatttgatcaacgcctcgacatggtaggaaagaacactacggtataggcggggattgttcacaagacaatctggttctggaatggaccattttcagtatagcaactattgatttgagcaacagtcagactaatggttccaggagaaatttatcccgtagatgtataaggatcaaatgaacaagggaaaatgactttctccgtgaatttttaacaatacaagcacacgtagttttgaaacaat

SEQ ID NO: 30864 - DNA, 2624 bp, Zea Mays
gtctactttcattctactgctatgagtagcaattccccgcgcgcgctctctccgccccggcactaggccaacggcaatcaccactcaccaggtgccaaggtgtcttgtcggccccttcaccaagtgttagtcgggtccttcgccggcgacgggcaccaccagtatggacgaatcacgaaaaagagctgtctctactgcaaatgatgaagactttggaaatgacttcctttcatcttggaagttaccaaaatcaggaaaagacacgattgacttcagtgttgactcagttcccaagagtagcaagaaattcagctttgacaacctagatgattttgggcttaatggagcctttgacaaattaccgtcctttcaaatgggcatgtctgatctggatttttctagccctgacaagaaaaaagtgaagcacaccagttcaaatgcagatctttttgaaaagaaaaaggaaactgacaaggacaatttctccttttcttttgatttcaatgagttgggaaagtttagtcttgatggaaagctaggaattgaagaaaagagtactaatagatttaatggcaaatctgaccctgtctcctcagaggttaaaaaggatacacaaagaggccttttagccaagggcaatgctatccttgaagagaataatagtaaggataaaatgcatacacttgatactcgcacttcaagaccttctcatctgacgaatcatgagaatgtgaagaatgccagtcaaccaacttcaaatatcgatgttgctgattcatctgacaagatgcaagaacataccagtgtcaatcctgcaacaatggaacaaactaaagtagactcagtgctcaatgacaatcctggagagcatcctaaagagatatatgcaatgaaggcagctgttaacataccttctcaggatttctcctgcggtgccatatctagtgaagatccaacacaagggccagcagatcatgtgaacagtaaagatgcacctatagtgaactgtggtaaagttcatgtatcgagggagagtaatgatgatgagcagtcgaatggtttacaatccagggacaccagcattattaattccaatgtgtcaagaagaccgtcgggccaatttaactcccagaatgaggttcttgaggaaagtgtttcgcttaatgaaggaagtcaagacaaccaaagttttagtggcgctcctaagaagtttttaaagaagacatcacatgggacaacaaataccgaggaagagatttcaggtcccaagattctctcttgttcagtgcagagggaaatcagaagtgttgaacctgcaccgatgaaggagagaggaagcttctctcttttatccaagtctgtacatatgaaagcaaccagggttgaactaacttcagaaacagccttaaatcaatcatccagtgcaagtaaagtgataaaaaagatgactacacatcctacagacttgaagagggaacacatgcaagctaatgcagtccctcacaaatctaaaactgctttatcaaaaacatacagcaagctagcatcaaatgggctattggccacctccatgaatgccaaagttgacacgaatgccaaattaggccttgagcctcctatctcggggaagtcgtctctactgaatgctcgaagcagcacaccacatagcgctggacataaagttgttgcaagtcatgtgcttctaaaagctagcaatacttctgattcattgcaaggtgttccttccaaagataataaatcgtcaacaatttctcaactgacaggagcaagaatcacaaaattaggaatcagaagtctgaaatctgacatggccctagagaaagaatcagtacaagtgagtgggacaaagtgttccccggtaacaacatccagaatccttgactccattcctgaaggaaaacctgcattgcctagcccatccataatgcagaaagttcctgaggaatcagctctaaatccaaaagctcctaaagtgctcaaacacatcatgagatctccagctgtaagaaaatcacctagaactgttccggagttgggaaatgaaatgattctgggaagtggaactccaaaagctcatgtggataatgcaatctcctcacgtatgccacctgggatgggagccatttcagatctagagttgcctgtgttagaaaatgatggaaacatagaaaaagctgaggcttgtagaaaggagcttgaggatatatgcattctattgaaaaggaaacatgcagaagctaaagagctagcagttcgggctatcgttaacaacaatacgatgctgatgttaaaccacccgatgattgaggagaaaatatcctaagggggcgtttggatcccttcattttagaggaattggaattcactcaataaaataacttatttagtttggaatttgacattccaccactttccaaagtttagatataagtctatctcaaattcatggggtggaggatgggaaatgactttatgtattagtagaatttgtttctactctgtaacttacatgacactcttcgtctcactcttctatagtaaaaatgtagcacataaatatctctgacatcttgctaataatagtatacaaatatattttgcat

SEQ ID NO: 30865 - DNA, 2258 bp, Zea Mays
ggagcaactgcgggctgcactcggtctcgccgtcgaactcgaagacgaacctcgggtaatcatacacatgatttgtttgccactactttttagatgcacaagatcctatgctgtacatgccaatggttaccttctcctttatgtttttctcttgttcttagacaatatatgtgctttctgaagtgtcttttggaactagacactatttcccaatagcaaatctcgaatactgatgcctgacaatgatgcaacttaaaacctgtagactactcctgctgtttcttattgccaataagcacaagcacacttgagaaccggccatcaccatggagatgagactctttatcgcccttcagtgcgtgcagtgcgccaccatgcaggtgaagcagcagaagaagagcagcaacaagtgggtgtgtgtggtgtgcaaccagcgtcagtctgtgcttcatgtccatgccaggggctatcgtgctgctgatctccgccgcttcgtccaggacaccaaccttgcccgtggccgccgggagttcgcaccgttggccgagcccgacgtggacagggatctggcggcagttgaggagggagatgtgttccctatcgagaagagtcagacggaatggtccgagtatctggacgatccaggggagacaggtaaaggttgtggtggccttggcgcagatgcttcagatggagaatcggatgaaggaattgaggtgataactgaactgcctcagaaaagacctaaagttaggcctcgcaaagcccaatcagatgtagtaggaaagagaaccaagctgtcaacacatcccactttatgtaataagaggcagcagatcaagcaaggatcaaatccccactgtgcaactactactgctgaagcacaaggatcaaaatggaccaagtatttggacacgagccgttttggtgggaggaaatgcttcgatacctctggtctgcactggactgaacatgatgaatctgccactactgaggctactactgacgtagtggtggatgatgaggtgcaccctgatttcatctgatctcatgttggtttgaaatgccaaatgctttgtgttttggtagtgtgtagtttggtagccataaattgtgctgctggcaattcacattgtcaagacaaaggatgtgcagtacttggtacccgagggaagaagactgttgttcccaagatgttatccagtatgatgggcaattcatagtaaaagcaccgtgctagtcaaaatcagcccaagactattgggttgttttatctctgatcaaaacacgagtatagtcaaactcggtcctctaatcaaatctggctaccgaaacatttttttcacgtgccttgtttacggtcgccggggcatggagccagaaaccgtatttcggcgttgcaacgtgatccagggtggatttggtggtagcggattccaaatactccctctgtttattttttatttatcgcgttttagttcaaaaatgaactggctaatgataaatattccatgtgaatctccaaacgggctactctctggtggcagaatcacagggtgcatccacggaatgtcacaagctcagtgtgaggtggctgagcacttgagctgaggaaaattcttgtttctgttctgcatcaactagagtcacctgaccatgtggcacagcacagagaagagccgaagacgtacagcatggatcacaggagcagtacaccttgatgactgactgttgtctgttggtacctataatcctgtgacaggtctgaacaaccgagtgattgattgatgtctccggcttccctgcagccaaaatgacgaatgggttaccctgcttgaatcctttgccactgcgcttgcgtgctactactattccatgcaaaacaacgtgttcggaaccaaaattaaagttccgaacatcgctgtgatgaatgggtgaatcgtcacctttttctttgaaatagcaactgtatgctcgaagaacagctgtgctggtccagctatctgggtaccgtactccctaccccgattgaactgtatttgggtcaaagtaatgggggagatactctttccatgctaggatataaggtgtaactacctttaattctaagatcaagaaatatatttaattctctttatcaataaagtattgttatgagcgtgcttatattatgggacaagaataaaaagtgtttacgacttatataacaagagtagtagatataggtcatgtttgtttcagtttttttagcttccgtc

SEQ ID NO: 30866 - DNA, 2328 bp, Zea Mays
atgacctcatcgggagtcgacacgcagccggaagcacagcaggcgcactacctagagtcacactccccagcaacacagtgccactccactccaaggaagtgcttgcctcccgctctctacctctcctaccaatttcagctcagctctgttctgctcccgcagcaccagtacagaacaccccagaggcagcgagtcctgttcggtgtccggctggaaggccatgggggctagggctacctcccctccgccatggaggcgtcactgcctctgccgcgccctccacttcctcgttctcttgctctggggtacttccgaggcaaacaaagaacaggccatgttgcctccaagagggtggaactcgtatgattctttttcatggattgtagacgaaaatgcatacctgcaaaatgcacagatcatgacagagaagttactcccacatggatatcagttattgatttcctctggtaccggaaatatgttgacggtgcatacacagattcctatggatttgacaacattgatgaatggggtcgaccttttccggaccttcaaagatttccatcgtctagagttgatagagggttcagtcaaattgccagtaaggttcatggaatgggcttgaaatttggcatccatttgatgaaagggataagtgtgcaggctgttaatgctgacacgcctatcttggacataaagacgggaaaaccatatctagaggatggccgtcagtggacagcacgagacataggtctcagtcacagaacttgtgcgtggatgactcatggatttatgagtgttaatacaaatattggagctggaagggccttcttaagatctctttatcgacaatatgctgattggggtgttgattttgtaaaggtcgattgtatcttcggcacagattatagcccagaagaaatcatcactatttcagagctattgcaagaaattgatcgtccgatcatcctgtcaatctcaccaggaactgcagttactccagcattagctgagaatattagtgatcatgttaacatgtataggataactggagatgattgggacaactggaaggatgtgagctcgcattttggtgtatcaagttccttcgctactgctaagaagattggggccactgggttgcgaggaagatcttggccagacttagacatgcttccatttggatggcttactgatccaagtgtaaatcagggccctcacaggaaatgtaaccttactcttgatgaacagaaagcacagatggcactttggtcaatgactaaatcacctctcatgtatggaggagatttgaggaatcttgacgatagtacattaaacataattaccaattctggtttgttgaagataaaccactatagtagaaataacatggagttccattatgtgcacagtgaaaggacatcaaatggagaacattctggtcactttaggtctccttatcctgttcgtgttaccaagaatgatggcatatttgtcagtctcactgcttgcagcgacgatgcagctaaaggatggtatatgtttccacaagatgggaaaccagatcatatatgcaggaactatgaaatactgaatgataaaaatgtctcattttgcctcggaaaaacaaaacgttttcttgcatcggatgtccttaccatggacaccaaggaacaccaatcaaagtttcatatttcagttacaaacactgatgatacttgtttggatgcatctgctggtcgaaggcagactgcctcagagatcaggcttcctatgttctctgcatgcaggtggcatgcaaaacagatgtgggagttaaatgcgaatggaaatcttgtgagcagctattcaaggttatgtgccacagtggaatcaagggacgaaggaggtaccagtggaggtcgggcatggattgcaactggaagtgaaggagaaatctatctcgcattcttcaatctcgactccatgagcaggaagatgaccgttcaaatatcagaccttggaaaggttctcggaagaaaccttttggagaaaaacccatgtagctacactgaagtttggagcgggaagaatttcggcccggtgaaggaagagatttcagcggtggttcattcgcatggctccatggtgttcgaaatcatatgttgagattgcagtactgggcaagttgttcgagaagtttgcagtgataatttagttgtaagctccattcctgttgatccttttttacccttagtccggagatggaagagatacgttgatgaaccattaactagatgtctgctggatttgacttcaatgaataacaaaacaaacaaacaaacaaac

SEQ ID NO: 30867 - DNA, 876 bp, Zea Mays
cgtcaagatgtctggcaactgtccagttgtgctgatcggaaccacacggttcctcccttcttcgatgcattcatttccagaatgctaaatttgaaggacctctgtttgataactgggaaggcttcttggctagcatacctggatatctattgtttgaatgctgatgggtctctgtttgatgctgcacttatttcagcagtggctgcctttacacatttggagattcctttagtttctgttggtgacgatggtaaattatttactgttggaggcaatgacggaaaaaacaaatttgaattggtaaacagagaaaagaggaaactgacacttggcgacattccattgtcccttacatgtgcacttcataaaggatctatactaacggacccaacttctgaagaagaatcaattatagagacctatgtgactgttgtcgttgattcttcagaccgcctagtgtcattacaaaaagttggaggcacagtgacatccatggcaactattaaggagtgcattagcttggcgaaagaaaggaggctgaggctaagagaaattctgatagactctgtcaaagccatggaagtcgaccatactgaataattctgcaaatacattcagttaatctaaccggattatttcttgatggttctctgtgcctcggctgcactgattgtaacagcatttttgttgggttagtccaagtatgtagctatttgtactccgcacatgatttttgacttaagtagccagacaattttatctgatgagcatgtctgcaatgcaccatttctcgcaagttgctatcttgtaacaccctaattcacattttgcagtattttaatttatttttcaagatttcattagaactaatgcata

SEQ ID NO: 30868 - DNA, 5187 bp, Zea Mays
tgcctccattgaaattacgaaaacattaaatggttgtgttcaatgtgttgcctgctgctgacttatgatgaagagcacttgggtggaacgaactacattcgccaagataacaggagcctgtccgagaactggagcggcatcggtttggaccatgatcatgatggcctagaagacgaggtggcgttctcggatttcgacaaccgcaacaccttctcttcgtcgaacagcgagctccgtttctcttcgtcaaatgagcacctgcggaacagaaaggcgtgcagaaaccacccgtcgctccttccgcccgccctctctgccgacagtttgcttaggtcagtcagcaggatgacggactcgactgaatttaaggccgttacgacgtgcaatacctgcaagcccgcaacgatcagtagggacgacaccgaagctgctgatgccaggtccttgaagaacctcaacagcaccgcgccgctgtcaaactcccggacaaggcgcaatgggccacacattctctcctggctcttaccgaagtcaaagaggaagccaaaaccagatgtgtccccaaacaccgtcgaatgcgagaacatgtcgcagcttctgaaggactggggtgtgttctcactggattccctgaggaaagaggtcgttgaggccaatgagcacagggacgccgcgctccaagaggtatcagagatgaaactatcactaggagagctgactgccaagctagtgagcctggaagcatactgttcggaattgaagaaggctctaaagcaagcgacgagcgcgaagaacatgcagtctcactcaaagagatcggctaggccagttagcgggagcagagacagcttcttgcccgtcagtcacgaagttatggtggaagggttcttgcagatagtatcggaggctcgtctctccataaaacagttctgcaagatcacgctgagtgacaagcacccgaagctagtgctgtaccacctcgaagctctgatgaaccaagcgatgtaccaggacttcgagaactgcacgttccagaagaacgggtcgcccaggtgcctggacccgaagcaggagcagcaggagagcttcgcctcgttcgtcgcgctgcgcaacctgagctggaacgaggtcctgaagaagggcaccaagcaccactgcgaggacctgggccgcttctgcgaccagaagatgagctgcgtcgtgtccatcctgaactggtcgtggccgtgggccgagcagctgctgcagtgcttcttcgtggcgtccaagtgtgtctggctgctccacctactggccttctccttcgtcccgccgctgaccatcctacgggtcgaggaggaccgggcgttcgaccagacgtacatggaggacgtgctgctggacaagcagcggtcacggaatggtccgccgccgtcgtcgtcgcaggtgaaactcatggtgacgcctgggttctatgtccaggacaggctgctcaaatgcagggtgctctgcaggtacagcggctagatctctatcgctgattggattggaggtgcttcgagtgttcttctttgactgattgttagttattagtgtgatgcagtagtatctgttctgctaggttgcaaagtgctatactgggacgccagaatatcattattttgacccttggcatgcccgtcagcatctctgtaacataagagagtcatgttgtgtaagaaagatgtgtgcaagattttagctcaacaggtttcctcttaacttttcgaagggaagaaaggggacctttttttatgaacagatgcatcagccattgttcttgtttgagatgacgaggaggaacgagccctgtggacagcgagtgaactgagatggacaccaatgcacctggtatttccttattattaaagcggaacataaacgctgcctaagaagctatccacgtctgccgaattattaacgcacgtatgatcattcatggacgtcttacattgctcttaaagcggaacagaaacgctgcctaagaagctatccacgtctgccgaattattaacgcacgtatgatcattcatggacgtcttacattgctccacggccatctatttctggattgttctaggtgacgtttgcttcgtgtggacgactctcgttctcttcgtctctacgggtttgcagctgacgctctccatcctcgttcttctcgctccgttcctctttccctcctcccctccgtcttggttcttcacacctggttcttctgtctcccgttgtctctatcgtctgctccggtgaacccgcatcgttcctattccttgtgctgcttccgtcgtcggctccagtaaatcactttgttcgccagctcgagatcgtggacggcttgctaaaatcaggtttgttttcattgggtttccatttctggaagtgattaaggcgaagtaaatcttctttcctcgaaacgtatacactttggtgcatctgtggaaatctgatttgttgggtttctgatctatttggctctttgcattttttaaatcccctcctacaaatcctgctacctccccgtctttttttgtttgtttggaaaatttgtttcgtatcttccctcctcgtttttttgcttcagttcgaaatcgatttggtgggtttctgatggcaaccctcgccaccgcctcatgggtacgtgccgagccgccttatctgttcgctcaccactttacattggttcttgcgcctgcgatttcggtgtcgtaggatcatgcttgtgcggatgtgatggtcgctgtggcttcgcgtcggtgggcggtgggatttgggctgggattctcgcgccttgtctctagggtttgggtttggtgcttcctcagtgcggaattggggattataattcctttaggtttgattttatctcgggtaactgcgggataatagcctagtagggaaatcgtggggattcttaaggattattaagtttctgatttatctctgccttatttagctcgtctgttgtggtggcttttccttcttgctgatgctgattatgcttccggttatgagccacaaaacaatattgatcggcaacctgtagttttgcctcagttcatcgcttgctgtctctgttaaatgaccaagaataaagtttagtacttcacacattaggcatccagtaaaacggtatcataattccaaagtgaacagcgagacatatttctcattcttagggaagaactacaaatgagttgagatatagaagctttagctcaggattcaagcagggcagtaatgtaggaagcttactctaacatattcaagatcttctcgcaattttgacagattattgttgacaccatcaccatttgaacgttgttgcttctcgagtcgccttatcatcctctcaatcttccgtctctctttgtattttgaataccaacatcaagaagatggtaagtacattccatacatgcatagaaaagaaacttaaaatgaaaaggaaagtataacagaccaaagaactttatctttctatctctaaattgtaatgtccgctggacaacaagttgattctgaagctcttgttgcctcttcagttcttccagtttcttctcttgagcaaccctaatctcatccggaaggtcctgaaaattaaacatggagcagtaactaaacaacatggctagatgaaaagggggctatactccattgatgtaatcagaaaataaaatggaagcatatgtgctattcttttatacatgtaggttgctcacataaagtggccttgattttaaataacacaaccatggtaagcttatacccccctcccgctgtagaattgaattacacaaccagttgccacttatgcataggggtggtaatgggctctagattttacattataaaatttaaggatcgaatcgcgttaggaccatgctctattcctttttttaactaaaatttattaagggccctaactgaaaaataaaattttggatcgtggtccattaccacccttatgcctacttgactctttccaatataagatgaagattctgtcggaaagcaattatatttagttgatgcatagaaagagacatgaacatatccattctacactgttctaaaacaaggtcaattaggcttcctcacttcccctctgacaagaacaaattccctttcaccatttttcgaccaatcagtttgagcagcatagttaaaatttcagtatgttagtatttcaatcaatacttgatacttaatgcagtgcagtaatccagctacaccatgaactttatcccactacatgatgaaatttatctttgcagttaccataaacatgagagcattctcagtgacaaatagagcattttctattctctctatattaacaaaccatggaagacaatcctcagtaccatcttccctacttacctaccccgaacaacatcttatcacaagatgacgtacttggccttacaaccacgcaccagcgacatcattttccaaattatccacttctagcagccaaacaaacatggcccgacgattgctagcatatcccggtgtgccacagaatacagaggcggatgaacactacacagatcaacttaacaagaaggagctatcctcaccatcgaaaatgatgaagcacacccaagttgacaaagtcctagattctataattccagaaaaatgaagcttgttacatcctcatgacatgcatgaaggaatttgcttttgcgtatctgtggagggcttcgtcacttttgaatgaaaaaacatctatgtacatataaatcacttggtgaagcctttctcaggcatgtgtgttgatgcaacctctgggaaacaaatgctatcagctgctgacatatgctacttcaatactgcttgatatgtattgcactctcagttccgtctactgttggtccaaactgcatctgtgtatatacagacgagttgtattaaactttctaaatctgtgtatactaatgcaacctcttgaaaacagttgttagcccttgacacgtatgctattttaatgctacttaatatgtattgcaatttggttttcctgtacagaactgctacaattcacgttccaatattaatcggaagctactgcagcctagcaaaatttccttaagtctgctttgtgtccatgtatttatgtgcttcataacgaatatccttcatataacatttccacgctacaat

SEQ ID NO: 30869 - DNA, 1511 bp, Zea Mays
ataacattatggtttggaggtcttagtatgggaaggagtgggcgacatttttgtgatttggacattgtttggtcataattcttgcaagggaatctggtttggggcttgagctttctgatattcctgtacgaagtcttgtgccagaggcacttaagtcatgtacctcagccgatgaatacatgcagaagttaccatcttttgacgaggattgggcaagagagaggaaaaatgctgaagctgcgggagaagtcctgcggtatgttggagtggtggatgtggtcaacaagaaggggcaggtggagctgcgagcctacaagagggaccacccgttcgcgcagctatctggttccgacaacatcatagccttcaccacctcgaggtacaaggatcagccactgatcgtgcgaggtccgggggctggtgcagaagtgactgcaggaggcgtcttctgcgacatactgcgcctgtcttcctaccttggtgccccctcgtagtctgtcaaggttttgcggtgccgtggtgttgtgttgctgctctactactggttttttttgttgttgttgttgttagtgcttggaatagctggagtaagtatggattaagtgagttctggggtgttaagggttgggtgtcttagttagaaggtcgtattggagggaatggaatccgttcaccgttcttgcgtgttgcaataatcttgtgtggagtctccaggtttgttcggttgctgacagtaagccaagccaaaatggcgagtctagtgaagaaccaaataaaaaaaaggctgggctgtaaggaatgtatccacacgttacttcattggtgtcaccataaatatatacctggatcatttggcttggtttggtttggttcgtactttgatttgggtatgttctggaactgtccccagacaacaatcccttcttcccaaagccagtccgacagccagccaccgccgtggacgtagccggagccggtgggggtggtggcgtcgacgacgacaaggaagagatgctttatggcgcgtctttgtgcacccacggtgaaacaaccgagccggtgagctccacgcggagaagacggagagaaactacgcctagacagctgcccatggcgagggcgcttgcggctgcgatggcggatgatgatcgtggtgggcaaacccggtgtcaagagctgctgggactgggatgggcgaaaggaaattggatggtggtgaaccagcagtgacggtgaattttgtcgcacgtgaaattttgtggatggtgttggaaacagggaaaagagggagggctgccggcggcgaggcgttttaacagcgaggggagagagctacaactttgcttcaaggagtaacaataagagatcaaaggtttgcaggatacacttgctccaagtttttggcaaaactgagaactgaattcagtttcctagttttttgaaacagtttaagctcaaccaattaaagggaggctaattagtgttcaaacgtcagatacaaaaggtacgtt

SEQ ID NO: 30870 - DNA, 119 bp, Zea Mays
ccactccctggcgatcaggacagctccctgactcagccaactattatttcacagacactgaaatgaaagatgcagacttaactaaactctgaaactaactaacatcaagtacctcggca

SEQ ID NO: 30871 - DNA, 946 bp, Zea Mays
gagtcgtctagtgtcaggtgatctgaatctcattccggtggcttctgccaagtgctgaggatcggcatccggttcggttcgtcgtcctcgtccccactccccacctgcgcagctgcgctgcgccatctcgaatcctctccttccaccatctcgaacctctccttccgtctcctccccggccgattcttccagtctccagccaccttcaactgccggccgcaagtggccccgcgtctcacccctaaccccagtgaagaatctaggcgtcgtctatccagccccgtcatcatcaccatggaggaggcactggatacctaactgcttgctttgcactgatggttggaccagaagggcgagcagttggtgtcgaacatatcccagagttggttgctacttctactgaaaacatcaagaaaagtgcagcagccccacatctaaatgatggatccctcagtatacacgtttctgatggcagggaaggttggccagaactggcaccctatgaagccatccatgttggagctgcagcaccgcagatccccgaggcgctgatcgagcagctgaagcccggcggcagaatggtgatccctgtcgggacagtcttccaggagctgaaggttgtggacaagaagttggatggcactgtcagcataagagacgaaacgtctgtgcgctatgtgccgctcactagcaaggacgcccagttgcacgcaagctgagtgatctatcatgtcaaaaaaatgttatcctcacctgacaaggtgaggcattcaatcgaatcgctacccttgtaaatgtattaatcctactgtctcagtaaatgcgctggcttggaaataaagtaaatgatggaacatcatggaacgtttgtttttcttcagctgccccggtgttcttactatgcaacttgtttcttcagagcaacagctgccattcaaaatatttt

SEQ ID NO: 30872 - DNA, 640 bp, Zea Mays
tcctctcacgctctctctctctccgccccatggatgacggatactcctacaatacaagttgtagtagtagtagtaggggtactgcatacctacacagtgacagggagatggaggtcgatcccaagcatccatacatcacatgatacatgcacacacatgcttagctgcaaaactgcaacagttattaacaacactactacagtgggtgagactgattaggtaatataagtactagctactagctaggaaaggaggaggccaattcaattacctttggttgcaagccaaaaagtaagtatccatctcctttcccttgtcccaccaatgcacaagaaccttcatagtactgctactgctaccacactcatcacatctcctgctactcttcttacccagccactgctcctcctcctccttcttcttcttcctcctccgatcccctagcttgatttgagcctgcaggtcgctagcacacctcctcccttccgtcctcatcaatccatcccgcgcgcgggccgcgtagcaaccacagatccgcaataacaatccaagaaattaaaccaagctgaaccaaaccctgaaaattccccaattctaaattctcccgatccgaagccatccgctaatacaaaaaacaatc

SEQ ID NO: 30873 - DNA, 2287 bp, Zea Mays
gcgtgaaggagctacgcaccttgggatgtcattattccgcatggagcagacacaaatgctgtggatcacactggacaaacagcacttcactggagtgctgtacgtggtcatattcaagttgccgaactacttctgaaagaaggagctaagatggatgctgctgatttatatgggtatcaggccacacatgttgcagcacagtatggtcagactgcattcatttaccgcattgttgcgaaatggaatgctgatccagatatccctgataatgatgggaggagccctttacactgggctgcttataagggatttgcggactccatacggcttcttttgtttttggatgcttataggggacggcaagacaaagaaggttgtactcctttacactgggctgctattcgggggaaccttgaggcatgcactgtgctagttcaggttggcaaaaaggatgatttgatggtgaaagacaaaactggcttaactccagcacagcttgctgccgataagaatcatcggcaaattgcgtttttcctcgacaacgctagaagggtacatgacagaggatgtggtgcgaacaccagatttgggaaattgtcaaaattaggccttgcaccttttctttggtgcaccattattggcatgcttattacatacgtacactctgttatattaggacaatatgtcatgactatgacagcaccatttgggatgttcgcatggtcaggagtttttcttgcaactgctgggttggtcatgttctataaatgtagcaggaaagatccgggttacatcagcataaatacaaggggctcgcaaaatcaaagggacgatgaaccactgctgaagatggagttagaaaatcctgcgcttctttttggcaactggtcacaactttgtataacctgcaaagacttgtaagggatccagattctccatcatcttttggtgcttggattcattattctgcgtttcagcatcctggggttgtttcatttctcgcattggattgtttccttttctttggagttgcagttcttacagtttctcaagcatcacagatagcaaggaacattacaacaaatgagatggcaaattccatgagatatgcatatctcagaggcccaggtggcagattcaggaacccgtatgatcatgggattcgcaagaactgctctgacttcttgttaaatggatacaatgaggacactgaacggctagaccagacattgcacactgatgaggagatgggaatgatacagatgacaagagcggtttcgcagaatggtgacaatcatttacatcatggtaatggcacggaacatagttgcgctgattcacaggcaagcccaaaacctcatagccaagtgggttcgcctcagtgttgtgatcacagtaagaggactgataggacactgttgggcctaggtttgggccttgggcgaaacagtgcatcccggcagtatgttcggtctcttatcccattgtgatctatcatttggatatcatgtgttcgtttcagtgtagattggatttgttcactgctccggccccatcttttatacgtgcccttgacatggttcaccatgtaccattggctggtcagggacattgttgggccattagcacaggaatactgagatatatctagtgtttgtagttttggggtgaactcagagaagttgaaggtaacgacttggcttgcgaatatcagctgatctgcactcgggaaatatcagagagcttgtgcagaaaaggtaacagttatgggcttatggcagatgcagtagcatgagatgtcttcataattgttgtgtacatcaggttcagtggtcttgggggcctccttcttctgaaggtcttaaaaacacggttaaccatttattttcagtatgttattaagtattacaggagcttcgttactagaaaaacttcgacatagatcaatgaaagcacgacgaagcaagctttgttacgttgtcacagtaagtcgatgtagggagaatgtgttgttcaagctgctgagtgcaaatgataatattgtccctgtgacatttgtaaatcttgtatgtaatctttgagggtatgaatgtaatatcgtacgaattgtacgattgcttataaatagatgaacaatactgttcacactgaattgagattgcattcacgctttcgctttcaagcaagccgaatatacaaatgtaatgtacatcatgtatctctttgttaatatatgagatgtatcttgatgttgtttgacatttgatatgaaataaataatcagcat

SEQ ID NO: 30874 - DNA, 2010 bp, Zea Mays
tcttgtttccatctccgtgccgcgtgattatattgttgcctcaagctgggtccgcccgtcttcttcttcctcctcagctaatttccattattccgttccaatttccaaccgcacccaggagcaagtctgggttcgcgccacagttggagtttcgacgggtctcggtcgggggtggtgccttcgtcgcggccgttcgacctacaccatggaatcgccgcagcagcaagccccaccgccgagccagggagctagctctggaagctgcgacgctcctctgcagctagcagctcgatatggtgccaccgtaccacgtacatcctcgccacctgcctcagtcactcggccggaagtcaacaatagaatggagctaaagagcagcaacagtgagacactatgtgacagcttgacgctaaatacggtatccgtgatgctaaccgtcagcttcttcagagaagacggggacggtggtactgacgtgtttcttggcttctcatgcgtgctcggtttcatcattcgcaagtatctgtgggtgctgcgctccgagagcgcccggttcacgggtctggatatctacacgaacacggtcgttctagtggtcaccgcatatgcaatgctgctcgcgaacagtttgcagtacatcatccttgctcccttcccgatcagtgtggctgccttcatcgcttacctgtacaaggaaagactggagcaccatggcagtagtggagctgatcagcaggataataaggacggatgcaaacctggggacggcaatggcaagaaagccggggagctcgaaatggtggtagcgccgtactctatgctgctgatcagtgcaatagtgatgccgtacgaagatagccctgtcctcctgtctcacttcctgctcttctcatgttgcgcgctcgggacgctggcgctgctctactccagactggcggaagcaagtccggccttgagaccagcgttggagtgcatccagatggcctacatggtgacgctgttcataacggtgcacacggtggccgcagaatggctgggagacgtcatggcgctggtcaccatgccggagttgatcgcagggcttgtctggttctgtaatcttctccacggcgacactgcttgtaatactgcagcagtagcccacattctcagatcagatgaaggttccagcagtagttcggatgcaactcatcatcaagtcccaacaaattcggaaacaagacaagggttcgtcttcgatgggtccatgttcactcccctcggagctgttttggcagggttagtaacatccactttcgcacatgacgaagaactcctggccagctggaacaccaaggcgaccgtcgcctgcagcattgcagggtgtttgccatatctcagcatatggatggtgtcgaggtggcccgggcgcatacctagctcagacaaggcgactcggctgctcaagtttgctgcaaatgtgtgcttgactggagcttttctgatgctgtttgccttgcttgatgaaaaggcactggcctatcgtctctttggtttggatgagattattgatcctagtcaactcaaatatcttccggctgttcacttcagtacagcggtagccctgtatttctttcggaagcatcttgctggtgcgttggcaaatttaggggaggagctagggaatctcctatccctccttattgctgcttctccaacagagaagcaggggagaaagagaaggaggaagaagaagacaaaaagtatagatgtgagaagacgtcgataatgaagagcagctatagatgagcttcgttctaacatgagtccggcctctgttttaactgttttgttgctgagtgtaaaagcactccggctaagcgaccatgcaaaaaaggtgtaaaatcggacattgattgctctgagatggatggacgtttgtaaattgtaatccccgtccaattgtatgtttatggcattctttgtagatgttatgtttgagttctgcctaggtatgcactacaaaatttt

SEQ ID NO: 30875 - DNA, 1845 bp, Zea Mays
cgtgaatgggcgttcctggtccatgttcgcgtgcgctgctgccgattctgggagctctctggtcgtccgtctcgctgggatctgccttttccccggtagctcaatagatctactgctctcgggggagttaatgcaaagctgagttgctgcacgttggctttcttcagagatggcttcagctggtgtagccccatctgggtacaaaaacagcagcagcactagcattggtgccgagaagttgcaagatcagatgaacgagctaaagattagagatgataaggaagttgaagcaaccataattaatgggaaagggactgaaactgggcacataattgtcaccactactggtggcaagaatggtcaaccaaaacagacagtgagctacatggctgagcgcattgtaggtcaaggttcttttgggatcgtcttccaggctaagtgtttggagacgggtgagactgttgccataaagaaggttcttcaggataagcgttacaagaaccgcgagttgcagaccatgcgccttcttgaccaccctaatgttgttgctttgaagcattgcttcttttcaactaccgagaaggatgagctttatctgaacttggtccttgagtatgtgccggagacagttcatcgagttgtgaagcatcacaacaagatgaaccaacgcatgccacttatttatgtgaagctgtatatgtaccagatatgtagggcattggcttacattcatggcactattggtgtctgccacagagatattaagccacaaaaccttctggtgaacccacacacccaccagcttaaactatgtgactttggcagtgcaaaagttctggtcaagggggaaccaaacatatcgtacatctgctcccgatactatagggctccagagctcatatttggtgccactgagtataccacagcgattgacatttggtctgctggatgtgttcttgctgagcttatgctagggcagcctttgtttccgggtgaaagtggtgtggaccaacttgttgaaatcatcaaggtcctcggtacgccaacaagggaagaaattaaatgcatgaacccaaattacacagagtttaagttcccacaaatcaaagcacacccatggcacaaggtattccacaaaaggatgccgccagaagctgttgatctggtctctcggctactccagtactccccaaatctgagatgcactgctatggaggcacttgttcacccattctttgatgagcttcgagatcctaatactcgccttccaaatggtcgctttttgccaccactattcaatttcaagcctcacgaacttaaaggagtcccatcagacattgtcgcgaaattgattccagaacatgcaaagaagcaatgctcctatgttggattgtgaaatgaccgcgccttgagactggaacctgtggttgcaattgtgaatttcccctgggatgtttgacgatctgaggcatgcgagcctgttgttgaagatgcaaggttacgtacttgtacgacaatgtgacctgtgtagctgagtagtctatgtcgcagtgacatgtaacggcaccccccttcctactaactgacgcttactcgagattgccatagttgatcttgtaatttgttatagagcagtatgaatgtatttatggtagcttgaatctatgtatggattcacttcgtttttccatgtttccttgtctccagacccagattgctaccgtattgtttcagaattcctagctacctgttgcctattgagtattgactaccagcttgcacttgtctgttattgcactggctgtggaatcagctgttgatttttgccacaatattttagttcag

SEQ ID NO: 30876 - DNA, 5868 bp, Zea Mays
ggacagttagctgtaacctacctttccccgctcttcatcggcaaaaaagagggggaaaaaaaacgaaccctgaagaggagagggaaaaaactcgagaaaagcaaaccctaggttgccatgtcatcgacgacatcctaattcgccgcattgcatcgcccaggcaaggggcttttggcacaggtcggcgctcccctgtcatcggattcgattcccctgctcaatttgccgccgatccgtggttcggatcttctcgccgctcggcgactgtcgcgccattttttctctcgatccgtctgcgagacactaagcgcttcgccgacggtcgaccctgctgacgccaccggcgccaggtggcttgtcgcctactctggtccgccaaccgacgcttgatgcctccagggctccaaaggattgctgatgagatcgaaactgtttctgttaatttatcgtggattcaactgaacccccatgctccacgcaaccgcccctggtctgggtcgaaactctacatatgatgggaggtgaaattctgaggaattatgttaacttgattcgtgggctcgtgaatggaacccagtggcagtgataaacccactgcaacagatgctaacgaatcagtggtgggtttagatggtgaggacactttgtctgagagggaatctgttggagcaaaagatggacctgccttgcctaatgggagtggaaaggaggctcatgcaagcagtccatctgcggcgaataagaggaagcacaacgacttgggttctaatcaaatggaactcaatgaaccagggacgccaagttccagctcaggtgattccacatggagcataaatggtctcgatgactgtcaccaactctcattgtctagaaataagaacgacgactctgaacattcggttacttcagctggagttacagtgatcaggcagcctcgtggcgtcttgaggttaagaaagctggctcagaatgttagtactgagagttggactggtggtcataatacttcacaagctaatggagttcctaggtcttcccaacacccgaggcggaacaataagagggaatcaattccgtcccaggagaatagagttagtggtgatgaacctgtcagctgcttgaggactgagaatggtacttgtgatcaggataccggcaccaagttctgttccaaaactgagttcttagctgaaaagcagtcacatctttcaggcgaacccccaaaagctgttcatgttgacaagggtgtctatgattatgtcaaagacgatgatggtgatagtttggaagaaaatgctgcctggatgctctgttctttatcagataacaaatgtgctggatcaccaaggaagggaactgataggttgtcaaagagatctttttctcagaattcaaaccattttaagaattcatatgaaaaaatcaaggatatatgtagtcctgctaggttgctgcggaagcgtgatggcaaagttccgttcttgaagcgtcgtcagcgtcggcatttttatgaagtcagccctagcgatgtggatccattctgcattgttaaagagaggatcagggttttttggcctcttgatgagacttggtactttggcatggtcaaggaatataatccggtcacaaggttacatcatgtcaggtatgatggtaaggatgaagaatggatcaaccttcaaaatgagaggattaaacttctgtttttaccagcggaagctcccaataaatctaaatgcaccaactcaaggtcagcgtttgagtcgaagcatgaacagggtgacagagaagacatgcatagaagcggaagcaatacagagagttttgagtcaggtcccatcagctcatggttggctcgatcaaaccaagcaaaatctgctgcactttgtgacatcaacaagcaagatcacagtcattccaatactgttccagtttcatttgaccaaaaacagtgtcgtgcttctgatgccaaggaatctattgattctgcaccatgtagttcacttgcaaatgggggtgtagaggttctcaaggataggaccatacctgaggacgggaggtttcactttgtttattctaggaagcgattttgcagaaaaaagaatgattttcttagcatttccgaacagcattctaattgccaaagaagagcaagttctatggttcttgcttcttgtcctgatatgaaatctagtattgcaactggtgcttcagttacatatgtcatacctgcattgagcctcccactgaaacctgtttataagttgctttgtgaagcctgttgtgtttcggtttccaatgctttctttcttcttcaatgtggtacaatggttgccttatggcctgttgtacatctggatatacttcttattgatagtgctttaggcttgaaacgtttccttcttgacacatgcatgagatcggcagtatcacttttctgtttacttgctggaagctttaagcagtgttctaggcagagaactaccaaggaatcaagaataccttgtacttcagtcagatttcagatatctggtgggcatggtagaagccaagtagtgtttatgtttttcagctttgttggtgtagagaaatggaaatgggaacaccttcaaggaaagcttcaatatcaatgttccaaaagggagttgtctaaagattccacaaaatgtacaggtcgaagagctcttccttcaatgggtctcttctctaagggttttgatgttcaagagtctgtctttcttccagagtctaattattcagatatcaaacctgccatttgttgtttggatgaccggtgtaaattcactcaaagttttctggacatgacaactgcaccttcagtactgctttggcaccatagaaaaatgttaatggaaagcaattcgactaatggttctcagcaatccatgtcatgtgctttggatgaggatcatcagcagttggtaacagaacatgcatctgatacagtttgtcatgctccacttcaagtttgttcacttaatcttggttcatcaccttatagtccattggatatggtctctgctagttgtgcaaatccatctagctctactagtagggaacccaagattactgaaaggaatataagcccagaatgtaatgacaacagtattgatgatgcaatataattgacataaagtttcgagatcaaaatgagccttgtattggtgctgataggccatgttcctccaaccttagtgttatttgctcttcacagaagtttgcagaggatcgtatttccatcaatattcctcaagacaaagcaattgatgcaacaaatgataaacctcttgacaaagatgaaaaagaaaagcatcctatatctaacttggttcaggaattgaatgaacatccaattggtcgtgttacaccaactgcccccagaactacttcccatcggaaccggtttacgtctatatcacgtgcttttggagatggttcaaagttactgccagaagaccacatgttgactggcttcgctagtggttctaagaagccacgaagtcaagtttcatactcaggttctcctagaagtgaggaacttggcttaaaaaacaaagatcatttccgcaagatacaatctcatgtcagtgttaagacaagtgatgcaaaaaaacttcctgatagttctagaagtgggcatagcagtccagagctattgacttgcattgcaaatgttcttgttacagtgggtgatagaggttggagggagtatgatacccagatcacaatggattctgatgttcacagtgaacagaggatatgcgtgaaacttgctgaagggaccaagtatgctcacaaggtctgtcaagttttgcagcctggggccacaaaccgctatacacatgccatgatgtggaagggtggggctgagtggtgcctggaatttcctgacagaagccagtggttgattttcaagcaaatgcatgatgagtgctatagccataacatcagagctgcttctgtgaggaacattccaacccctggtgtccatttggttggaatccatgatgataatgatatggtatcctttgtgcgatctgaagattatcttgtccacatcggaacagatgttgaaattgctcttgatgaggcccgtgtgttatataacatggacagtgatgatgaagagtggatatcaagccggcagaaattcttagtaagagacaacaacgccacacttgagttggcagaagatttgtttgagagggttatggacaaactagagaagtttgcatatagccacgactctaatgaactcagcattgttcagatgaaggaactggagactgatgacctacctctggacattattgaagtgatacatgcatattggcaagctaagaggcagaaaaagggaatgccacttattcgacatttccagttcgctatgtggaaggtctacgagcaacagttacatgaatgggaatcgaaagtatgcagaatgcagggttcatcaaatgggtaccaaggaaaaaaaatgcctcccaagcctgcattgtttgccttctgtttgaggcctcgtggactcgatgtaccatacaagggaccaaagcagcgttctcataagaagcttatgtctacaggctgccatagcttttcaagacagcatgatggcttttaccggcaagtatcaggtaggagatacaatgaatgcactgtggatgggcggatatgcgaattatatgacattggttctctttattccctaacagggtactctcccaggttctctacaagaacaggttctcttcgggcatttgagtcctcggaaagttctacaccaagatttttcaggacaaatattgtcaaaaggagtgcaaccgttgctttctctgatgatcaccagccgtcgccttccttccgccctcagagagttaaacggagcgcatctgaccattggaacactgtcattcatgactggcagaactcaaagcatctctttccgggctcgccccctgttgatattgaggagctcaaactgcgggatgctgcaagcgcagcacagcacgctgctgccatggcgaagctcaagagggaaaaggctcactgcctgatgcagaaggctgaccttgccctccataaggccacggtagccctcatgattgctgatgcaatcaaatcttccagcaggaacaagtctcgggattgccgaaggggatttgatgaatgaggaacgctgacttttttttgccttttgccgcgagcccttggcgtatacacacaacttgaactcgatgcttttgctgatgatgggagcgtgtttgcttatctaatgatcgagtcattagatagcatcccttccccccttctcccccctccccctcctttgcgtctcctgtacataggtttcttttcatcattcttttgtgctcttttacctcccgattaacatattgcccggtgatgaatgggccaggtcaccaggatgtaggttagcaatctggcgtgttgtctgaacagcggctagggaagtggcgctttacggagggttatggtcctgttgttgcactgtgatgcctttacgacattgcatattctagaaggagcacatggcatatcgtgggtcagtgggagcagtgccacatgacccctctgggtcataaataatctatttccgatggctcataggttgtgttcgatgacctaagccgtcggaaattttattgtggtcaacatatagtactcattggaattctggaggaacttgaacatgaggtccaacaacctcttagatatattttcgattccttgtgtgttctccaaatattttgcatccaataaacttacaaacactttcttaaaaatttccatgttttctcgatccctgtaggtgctgcgacatatgtt

SEQ ID NO: 30877 - DNA, 2197 bp, Zea Mays
tccacttccaccgcgccgcgtcatcttcttccttcagcgttgagcggaatcgcgaattgaaaacggaagttaccaattcacccgactcgatagacacaccggctctgctctaagcgagaatccgaggagcgctgccaagcgcctccgcgacgggatcgacgcgacttgattcgcgagtttcaacgtcgcgaggagagcagaaaattacgcaggcagagcggctgccggctgggtgttgaagctagagcggctaggagcaggttcggagcgctaccaaacaggcccttaacctaagcgctcctgcccttcggatccggaagttggaggcgcgcgaggaggcgaggcttgcaaggtctcccttgctagacggcaacggggtgacgatggcgcacgagcggggcgccgccgcatccgcccacccagcggctccaacctccgaggaagacgcgctgtttattgatttattacatgaagcgcccctgtctggtcaccgggagcctagaagcatagttggtgggaccttgtactgtatcttattggtaggttttgctgctgttgccatttcagctccatggatatttcttttcgcgccagatatgatctctccattgctatgtagctccaatgctatcctcctcgttcttacaggcatttttcaacaatattgggttcaccaggtcaggaaagtgagattgcagggctattacgattttagccagaaactgaagcgtattgctcgacttccatttgctactattgcttgtgggactgctttgatgctcttaatcatggtctggcaacctcttttacaaatactatcagtttcactgcttctcaggattgccattgtagttgaagtcacgtgtgctggatgttttatgggcttatatttatggcacatccacaaatacaactctttgaatgggcagcctgatattttgcggtcattatattctgcactccaaccatctaatactttggaagatcgaagatatcatgatgcccgtctttctgatcagcagatggcgttacttcagtaccaaagagagaatatccattatctgagtgaggaggttctccgcttgcaagaatgcttaagcaaataccagagaactgctggaaccactcctcaggttgatcttgcccatcttttagcaactcgtgatcaagaactccgagcactcactgctgagatgaatcaagtgcactccgaacttcaacatgcccgtggtttgatcgatgaaaaggattcagagctccagcgtatccgtctgagcaacaaccagtatgttgaagaaaacgataggctcagagctattctcgcttgaacgtgcattggaggcagagcgggtgtcaaacgtcgaattgaggaaaaatattgcaaagtttagaggtcatttgtacaaagagcaggaggcctgacttcggtatgttatagctggttccagaattttacctaagacacctgactaaaggcacaatttttgatatagaagggtatctcggtctggatccattcgaactgagattggcacgtgattgttcgatgacgcatggaatatgcgtctagtggtttgtagaatgcgtagtttgatgtacatgtgttcgtaggtttgagcatgtagagtatggtatccctcgggaaaaaaaaggagtatggtattcatgtggttgaagactgctgagtattgtgaacatggtagtgtcttgtggggtgtggttcgcaggagacaagaggaggaggttgcagcactggtcgttcttgtaggtgtgcggcagataggattatgcgtactaactgaagaggcagctaggcaagaatcttaacacaaacaagaagaacaggatcgcccctccgactctaatcaatagagttcattacagataagcgacgcagtgcgatgaaatgtaccacctacattcacagacccagttgggcgtaccgttgaagcctcatgggccactcgcgcctgaacccagttgccactatagttttcttcttcggatttgtttgttttttcattctattttctattctattctgtgtgactttcttttctttgttgtttagggctcatttgataataattcagattggttcatatcaatgttctctaaaaaaacgttccagatgacgaatcggaattgcttaaccatttgactgtagaattagaatcacttggacccgtttctagca

SEQ ID NO: 30878 - DNA, 3905 bp, Zea Mays
atgagagatgcctgcccttatttacttcaaagctgtaattgcagcaaacatggttattcaattcgtacgttcactgggcactcagcatctgttatgtcactcgatttccacccgaacaaggatgacctcatttgttcttgcgatggggacaacgagatacggttctggagcatcaagcatggaaatgctgtccgaattttcaagggaggttcgacccagctgagattccaaccacgttatggaggactccttgcaacggcttcagacaatgtagtctctatcctggatgtggagaggcaagcttgcgtgaggagatttgagagccacactaagggcgtcgattccgtgtgctgggatcccaccggcgagtacgtggtgtctgtcagtgaagacacggtgaaggtgtggtctttgaacgacgagagcttcgtgaacgagcttagctgcggcgggagaaagttcagttcgtgcactttccatcctacgtacccatccttgcttatcattggctgttaccagtctctggagctgtgggacatgtccgagaaccggagcatgactgttgcagcgcacgacagcctcgtctcggccctggcatcgtcgagctccggcctggttgcttcgagtggccatgacaagtatgtcaagctgtggagatgagcttcgactttcctgccctggcatgttaagtacggttgtggacgcgccccaacccttttggcaccattagctatctgcttgcattgcagtagcgctcaggagttaggatggtgactcgaccgcctgactgaacatgtgtccgctgaagtagcgtgcagtaaaaccctgaagaagtgggtttagcgcctagcttttgtataggaaattagaacacgggttatgttaagtatccaatgtctgtcactaccttgacatctgacatggcttgaaagcttttgctgctgcaactcggcttccgaaagggatcacatttctgtgctcgtgggtggcgtgtgtggtgtggtgttgcgtacaagacaagatgcaaggctagaaagataacggcagtcccaacttagaagaaaggaacccttgtagcccgtgatgcctagctaacgcaacgagattcccgtgttcaattctaattcgcacgtaggagtagcagatctgcggatctgccgttccgattcctctacgaggaagaacagctatgcctccggtcattcaagatctgtggccttgtttgctatgcctgcgtcgaatcatcttcttcgtctgcagacttgttcgagacgccaccctcccccgccgcgcgccgccgcccgcggacatggatctccttcgctctcatctccacaaggtccggatccccgagccaaccaaccgcatccacaaggacgagtgctgcgtctccttcgacactccgaggtcagagggaggcctgtacgtggacatggtctcgttcctggggttcgggagggagtacgtggagtggaacttcgagaagacggggaaccccgtgtacctccacatcgttcagcgccggaagccggagcccgacgaggcggatcgcccgcttaagaagcccaccctcctcgctataggtgtggaaggaggttttggtgatcaagaaccagaatatgatgaaacttttgaaatagtcatcttacctgattttatttgtcttccatttccgtcagttgatttgccagagaaggttaggcttgcggttgataaagttttacttgctgaaagtgctgatagaaaagaacaactggctgcttgggttgctgacaaaaagaacattagtgcatatgctatggacctgcagcagctagacaatggtgttattgtgcctcctactggatggaagtgtagcaaatgcgataaaactgagaacctctggctgaatttaactgatggtatgatcctttgtgggaggaagctctgggatggaagtggtgggaataatcatgccattgaacattatgaacagactaaataccctcttgcggtgaagcttggaacaattactgctgatttggaagcggcagctcagatgttttctcgtaccctgaagatgatagtgttgaagatccgctattagctcagcacttatcacattttggtatcgatttttcttcactccaaaagactgagatgactactgctgagagggaacttgatgctaacacaaattatgactggaatagaatacaagaaagtggaaaagacgctgagcttctgtttggacccggctatactggtcttgcgaatcttgggaatagttgctatatggcttcaataatgcaagtcatgttttcaatccatcctttcatatcaaggtacttcgagaaacagagtttgaaagctgcatttgcaactgcacccgctgatccaacagtagacctaaacatgcaactgacaaaactagcgcatggtttgctctctggtaaatattctgctccagcaaaggaggggcaagaagggatacgttctcgcatgtttaagtcagttatcactgcgaaccatcctgaattttcaagcatgagacaacaggatgtccttgaattcttccttcaccttattgacagagttgagaaggcaaaccctggagaccgtgagctaaatcctttttccggtttcaagtttgttgttgaagagagggttcagtgcccttctgggaaggtttcttacaacaaacgatctgacaacgttctttctttgagcataccactgcatgaggcaactaataaagagcagctagaagcttttaatgagaagaaagctgcaatgaacttggatggaaaagaagtgtctaatgaggatattgtcaggcctagagtcccattggaggcatgcttgtcaagtttttcagggccagaggagattccagatttttatagcactgcattaaattcaaagactaccgtcactaagacagctggtttcactacctttcctgattaccttgtgctgcacatgcgtaagtttgtaatggaaacaggatgggtgccaaagaaactcgatgtttatatagatgtgccagatacaattgatatcacacatatgcgcagcaaaggattacagcctggggaagagctgctacctgaaggaggttctggtgacgacagtgccgagcctgctaatcctgttgccagtgaggatattgtaacccagcttgcaagcatgggcttcaactaccttcattgtcagaaagctgctattaacacatcaaacacaggagttgaggaagcgatgaattggctcctctcgcacatggatgatccagatataaacgacccaatatcaaaagattcacgtgcttatgagccatctgttgacgaagcaagtgttcaaactctcatctcctttggattccaggaagacattgccataaaggccctgaaagcttctggtggtaatatcgagaaagctacagactggattttcagccaccccgaagcatctacctcagcatctgctgattcttccactagcaatgtaaatgctgatgacacatatattccagatggaagtggcagatacaagctgatggcgttcgtgagccatatgggcacctctacccactgcgggcactacgtagctcatgtcctcaaagacgggaggtggacaatctttaacgacagcaaggtcgcagtatctgttgacctgcccaaggaaatgggctacctctatttctttcagaggattagcaactaggcacgtcacacacaatggaaagaatggtgggctgttaggatactgtcttgctgattttaaagcgaacgtttactcacatcctgccatgctggttactgaatggtcaaccgggatatttgcttttttgttccttgagacctcgattggcatcttccggttacataagaacaaaatcgcaatgaaagaaagtagacaataagaca

SEQ ID NO: 30879 - DNA, 1386 bp, Zea Mays
tttgcatctcgcccggattcaaatcccagatttttcacttatttgggtattctattggttaaagattggagaaggaaaaatctaaatttttctcttatcttctccaccgctctctatctttgatttttttctccatcagtcttatccacacctctctgtactctaatcaaggctgataattgtatttttgtttatgcttttggattaagaaaaaggtgtaagaatcccgtttttcttttactctccacgcgtctgtatctccttagccttatcgcattggtcacaggaaccaaatcccttcacgtcattttctccaaaggacaaagccacagagtcttttctccatgccgctttcctactccctctccctgctgatctcgcggcgaccgtcttggctcctcctagcccccagtgtcgaccgcccctgctcctctccatccatggctgtgctcggcctccacctcaagccgtgccctaggatcgtcttccagcacccccttcacacccttgcctccagctcgccagcaccctccgttcggccggccatggccacctcgccgaggccccagccacgacgtcatcccccgctagctatcgaagtcgtgcctcgcataccgcctattcgatgaaatgcccaaacctgtggactgtcgacaccacatctgctccctctcctaacaccctgtcgcaatttcgtgtgttgccggcaatccgtgcaatagttgtttgatgtttggggttatgcaaatcggaaatcgtcatcattatcccaaatattgatttggtttatgatatggtacgttaattgatcacatgctatggaagacgagtggaattgatctccaagtgatgctgatggacgaagctaaaatggatgaatcaaccaagtgccaggatagaagatgctcaccaagtggtcgtcaattaacaacactaacttagtgttatcccaggcaagccccggtgcatttgtcacctccttgttgttataaaacttttatcacttatatgttgcattaggtgataggagttgagtgatgaaacaattgatgcattgccattccttggaatttgattactattccttgattcttgtttataaaagagaactaaagatgcttagccctgcttagataattaaaagttgtttcttttaaaaagatgatgtgttacacgggatatgggaaattgttgtgaaaaagaaattgggatggtgaatccatatggccatgatggattcaacatccagaaaaaatacctctgtcaggtaccaaggattgggaaatggtttaactaaaatgagaccagacgttgagcaggaaaggtcgcccgtttgtgtcgattaaggaccgttctgattgttggcctgctgatctaggacccttt

SEQ ID NO: 30880 - DNA, 1607 bp, Zea Mays
ctttgccaacgggtaatagtggaggatgtcctcatcacttgtaatggtgcactgtgccaacccgggtaacggcgtaaactggcccaagttcggtttcagtttggctctataaatggccatggaccagggtgggggcgggggtaacttgggtcatgtggatgtggtcccttcttaattataatgacatgggggtggttcttcgcccactggtcgttttttaattggccattggggcatgggctatcattgccttcatttgaagaagaaaaggctacaggccacagacgattttttccccaattcatgtgcaatttgaataattgtcaatgcatcaggatggtctactgctgtttctctgcatgacataggccagttttgtattttcatcagattttcccctaatccttcaagacccagatgtaactatctgacttgtggcgattcattgtgtaggcatctggttgatgtacagtttatcatatccaacctgttgagtttcagcgcccccccccccccccccccccgcatataagctttctttgtcttgacaacatggactttgtgcctaatatttgtcttatgcataacatatagtggattttatgatttgttcggtgaggacatcatgtggagttttgcatcaaatgccatagctggaagcttaaagaaaaaagcacaaccctcaaaatgcagcatatccaatgcagattattctgatgatgaagtttcttcatgtacaagcagagaggaaggccttgattgtccaatatgctgggaatccttcaacctcgtggagaatgttccctatgtcttgtggtgtggccacacaatgtgcaaaaactgcatccttggtcttcactgggcagttgtcaagttcccgtcccttcctatccagctgcctttgttcatctcatgcccctggtgcaacctgctgtctttccgcctggtttacaagggcaacctcaggttcccacgcaagaactactttctgctctggatggtcgagagcatgaacggtgggagagcaaaattccattccactaaccatgacgagcatcattccacgtggcattcaagtgccggcacaagctccagccatcaacagcgaagaaatgctgctgtaggatcagagagctcttctggcagagagacaggcgtaggccgcaacattttccacaccgacaacattagtgcttctctgcaaaagcttatggtgtgcttcatgcagctgacggccaagttcccactcgtgataatctttctgctgatagtcctttatgctgtccctgcaagtgctgctgttctggttctctacgcccttgtcacgtttttgtttgcactgccctcatttttgatcctctactttgcctaccccagcttggattggcttgtcagagagatcttcgcttaattcgtgctgtctgaaatgtccgcgcagtttgtatccctgcgacaaatgatatatattggtatatgtattccatgggccacctgccctcgtaggccctgtatagtttcttcttattctctgtccttgtagcactctatttctgttgtaactaacagcttattaaaaatgctctgcaatgcttttatttgtggttcta

SEQ ID NO: 30881 - DNA, 3081 bp, Zea Mays
ctcatctcctgtagatatccaccgccctgacctcctttctttgccgcggtctctcctttctctccctcgcggtgtcttcttcaccgcgcggcgctcacatcttccgtcggagctctgctccctctcttcctcagcagcgaccgagctccatctctggcgatctcgccctgccccacggcgttcctcccctttcttcaatctcctaccacgccatgccgaactccctgtgcgcgcgtgcctaggatttttattctctccatggcgcttctctctgctccgtctgccgcgcgtgagttttttttccctggtgccctgctcgaagctccctctgcccagctcggatctccttctctggtgcgcgcggctcccaggagcttggcttctcgtcgccggccgctgcatcctctcgggcatggaagttgcgcgcgcccctgctcctctgcgcgcgcccagtcatggtctccagcgtcggtcggagctcccctgctcccatggctgcttgctcagcgcatctctctctggtgttcttccatgcgcgcgcgttccgttcttcctgcgcgtgctgccgtgagctcctctgcccggccgccgtcgtgctccctgcgctcatttggccatgctccgcctcgctgcaggcactcgtctcctccctctcctcaagcacgtcgtgcctggctcaccccctgtgccacgcaccgcttcaccagctcgcccctgcgcatgcgtcctcccgcgcccgcgccgtccctactcatcgccgcgcgcctgcttcctatgcgcgcagccgctccatcccagccgtgaagctcccttttcagttctcctccgtcgcgttgtcgtgcgcgtgaaactactcgcagtcggcatcaatttaaccgctcggccctgttccctggccagcgctcgactctgagctccgatcttcctgcatgccgtcgttcccctcgtagcctgtggaggtggacctcggcagcgtccccaccgcgtcgtcgacctcgtcgcttgtcgtcgttcgtcgtcgcgtcgtgtgtgctcgtcctcgccaagatctggccctacgagctccatgcgccttggttgtgctcgccgtgtcctctgtagatattttcgactagccgtgcggtccttgtcgtcgtcttggtcgtcgatgccacgcaaccatccacgtgttgttgtcctcatggacaccgcttcacaccatcaccctgttttcaccatccgtagcgtcgtcaagatgtcctggctgcagcacgagcgtcctcgaccttgcccaaagctctaggttggattcgtcagtgtgctactcgtccgctagctcctcgtcgtcgcgctgtcatttcttaccatgtcgggacacctcccctctgctcagatgctcgactgggaccccgtcgtcgacaactttggttttacgtcgccgggaatttgagtgaagaagtgaagcccgctgggcgcttgtcaggggctcgatagaaggcatgaacaagaatcagcaacgtttgcttgaaattctaattgaataggtacgtgaattaaccacgtgatgtggagaaccagaactaagtcgaccacaagatgctggaaagcgtgagcttctccacaagatgatgttggtggattaacctgaagatggatagacgaagcaagtatcggaacaaaggctgatcgtcaagtaatcgacgtctaacaacactaacctagtgttcttccaggcaagccccgatgcatgcaaccccttccttgtgtttttaaatgatttttacacactttaagtctagcaaaatgtgcattaggtttataggagttgcttggaaactctttgatgcattggctaccttgaaatctattccttttatagatacttctggtgaagtatcaaatatgatttacaaaatttcttagccttgcctagaggtaaatcttgcggatagaggttgtcctttgcgttaatgcctagcttaggggttatcctgaggaaggatggcttctgcctgcaagaatattttaattgggagcaatggtgggatcttactgcaaagttccctataatgctcttttcatcctaagaacacaaacaatcctgaggatggaagtacttaaatcgagacttgggctaggaacaggtgatgttctacccaggttggttaaggattatagagaatgtaggcctgatgaccgaggatcttttaactagtcacatgcctcgtcatgggtaagctttacctcgggcagactaataccagaataggacaacacgcaatgggagtggagagatggcgagagtagcgtgtaccctccgtggcaagaggctggacggtggtgtatctgtgctctcggttggcgtgaacatgatctggtcttaagaaccccggtggcgagttgacatattcaaaggttaagtgctacatatatcgtgtgattggagatccccagctaggtattaatcgattcaggatcgccattacttctcggatatgaagacttggtcactgacttgcaatctaagtcatggatggaatcataatgagcaaaaatcatgttgtattgattaaagtgatgatgaaattagactagatgcaaacaaggtctattaatacttaatctagcattaaaatgttgaaagtaaggatccgctcatagtaagcttttctgtaaacagagtccttgattcttgataagccttaccttaaatccttttaaaactagcataccctggagagagtcttttctttagtcgggtaagtcttgctgagtacttgcgtacttagggttttattcccattgttgctgcaggttatgagtcactttgattgtgattggtgttaagcgccggtgggcacgaccttctataagtctaagtacttcttttatacttcttattgaggatggtcacttaagctagtatatatttcaaacatataaatgtttatacattcaaaacatagtgtaattactcccatcatgtacattgtaaatttgatgtaacttgtaaaatttggtaataagattttcgctgcaaaaatgttggtgtgtgatttgtgtttacttaatcttgcggtcctggttgtaagtggtttatcc

SEQ ID NO: 30882 - DNA, 1087 bp, Zea Mays
gtcaaatattgaaattttccgtttgcacctaccgagaggtgacgacgagtgaggagtctgtgtgaccagtgctcgccgtcgtcccctgcctctggccctctgctagccgctaggcgacgggcctttcgccgggcgacgggcacaccgcccctgttaccatggcagcgatgaatactggtatgggaggtttaggtggcaggccgatacatccacaagcaaatccttttggaactgccttgcagggtgctggaccaggattgatccgtactgggctagaaacatatggcggaaggattttagattcaagttctgagtttatgcagagcaatataacacaatatttgtccgaccctcagtactactttcaagtcaacagccagtatgtgaggaacaaactgaaggtcatcttgttccctttcttgcacaggggtcactggacaagaataactgaaccagtaggaggaaggctatcctacaaacctccagtccaggatatcaatgcaccggacttgtacatccctttgatggcatttggcacctacattgtagctgctgggtatgccttgggtgttcttggaaggtttacccctgaggcactgaccctacagttttctaaagggatacttgggtggtttctgcaagtcgtcctcatcaaaggtctgctgtactccctgggaagcggcgaagctcccttgctggacatcgtggcgtatgctggatattgcttcgctggcacttcccttgcaatggtggcccgcatcttctggagctacctgtattacttcatcatgccatggttctgcctctgcacgggagtcttccttgtgaagaccatgaagagggttcttctgggcgggccaaggagctacgagagacaccccggccggaaccactacttcctgatcttcttggcggtcgtgcaattccccatgctgttctggctcggcaacatatgtggctgacctttgatcctattggtcgggccacagacctgtttcttcttcttcttcagaatagagttcaaacgtggagggaagcagcgagctttatttagggcctgtgttgtagttgtagagcagcaaggtgc

SEQ ID NO: 30883 - DNA, 1113 bp, Zea Mays
cagcaaatgagcttgcttccgtgtgtataagtagtggattagctgaggctcggggtggttcaggtgataaggaaaggtagtggtaggaggatagatggagaggaaacggaaggagatggagaagggcaagtctgagctgagactggccatggaggagctccgtttgtgcggttcaagagatggggcggaggaggaggaggaggtgcaggttcagcaggtgaaagtgcaggagcagcacaagtcatccacaatggacctcctctatgtctccaagcagctcatccatgtccttgatgagattggaccaactctgctagtcctgaggcaggacattcagcaaaatgtccagaggttacaagacctgcatgaaaaggactgttccaaatacgcgtgcttgacggcgatagtcaccgaggaaatggagcaagggacagcgaagaagaccaagagctgcaccagagctatcatctggctgtctaggtcgataaaattctcaaagtacttactggagaggctgctggagactcctgagtcgagcctggaagagatcgtggaagaagcctacgcaaatactctgaagccatggcatggctggatctcgtcagctgcttacaagcactgaagctcatcccggaaagagagttcttcgtagcgctgctgatgggtaactgtcaagacttggaggatctagcagaagatgccaggatgctggcctatgccgtccagcccttgttacaggagatcgatgcgatttcggctaagcacaacctggacaagatgaaatcctcttaggacacgaggattttgccgatcacctggtgactgtacatagctgcatacgtgacctgaccttgtcttgtggctgtaaaagtgaaaggtgtaattttggggtttgtctgtagatttctagtgacatatcgaatgtgtaaaaaaaaaaagttgtcttcagtgtatccctgcagtggttttagtgcatgtatacccctcacgacctaggcacagaatcctcttctagtgtcaaattgtgtagtgcttgttttctttcttcgatttttttccaacgtaatggcacaacctctgctttttaataagaagaaaacaagaagatcctgg

SEQ ID NO: 30884 - DNA, 872 bp, Zea Mays
gagaggaaagctagacagtttctgttagaggaggaaaaagaggatgatgaactcttcttagtaattgtccctgctgttctcttggccatgcaagaagagaaaaggtcagtccgtaccagaagtacgtcagcacatggaagcgcgaaaaagcggaagaaaaatcatgttgcaagtgttctggaagactatttggagcacaggaagaagcaaacggagaagactgtagaggcgttacttgagatgaagagtcgtgaagaggagtactctattgagaggtgtcttgacatagttgatgcattggaggagttgacggatgaggagaaggccgctgcagcagaggtgttcaagaatgaagtgaatcgggagatgtttgtgattgcgaagcaaaaaattccaaatgtggggttgatttggcttcggaggaagataagtaggattgcatctacctgagatggataaggtgcgactgatggagtgatggctcattgagttgcttgctgtgtgcgtgcgcatttgttttctatgcccgacgatgagtagcttgttgtggtgcctgatccaagagctcacaccagtttattcagttcagttcagagcttgcatgctccatataagcagaccgctgcatgctatgtgttgttaagcagactgctacattctatacggagtttgcatgctccatgtactgttgcatgccacttgttgctgatcgaaaattttagtttgcgaactacatgttgaggacagatattttgtaaactgctactagcactgatgcatgcttgcactgcagtttagcatctgtgtctgtgcgctttgcgcgtgcgtgtgtgtgctttgcaaactgcaatttagatagtgtttggttcggt

SEQ ID NO: 30885 - DNA, 291 bp, Zea Mays
ctcatgtacatgcccttacaagaaccatagcccatctgcccattagggttgaaaatatttcctgctaacacgatccaaagaaaaactagacgataggtgctgaaaatcttatgagcatctgatcggacatttggacagttttgttctgtctacagatgcttggaatgctattagctacagtagttacatatgcaagctcaccaagacccccagcaagccgccgactccgagcccaggtccccaggaaccaggcccaccgagcggcgggccccagcctgcacggcctcctcc

SEQ ID NO: 30886 - DNA, 490 bp, Zea Mays
acaccatctctaggccgcgtctcgcctcgtctcgtcgtccgatcattatctccctgactcgcctcgtcctccagatatcggccgccaccttcacctccaccgccccggcgcacctgtgcgtctccatcgtcgccgcctctcctccttcggacacgactgaccttccactggcgccaacgaagaaaacacataggaagaagctcaccgccaaacctcatccagatccagtcgctgccctccgaaggccgcatacggaacgtctcgtctcttcctttggatccggcggtcaactccatcacccccagcttcacctcccttagtccccctccgtccgctctcacccaccgcttctatatcgccacctctctcgttgtagaagaagacactgaggatctgatgtgcatgcttgtccctcttgcactgcttgtctgttacctgcaacaatctttgccaaacggacacagggaacccgtgggacaggtaatgcagg

SEQ ID NO: 30887 - DNA, 3450 bp, Zea Mays
aggcggcgacaggagatggacggggagcaggcggcgcggtgggcggcggcgcaggagggggttcccgtcggggcggaccttgtcgcggcggcgctgcggcagctgcgcttcctcgcggcggtggaccgccgccggtggctctacgacgagggcccgctgctcgaccgggccatacgcaggtacaaagcatgctggcttccgcttcttgacaagcacactaagggtgtggttgtagatggtccattggttgttcctcttgattgtgagtggatatggcactgccatcgccttaacccggttcagtacataagggactgcaagaaagtgtatggcagaatactgaacaataacaacgttgagtcgtccactcaaacaaagtcgacacttgagtcagaaaaagtttggaaagagctgtatcctgaggagcccttcgaattgttgttcacaagaacctttgacactgccgtggatgtcaaccctgcaggtgcagaggaggacattacctatgatctggtctcggctgttaagagacaatcctctttctattatcaggttggaacaccaacaatgcatgatccacggtttctccaagaagctctagctcgatacaaggcgtttctttacctgatcaagatgaatcaagaaaaaggattgcagcgcttccgtgtaccaacctatgatgtggatctgttgtggcacactcaccagctgcatcctattacctaccgcaacgacatggtgaagcttcttggaaaagttctggagcatgatgacaccgatgctgatcgatctgaagggaagaaactcgatgttggatttaccgagactactgaacagttcgagagtacctttggtgtaagatactggaaggctggatgtatgtaccgtggcaacgtgccatctcctgtgacatccactcctcagacattcagtgctgaggttggtactgggtcttacatctgcaaagcccagaaagatcttaatgcccttgatgtaacagttgtagagttatatttacaaattgtagacatcaagaatttaccatctgctgttcaaaaagaaaatgtgtatgtacggttcgccaagaatcaatcagatatgttcatcagtgacggcggcaggttggatatctcaacagttacagggaagaacaccggagtttgtttacagtgtgaacctaccggagaactcattcttgcagtaatggttgatcaattatcaaagaaaccagaaccgatagggaaggtttctttcccactgcacgatttgacagggcctgattctaagctctccttcgagaagtggtttgaactgaaagctcatggatggagccattctctctcaagtcatgtcttttgccacattccatcaaggatcagaacacgggcagctggactcgtttcgtaaatgattgtggtaccgagcttatccgtctccagataagagagcacaaggcgaagaatagcatggccgtcgttcgagaattggttggagtattgaagtcaacaaaaaagcaaattcaacttgcagaattcaaggaaaacaagtggaccctaaaagactccaacttgccaataagtcatggcactgatggcagtctactcgatctcaaaggtgacaaccatctgatcaagctttatcggggaaggaaactggaatacgagcgcaaatgttgcagcgctcactctgaggacgtatcagctgttactgctgtaaagttctgtgctgaacatccatatggcaaagccgttgccttgctagacactgaagctcagcttatcatggtgaacgaggattggctcctacttccatggatctccatatcagtcctgtttatggacggcgatggcggtacgaaacttggcggcggtgccatggttcagaaaggtacagtgtttggatccgacactagcatggtgctagagacacagaccgtcggagcagggagcgtggcatccaatctagcacaatgtggcacttgcagcgccgtgttcggtggtgatgataaagaaatggcgaactgcaaggttgagcatgcgagctctggcgcttctcgcacggttgttgcaagtggtgagaatgggcacactgagactgctggctgtggaggcggctgtggtagcaattgtggacccatgatggctgaagaccccaaggccggcaatgccaagtccggaggctgtggttcggggtgtggtggtggctgcggtggcgcgggaggttgtgggaccatggccaacgaaggccaatccaggtccggaggtgttggcaccttgttgagctccaacgccatgggtggtgagggccagcaggcccattcagctggctgtggctccggctgtggtggtggctgcggcagcggcatggtcatcgaaggctccaaggttaacaacgttaacgccatgtccggcggctgtggctctggttgtggtggtggttgcggcagtggcatggtcatcgaaggctccaaggccaacaacgccatgtccggtggctgtggctctggttgcggtggtggatgcggcagcggcatgctcatcgaaggctccaaggccaacaaagccatgtccggcggctgtggctctggttgcggtggtggttgcggcagtggcatggtcatcgaaggctccaaggccaacaacgccatgtccggcggctgtggctctggttgtggtggtggttgcggcagtggcatggtcaacgaaggctccaaggccgccaacaccatgtccggcggctgtggctccggttgcggtggtggttgcggtgccctgttcaacgctagcactgctgccggagagggcctgcacaataagtcggctgggtgcggcggcggcgggtgcggctccgggtgcggcggtggcggcggctgtggtagcggcatggctatcgaaggcttcaaggccaaccacgccaagtctggtggctgcggctctggctgcggtggtggtggctgcggcaccctgttcagctccagcgctgcggccagccaaggccagtccagatccggcggctgcggctctggctgcggtggtggaggctgtggcactggcagcatggtcgctgaaggctccaacggcgggaacgccaagtccggcggctgtggcggcggttgcggtggcggaggtggctgcggcggcggaggctgtggcgggggttgcggcgccgtgttcaacgcatgatctcggtggagtggaggcatttgtgcagacatgcagtcgtcgtcgtctactgctagataccacatgctacagcatactgtgtattgctgtgcataatctactaaataaaaggaatgaataaacaatggatggatcggctgcctccgtggcgtttctgcaaacgaaaaatctcggtgttgttgggtgcagggatgaggatgaaaacgatttcaaacggtccgaaacgatatcgtctatttaacggttggttaagaaattacctgattta

SEQ ID NO: 30888 - DNA, 1680 bp, Zea Mays
ttgcttcccacggcaacaactcacctcccgggcctaccacgcagaaagaaacatctcctttgtatcggcctcggcaatcctgaccggatcaacaaagacgtagctaccccctcccgcgtccgtcgaattcgcctccgccgcctgctcgatccggtgggaattcgccgctgccgggttgttttcgctggggtgattaaggctcgggattcgagatctacgcgagtcgcgggcaagcagccatgagcgaggtgttcgagggctacgagcggcagtactgcgaggcctccgcctcgctctcccgcaagtgcaccgctgcctccgccctcgatggggagaagaagaagcagaagctgtccgagatccaatccggcgttgaggaagctgaatcgctgattcgtaagatggacctggaggcaaggaacctacagcctagcattaaggctggtttgcttgcaaagctgagggagtataaatctgacctcaacaacgtcaagagtgagcttaagaggatctcagcgcccaatgctaggcaggctacccgggaggagctcctggagtctggaatggctgatactctcgcggtgtctactgatcagagggggagattgatgatgacaactgaaagactgaatcagtcaactgacagaattaaagagagccgaagaactatgttggagacagaagagcttggtgtgtcaattcttcaggatcttcaccaacagcgacagtcactactacatgctcatactactttgcacggagttgatgacaacattggcaagagcaagaagatcctggctgcaatgtcaaagaggatggataggaacaagtggatcattgggggaattatcacggctctcgttctggccatccttctcatactctacttcaagctcgctaattaagcctgcctgcaggtaacagcaaaaggtttgaggacgctgaaacaagaaaagaggcgggacgggacgggacggggggctagcgcgtacgttttggtcttgtgcggttgtgccttcagccttgtgttgttgtgaagcagaagcctggaggtagtaacaagtaaaacctgtcacaacttgtcccctgtgacagcacgggcagcaacttgtgttacatcgatcgatcggatatccctttgtttgacgaaacattcaatgcgtaacgaccgtgatgcgacgcgcaagtgctctggagtctggacagatgcttcgccggcctcttctctcgacaggaaaaaaaagagtgcttcgccggcctcttctgtcgacaggaaaaaaaagagggaacgcgagtaggcaccaccagctgcgcgcccgtcgcttcatgggcggttctcttgatcgaatcagccgtgacgtcttgctaccccgactataggcggagcggagctacagctacagggtacggcaattgcgtcatagctaccccttatttagttcaattgtactaatagcagaagaatattaaaggccattttagtcttcttatgagccatttagtatatttttactatttttagcccctagaaccaaacatgttagggactaaactttagtcccctaaataaactttagtccctagactaaacaaaccaaacatggccttaattgataaattcattcattttcattgctaccagctgtaataaacctcgccatgtaagagccctgcttggag

SEQ ID NO: 30889 - DNA, 307 bp, Zea Mays
cccacacaatggcccatgagcgtcattctcggagcctacggagtaccaaccacgtcaccgaaactgtagacgaggaggacaagggtcaagggaaagaaagccaaccgccccaatctcgcgtcccgccggcggccaccaccaccaccgccatgatcagcatcctcgcgcaggagcgcctcctcgggttcgccctgggctccgtctctatgggaggtttcgtcctccaccagcgccgcgccatctaccgctcaatcgctgaagccgatgggtcgtcctacttctaccaggtaaaaagttacatcactag

SEQ ID NO: 30890 - DNA, 1727 bp, Zea Mays
gaatggcccaagccttgatggtagctttgttagactacattgcaatttttacttgaatgacatgtatgtttaaaggacaatggtgaagataattctaaatgcatgcatatagaagctttctcttcatttggtcatatattcttcaaggcctgaaatattagagagttacatagctaaatgtactacatgctacgtgaaatggtacatttaagtagagtgcaccccaataggctttacattgcacttgcgtaagttttctccttttcaccagcacctaatttaccacaggtggaacaaataggtaatcttcaagatgaaagacaagatcgctacacaatgcacacaatagctcaggctcatgtgtgtgttgcatcccacagtctcatgcgcatgtttacttacagaagttcatgaaaagacacgtgcacttgaggcttctggatacttcttctgcctagaggaccgtgcactactttgtagagactgtgatgttgctatacacacagtgaattcctttgtttcagtacatcagagattcctgctaactggagttcaggtgggtcttgatcctgctgatccagttccacctattgctgaaaagcacgttaatgctgctggtggatcagtaaatcaaccagtgagacatcagccaaagagaagcccgacagttcaattttcagttgaagggagtgcttctgttcctactaaaaatgtaacaaatggagattgttcaaggcagaattttgtcccaacagccaggggagaagtggttgattggactatgaataatagtacaattcggtcagtagaatctccgcctaagtacatttcagaggaaagcccgacacttctgcaatctagccagaccacaacagtcttctccaaccaaattaatggcaacagtgatggggcctaccacttgtcattctcaggtggtaatgtgacagacagcctaccagattggcccgtggatgagttcttcagtaactcagaatatggtccaaactttggcttctccgagaatggttcttctaagggtgataacgctaagctggggggcgctggtggatctccacaatgccgtttggctgaaggctcagttgctgaggaactattagggcaggtgcctggattgatcaccgatgaatatatgagccgagtacctgagaattcatggacagtgcctgaggttccctctccaccaacagcctcggggctcaactggcacgggaatttgtgtttccctgcgtatgacagcaccatgtttgttcctgaaattacctcccttcagaactccgaaagtcacttcaccgtaccttccagtttcaagcgccggagaagagagtactgagaggcgacaagaagatcactagacaccactgtccggtctaggctatcttgagaaaggcttcttggtgggctaaatgacgaaagaaaatatccaggactgggtggtcattcaaacatcaactgagctatccagtagccaggttttaagtgtgttgtaatgcttcaatgtgtttcattttccaaagacctgagcttcgcttgtgatttgttccgagctgtacggtgtcgattttgtgtatataatataatataacgaaataaagggtacccagtatgagtatgatcattccgaaataaagggtatccagagtatgagtatgagcattcgcgagtacatcgcacactggtggtggcacatgaagttacttctgcaatac

SEQ ID NO: 30891 - DNA, 1061 bp, Zea Mays
cgcgcccgcctaggcccagccgcccagccagctcgtcggatacagaagactcctctcccttctctgcatccgttccccgccctctcgcgcatccaccgccaccgcgccgctccatgaaggacccgttcgaggcggccgtcgaggagcaggactcgccgccggactcgccggcgccgcccgaggaggaacccggcgccgcgggcctcgcggacgacgccgaggactacgacggcggcccgcccccgcgccagccgtcggcgccggcgtcgcacgcagcatcggccgcggccaaggccaagggccgggtccagagggagcagcaggaggatgacgacgacgacgaggaccagatggaggttgacctcgacaagcttcccagcagcactggcgaccctgacaagctcgccaagatgaactattggcaagcatcactggaagtcaaaagatttctatccctacatcaattgtggtatcaggaatagcaaaaatatttgttggtgagctaattgaaacagcaagagtagtcatgagtgagaggaaggattcaggacccatcaggccttgtcacatcagggaggcatacagaagattgaagcttgaagggaagatcccacggcgctctgttcctaggctcttccgctagaactgacacacatcaggcaggagtcgggacagatgtgggacaatcgttttccacgtaactgcggacctcgtcatacgtaccatgggaattgaaaacctgtgtactgtaaagttagccccccgttttgacttcatactagccgctgatgcgctgaataacaggtggtggctcctgtcacgagctagatgtcttgaaatgggtttggggaatgatttagcaagaacaaggttaggattacagggtcgggcatgcggctgggacctgcgagacgaggatctattcgaaatgcagtttgttagaatttacttacttgcttaaggctgttttcggtgaatctgtttgacactgtttgaaggatgagtttgaaatagggataaggtacacagcgcagtgccgcccaaggtttgagaaaccggtc

SEQ ID NO: 30892 - DNA, 3199 bp, Zea Mays
ctgcgtcctagactaaatttgtggagattaaaacttcggccttagaagaaaatagtggatattcccatagccaagcacccgactgatacccaagggctcaatcgctcacctgataaagaaagacatgagaaatgttcagttctacattcttaacaaacaatggatgaattaacaatcaatgacaaattattgcgcaacacagtttgctatcaactagcaaaatcagatttgaataatgagtgccctactacttggcctagtttctcaaatttccattggggccgctttggaactttggaacgcaggaattttctaggaatatcacaggaatcgattcattttcacaggaaaaaagtaggaaataggaacgtttcctctgttccaaaagagacctaaatgagttcatcttcttggacaacaagtgtaattcctacttgttgtaagacctccattaaacagatagacaacaagtgtaattccttcttgttgtaagacctccattaaacagatattaacccttgtgctatgggccagcttcagctccagatccatgtaggatttggagtttgtagatcaaaatggttcaaccatgtgtttaatccaaaacaaaaacaaaattgattagccataccatcaatgtgctgcagcactagcactttaaatttagatctacaacaaaaaaattatcaaagaaatgagcgcctgcttcaccaaagaacctgtgacatgtcatatgtgaatatgtgagcagtgtttgtcaaaataggcaacaggaatcacatgcagaatgcaatgtagagggccttcaagacccagaggatgggccccaagatccagaagtagtcgacacctaggacgaaattgaacccacctaggttgatgctgaagaagctgatgatgaactcccgatccatatgcatggacacgtgttgcgtgccacgcccttgcagggaagatggtcaccattggccaccataacccgcatgttggtgttatccgccatcaccagctcgatgcagcatgaccctggtattgatgaacttgtgggtcgagccgctgtctaggagggcaaggagctggtgaccatgatgtaggcgtcaatgtgcatggtgtccttggtgcatatgctagtgatggtgtggagggagataattggggcatcaggcccatccttaagggccatctcggtgccctcgtccctgggtgcttcatcgagcaagtagtcagcaaactcaagatagaacaggtgttggcactgggggggggggggggggggggggaggggagcacacgcacgtcgcagttgtaatacaacccttggcaacggcgctcgaccatctcagtcggtgtgaggtgatagaactggcgtgggggagtagacaacaccgctattggatgcggtgcgggcagcacaagtgcgaccacgcccataccagttacgcgcaacgaaacaggtagcgccaacggcaggtgatagggaggccgagcggcccaatgtatagaacttggcatggtggttgcggtggtaacctcataggcccacgtcgggtgcatgtctgtccacatgtcttgtggttcccggagcacgatgtcgtcccaaatgtgctctggaaaacccccgtgaccttagtaaccaggttcccggatcgaggaacgggaacgtggtacacggtgcgctactaaaactaggttttaacactacgggaacgagattgttcccacgttcccggaacggaacgaggaacatggccacgttcccagttactaagcccgtgacaaagacgacgatcttctggactgtcagaagattcggtggagaagccaggcctgctgaagcgaggaatgcccaaactggcggacgtgccaacatcgcctacaatggagggtgtccgctcatatgagaaaagctacccttgcaaaaacgttggcaacggggatggcgagtgaaagttaatcagatggatggaaagaggggcgaacggggcagcagtggctattgcagtgtgcaagagggtagcgagcggcacgacgggcagggtggatgaggggaagttggtctaatagatgcttggtgtggcacagcaggttcaggaaacactctcggtattcctcgacggtggtgcgaaaatggaggcatgccaatgcgcccagaggattgtgttgtaccgcagagtcgaagtgttgtggcacaactccttgaagtgaggccaggagatgggtagctccaaattcagctcgagcatatagtaccaggtctgggcagcgccaaccatgtggtatgacgcaggccaaactttatctccctccaatgtgcgttggctgcggaagaactggtcacatcgattgagccagccgaaggggtcgtctttgccatcgaaggtggggaatgatagtttatggaagcgagtgactccatgtgtatgggatggtgcttccagaaatggccccatgcttgtggagcagtatgggcctggaataggtgaaggtgaatgtgggaaggctatctggtggatgggaacggaaggtgcttgtgtggtggcagaggctggcaatggcagcgtggtgaggatctttgtggcggtggtgatggggacggaggtggttttgatgcactctatgcttggcggtagcgagggtggcgctgcaattgagtttgtgatgagggaagggatgtcgtcgtagccggacattccataataaaactatgacaacagcctattttcgacggcagccatgcgtgagggcaaggatgtcatctgggtggcgaagctggtgagctgacgctggagatccacatcggggtatccattgcctggtgttgggcgacggcgtttgccaccgatgtagcatcatcgccgctatttgaacccggcatctctgataccaaattggtagaactactacttctcaggttgtaggagtgttggacagagggcctaggatggagcttcttgcaccctatggtgattggttggagaagagggatggagactcagggagcacaacaacagtttacatgagccagaagcagaaaaagatgcatacctatcctggcagctttccaaaagaaaccacggaatctgccattagagattatggggcgactggtgatatgggctgggctcttctcctcacgcacggtttggatgggtggaattgctccgacctttccattcttaggcccgtttggctcaagtag

SEQ ID NO: 30893 - DNA, 548 bp, Zea Mays
ctctgtaaaaaaaaaaaaattggggtcctccgcctcccgcaatgcctcccccttccgcctccgcctcccgcttggcgacccactggatagctgacgccctcgccgacgacgagtccctcgacttctccgtgctgaagggttggaagctccggagaattggagaaggatttgcttccacctttaagtcaagacatccaggaatatatatgtaccaagaaatttacactaccagaaacttctttccagttgcttggaagttttggagaattggaggatttgctttccacctttcagtcaagacatccaggaaaatatatgtacaaagaaatttacactaccagaaacttctttccagttgagttccagcgccgcttaagccccgcgccttgttccccggtttccccgcgacggttgagcccggcttctcggtcctcggccccatccaggtgtatcgtcgccggtgcacggtcccagcttccaactgggctccaggcacccccgaatcccctgcgtccagcacctcatccaaccatcccggtaatggttat

SEQ ID NO: 30894 - DNA, 3488 bp, Zea Mays
ttttattaaatttgttttgaatttcgggctatgatgtgaatttcgggccctgatgtaaatttcgggcaaaaaactgaatttcgggccaaaaattgaatttcgggctctaatgtgaatttcgggcttttataatttcgggccgtccgaaatgagtctgacatgtttaagcaattacgggtcgggtcgtaggctaggtccgtgggctgggccagcccagcccgaaattcaaatgagctgagccggcccgaaattcaaacaatacgagtcttttcgggcttgggccgggccggatggtccgaatgtacacctatagccatggtttgtactggcgagcaaaaggtaaaaaaaacaagaataatccttttaggatcaaaagtatttttttgaaaagattaaattgcagaaaaaaacggtccggtaccccttgcctgtctctcccagtcgtttcccgggggcgctagattcagatccatgccgcacgcttctccattcctgtaagctcctgcgcctcctcctcgttgcttcactccaaatccaccgaggccaccgcccgggcccgggggaacccctagcgccgccgccggctcgggcgccctctcgcgcgcgcgtgcgtcgctccgacagcagctgcagccatggcgcagccgctcgtcgtgaagaaggacgacgacctcgacgaggaagagtactactcgccattcctgggcatagagaagggcgccgtgctgcaggaggcccgcgtcttccacgaccctcagcttgacgctcgtcgatgctgccaggttatcaccaagctcctgtacctgctcaaccagggtgacacctttaccaaggttgaggctacagaggtcttctttgcaaccaccaagctgttccagtctaaagatgtgggccttaggaggatggtgtacctcatgatcaaggaactctcaccttccgccgatgaggtcatcatagtaacaagctctttgatgaaggacatgaatagcaaaaccgatatgtaccgtgcaaacgctattagagttctttgtcgtattatcgactcaactcttctcacccaaatcgagaggtatttgaagcaagccattgttgacaagaatcctgttgttgccagtgcagcccttgttagtggcatctacttgcttcaaacaagtccggaagttgtaaaaagatggagcaatgaagttcaagaggctgtgcagtcaagagctgctcttgtgcagtttcatgcccttgctctccttcaccaaattagacaaaatgatcggctggctgtcagtaaacttgtcactagcttgaccaggggttcagttcgctctcctttggcccagtgcctacttattcgctacactagccaggtgattagagagtctggtgtgaaccaaggtggagatcgtcctttctttgatttccttgagtcctgtctccggaacaaagctgaaatggtcatacttgaggctgcaagagcaattactgaactgaatggtgtcacaagccgagagcttacacctgcaattactgtgctgcagttgtttttaagttcatccaaacctgttctcagatttgctgctgttcgcacgcttaacaaggttgcatcaactcatcctttggctgtcacaaattgtaacatagacatggagagcttaatctctgatcagaacaggagcattgcaacccttgcgattacaacactgttgaagacaggcaacgaatcaagtgttgatcgtttaatgaaacagatgaccaactttatgtcagacatagctgatgagtttaagattgttgttgttgaagcaataagatctctgtgcttgaagttccctctgaaatatcgctcattgatgaacttcttgagtaatattctacgggaagagggtggattcgagtataagaaagccatagttgattcaattattatactcattagagatattcctgatgcaaaggaaagcggtttatttcacttatgcgaattcatagaagattgtgaattcacctatttgtccactcagatacttcactttttgggaaatgaaggcccaaaaacatcagatcccagtaaatacatacgctatatatacaatagggtgatacttgaaaatgctacagttcgagctagtgcagtcagcacattggcaaagtttggtgccttggttgactcactcaagcctcgcatatttgtgctcctgagacgctgcctgtttgatggtgatgacgaggtgcgcgacagagcaaccctttacctcaaattgttaggtggggaagctacagttggtgagacagagaaggatgtgaatgaatttctcttcggctcacttgatgttccattagtgaacatggagacgagtctgcggaattattctacaggcaagaaatcagcaggtccggcatctgctgtcagtgaccctgtttctacagttgatgcttcgtatgagaagcttctttcgtccattcccgaattcgctgattttggaaagctttttaagtcatctgcacctgtagaattgactgaagctgagactgaatactcagttaatgttgtgaagcatatttttgatggacatgttgtgctccaatacaactgtaccaatacaattcctgaacaattgcttgaacaggttattgtttttgttgatgcttctgaggctgatgaatttttagaagttgcttcgaagcctttagaatcattaccatatgattctcctgggcagacctttgtcgcttttgagaagccagaaggtgtcattgctactggcaagttctcaaatatcctgaaattcattgttaaggaggttgatccatccacgggtgaaactgaagatgatggtgttgaggatgagtaccagcttgaagatcttgaaatagtttctgctgattatatgttgaaggtgggagtatctaacttccgaaatgcctgggaaaacatggatccagagactgagcgagttgatgagtatgggcttggagtaagggagagcttggctgaggctgtaagtgctgttataagcatccttggcatgcagccttgtgaggggactgacgtggtcccaagcaattcaaggtcgcacacttgtctgctctctggtgtgtttattggcaacgtgaaagtcttggtgagactttcatttggaatcagtgcaccgaaggaggtggccatgaagctggcagttagatctgatgatccagagatcagtgacaagatccacgaaattgtcgctaatggctaaaaacaatagtagaatcgttttttttactctttttttgttttgacttgcatgctacgggaagcttgaggggattcaattaattctagtatatgtaagtctggtttccagttgaatccatcatttgtcgcaccatcattcttcctttgacagtgcatcagtttttttttggttgatttggatctgtacaattttccttatgtactgatgcttataatagtatacgcaataatattcaggtacagttttgatggtaaaatgaag

SEQ ID NO: 30895 - DNA, 2624 bp, Zea Mays
catcgatttctcttcaaaaaaaatacagaaaataaaatggttgttatattactagcacagcagcacatagtagtgtggaaagaaggacgacggaaagtagagaggagagagagaaaagtatgacaagaatgagaaagaaatcagacaacaaccttcttagcctcctccatatcctcctctccacttcttctccttcgccatgagttctatgctaggccagcaagaaccatagcgagagcaagcaacagctagtggcagcactcgagaacgagctaggggaggaagggagggtagagagaagatcgacagccctgctagtgtccaacaacccagaggcaagggcggctaccgaaagggaaaagattcccttgttcttgaccggcttctcagggacaaatctggaggcggcgatggcatccaattcatcagcggccgctgtggcagccatgtttggaattagggatgccgaccaccaagaccagatgaagccgctgcttgcgcagcagcaccagcaccagcaccagcaccagatgccacctgcgccgctgctcaacgccgcttcgtcgtcggcggggcccggccaggcggcaggggcaaccccgccggcagtgaagaagaagagaaacctaccagaccctgacgcggaggtgatcgcgctatcgcccaagacgctgctggcgacgaaccggttcgtgtgcgaggtgtgcaacaaggggttccagcgggagcagaacctgcagctgcaccggcgcgggcacaacctgccgtggaagctgaagcagaaggacccgtcgcaggcgcagcggcggcgcgtgtacctgtgcccggagccgacgtgcgcgcaccacgacccctcccgcgcgctcggcgacctgacggggatcaagaagcacttctgccgcaagcacggcgagaagaagtggaagtgcgacaagtgctccaagcgctacgccgtgcagtcggactggaaggcgcactccaaggtctgcggcacgcgcgagtaccgctgcgactgcggcacactcttctcgcggagggatagcttcatcacccacaggggctttctgcgacgccctcgcgcaggagagcgcccgggctgccgcccccaggcctcaccgccagccacctctacggcgccaccaacgcggccaacatggggctcagcctctcgcaggcgacggcagcgggtcccacgggttcttgcagggcaagccgttccacagtctcatgcatctgccggatctccaaggcaacggcgccgggggtgcctcggcgtcgtcggctacgggtctcttcaaccttggctacatcgcaaacagtgcaaacagctcaggtacttccagccatggccatgcaagccagggacacctgacaagtgatcagttcagcgaaggaggtggcggcggcggctccgagtcatcggccgcgatgctttttagcggcggcgggaacttcgccggtggtgaccaccaagttgctcctggcgggatgtacaacaatgatccggccgtgatgctgccgcagatgtccgcgacggcgcttctgcagaaggcgtcccagatgggctccagcgcgagcgcgcacggcggcgtgtccgtgtttggggggctcgtgggctcgtcggcgccctccgctaggcacgcccgggcacccatgctcgaccagagccagatgcacctacagagcttgatgagctcgctggctgccggcggcatgttcggcggcgccaacagcggcagcatgattgacccgaggatgtatgacatgaaccaagatgtgaagtttagccagggccgtggtggcgctgagatgacgcgcgacttccttggcgtcggcggcgatggtgtcatgagaggcatgacagtggcgagagcgggggcaccaagacggtgccgatgacatgaactccttggaagccgagatgaagtcggcctcgtcgcccttcactggagacaggatgcaataagagttcccaataagagaaccttgtgtgctcgcatagtgagcgagtcctgtgcagcctgccatgcatgcacccatgggtgtactgaatccattacagcaggttgttatagcgtacactgcacaaggcatgggagtagtataaggttgctgcattccatgcaatgatgcaataaagggtaaagacaggtttgcacctaatccgaagacttgcatggtgagcaatgagtatcattcttgatttgctactaatccaaagaggctagatcaagtagaatcatgtgatctattatctattgctccatgcttggtggtttcgttcctgtgtcaaacatttgttttttctgaactatatgtaattggattaattatacctgaggagagatagtattaagcagtaatgctgtagctagctaggttagtagtactgggctactggctatatatattaggggacgatataagagttcatgcccctaaaacttcttctgtttgttgtttttccttctattgtgcttgtgcttaccgtgtactctttaatttggagcaaaaccatttttgttgcttattacaatgcatttaataaccacagcgtacccgtcgggatatatatgtgtagtactactgatatatttttttacagtatatggtttatttctttc

SEQ ID NO: 30896 - DNA, 2261 bp, Zea Mays
aaaacgacttggatgcggcacgcctcacagaacttcagaattatagaatctttgcctccacatggaatgtcggcggtaaatccccaccaaggggattgaatcttgatgactggctccattcttcacttccagctgatatctatgtgttaggatttcaagaaattgttcctttgaatgctggaaatgttcttggcactgaagataatctcccagcgaaaaaatgggtctcccttgttaggaggacactgaataagaatcctggttcatgctgctatggtggctatcgcacgccatctcctgtcccggatccagttgtagaacaagatgctgattttgagggatcatcgagaaggcacgacagtttatcctatttgcatcgtcggtcattcaaccttagccggagtttaagagttgaagggaaccatatgctgtcacacccaagattggatcgtaggttcagtgtctgtgacccagttagcttgggaggcaggccaagtgattttgatgggaacttcccattcatgggatcaccagatgatcattgtatcgaggaggatacaagcaacggagcacatttttcacccttcccatatggctatggtgtctctgcacctatggaagaaaatggttatcatccaaatacaccgtctaggtactgcttggttgccagcaagcagatggtcggtatatttctcaccatttgggtacgcagcgaaataagaaatgatgtgaggaacctgaaagtttcttgtgtgggtagaggactaatgggttatctcggaaataaggggtcgatatccataagcatgtctttacaccacaccaccttttgttttatctgttgtcatttgacctccggtgagaaggagggagatgaactccggaggaactctgacgtcatggaaattctaaggaagactagatttccacaggtccgtggtgctgctgatgtcaagtcaccagaaacaattcttgaacatgatcgtatcatttggcttggggatttgaattaccggatcgctctttcgtactgctcagctaaagctcttgttgaaatgcatagctggaagcaactgttggagaaagatcagctgtcgtacgttcgcggagagtctcgcttctctgaccacagaccagtgtacagtattttcatggccgaggtcgagagcatccggcacagaaggagaaacgcgggctatttcagctctaggatcgaggtggaggagctcttgccaaacccgtacagtcatccggcgtttacagcttccagtcagatggttgagaataatcacactgcacagaaactaacataaaggtaacccactttgttagtttgttgcctgctggtgatttgctgcaaaaaaataaataaatatattctagaactcgtagatcctgatagcgtgcgtgttctctgctgggcgctgacctgtttttgcaggacagttgcccgattttgcagctaaccatttgcctgtggacagccatgcacgttgaaccaaggaccagccgtccagcccacacatctgtagctctgtacatccttagcgacacagctttcccttttcccttcttcaccttcgggatgttagcaaaattacacagatttccctctctctctctctctgtctctgtctctttttagggatgttagcaaaattacacagatttcccttctcttccattcaccttcgggagatgtattagcttgagatttctgcggtgtatcagcatgaccatgaaggtgtaaaaatcattgcggatcggtaaaaaggtgaaatgatgctttgaattggaccgatgcttggtcatgatctcccgtgctgagggggacatcgatagattgattgatgtgactttcagaggttttgcaagggtgtaatcatgtgcgcaccccttcttttttttttttgttccttagctttgtccctgtggtgtggtgtagtacctgagaagcaaaatgatgcctgcatttgctgcgctcattgctgtggctggcaggcgtgtgtgtgtgtgttacttttacttgttgatgagatatataattatacatatatagcaaggtttgactgggctcgtgtgggagcaggccagccggggccggggggagtcacgtgccgtgatctcaccaccacccaccacctaccgtcgtggcgacacgcacttgaatggtcatggctcctgagatagtgagatgtgattgagaatttaaggctggtggctttgacttttggaatcctaggtgaagactgaagagcaac

SEQ ID NO: 30897 - DNA, 2244 bp, Zea Mays
gaaacaaacaggggctttcatttctccccgccctgcagcacgaccgcgaccagccaccgtctccgcccccgccccggttgcttcagatctcctcctcccccacccggccacccccagccgcaccagccaccggccagctcctccgcaccaggataatctctgcccttcgtaccccctcgccattgcgcgcgcatataaatcccacatccccatcgctctcgcctctgcccacccacccgccgcgcccctactgcgcagcacgcacgtcccctccgcggccctggatctaggctgatcggtcgccggccgggagcgaggatcgggatctcggcccggggctgcccccccgccggaatggaggtcttcggccccgtcacgcccggacagtcattcagacgctaatttggataatggaaccatcaaggaggatgaaaagtcagtattacttgaaggaggacagttgaaatcaccatctacaaagttcaggaacttgtctaccaaagcgaatttgttacggtttataactatggacgagtcttttctgcttgaaaaccgtgctgtactgagagccatggctgaatttggcgttgttctggtttacttctatatctgtgaccgcacagacatatttccagaaagcaagaagagctacaatcgtgatctgttcctgtttctatacattcttctcatcatagcatcaacacttacttcactaaagaagcatcatgaaaaatcagcattttcaggaaagtctatactctatcttaatcgccaccaaactgaggaatggaaagggtggatgcaggtcttatttctgatgtaccattattttgctgcttctgagatatacaatgcaatccgtgtgttcattgcttgctatgtctggatgactggatttgggaatttctcatattactatatcaagaaagattttagtattgcaagatttgctcaggctataaagatccatcgccatccaaggcacacttacccctgctacatgagtggcatttccgatctggcctcgatcgatacatatggattattggaatgatttatgcttacttccatcctaatgttgaaagatggatggagaagctggaagaatctgagactaaggttagattatcaatcaagggaaccattgtcactctttcattgacggttggctttctgtggtatgaatatatatacaagctagacaaagttacatacaacaagtaccatccctacacatcatggatccctataactgtttatatctgcctgcgcaattgcacccagcagttgaggaatgcctctttagctcttttcgcatggcttggcaagattacactcgagacttatatttctcagatccatatttggcttaggtctagcatgccaaatggacaaccaaagtggcttctttgtttcataccagattatcctatgcttaacttcatgcttactacagcgatctatcttcttctatcataccgtgtgtttgagatcacaaacgtcttgaagtcggcttttatccccagtagggataatagccgcctataccaaaatttgattgctgggatcgccatctcagtgtgcttgtatctctgctcgcttattcttctgaagattcctggtgtatagggatgaagatcttgatagaaggtttcttgtaaaatgtttgcttgataggatgtttcagctcgggcctcgatccccttttgctgttgtggagatagttgggatgcgcggagaagcggctaaagttggacatacggggaattgaattgccagaggctgcagatacagaagtccgaatcttgatctttttgttcattcaaaacacggatggatacaacaagtaggcaatccttccattcttttggaagttgtagcaactgttcgctagactatgttgatgcaacctcgttgtatgagttatcctgtagaactgcaccgtgttgtgccataggtattctgaagctgtaaaaaaaacgacgggcatttcttcttccttgaaaagaagaaatataaaggcagaggcgcagagccctttcttctcctaattgtaatgtcgtgtttgctttggagtttgaaccatccagtctatatcctgcttcttcaagtgttcgtgctcgtgctgtacgtgcgtacccgcgggctcagtcgaccggtggacggtggtagactgtatgcacggctcaaacttggtgtatgtgtgaaaaattacccgccactgttgttggttacattgaaata

SEQ ID NO: 30898 - DNA, 1388 bp, Zea Mays
accacccaggcaggcggcaggccaacgccacccgaaggccgcagcaggcaccacacaacacggacacaagtcaggcgcagcccataaccccccaccccagccgaagccatccgatacgggagggcccatccagcggcccaggtcacgctctcacgccacgcacgcatgctcccccgcctgctcaacgggccccaccgcctgctccttggcgggccccacgcctcgggcgccgcgcccctccaccgccgccgcgtcctcgccggccgccgggccatgtccgcctccgcctcgcccgcgtccgggccgaggcgtccgctgcgcggggtggtcttcgacatggacggcaccctcacggtgccagtcatcgatttcccggccatgtaccgcgaggtgctcggcggggacgccgcctacgccgcggcgcgcggctcggggggaggctccgtcgacatcctccactgcatcgaggactgggcgcccgacaagcagcgccacgcgtacgaggtcatcgcgcgcttcgagcgggagggcctcgaccgcctccagatcatgcccggggcctcggagctgtgtggcttcctggacgcgaagcagatcaggtcagtgcttgctgcctccacatcatggaagatggaactactgtcaagcttgtaagaggtttgatcacccgtaatgtgaaggacacagttgatttgttccaccaaagatttggtatgacgttcactcctgcactgagcagagaatttcgcccctataaaccaaatcctgctccactgcttcacatatgctccgcttggaacattccaccacacgaagtgatcatggttggcgacagtctcaaggatgatgttgtttgtggaaagagggcaggagctttcacttgcttgcttgatgaaacggggcgatatggtcctcacgattctttacctgaggaagtaaaacctgacttcaaggtgtcctcactgacagaagtattcgctgtgctggaggagcacttcgatttggcaccagtgcctgccgagagtagaatatgacagggaagttttattggacctcccttctaatgtgaaatcggctacccaaccaacagcttgaataatgtggaggacgttgatgggactttcaagtatcagaagcccctgctagagcctgcagccagagcccagaaggacgatggctgttccaaggggggattgaatgtctttggaaaggcaatgaagtgattcagttcgttgtaaatctattatattatgttgccccagactaaaccagcttgtgtggtttagtgactgaaatgaccacacgtatctggagattcagaatataacaatcgatttccacggatttcattcgttcaatttggttcccctatctctttcacacagcaa

SEQ ID NO: 30899 - DNA, 2075 bp, Zea Mays
tccgtgttagttttctcgtagccccaatgcccaatatactaggaccggccgtgcgacgacggcgggcagcggcggcgtcgcgcgcgcgaagtggtcagtgaaatgccggcgcgtgggctctcggatacggcgtcacgcttctcatgctcaccgcgcgcggccttcgtcggctagcagcggcggtctgcttcgcacgccgctccgcgtcggctgtggcggcgctccccggtgccggcgccgcgcggttccacgactacgacgccgccatcacggagtgtgtcgggaggcgggcgctccgcgaggggcggcaggtgcacgcgcgcatggtgaccgcggggtaccgcccggcgctgtacctggcgacgcggctggtgatcatgtacgctaggtgcggtgcgctggaggacgcacacaacgtgctcgatggaatgcccgagcggaacgtggtctcgtggacggcaatgatatccggatattctcagaatgaacggcctgccgaggcctgggatctgttcatcatgatgctcagagctggatgcgagcctaacgaattcactttggcatccgtccttacctcctgtactggctctcaaggcatacaccaacaccagattaagcaagtccatgcttttgccatcaagaaaaattttgagttacacatgtttgtagggagttcccttcttgacatgtatgccaggtcagagaatatccaagaagctcggagggtgtttgatatgcttcctgcaagagatgttgtttcctataccaccattttatctggctacacccgactgggccttgatgaggaagccctgaacttgttcaggcagctgtacaatgaagggatgcaatgcaatcaagttacgttctcagtccttctcaatgcattgtctgggctttcttctatggattatggaaagcaggtccatgggctaattcttcgtagagagttgccatttttcatggctttgcagaattctttgattgacatgtactctaaatgtggcaagctgttatactcacgaagggtgtttgacaatatgcctgagagatcagtggttagctggaatgctatgcttatgggatatggaaggcatggcatggcatatgaagttgttcagctcttcagatttatgtgtgataaagtgaagcctgacagtgttactctattggctgttttgttgggctatagtcatggtggtctggttgacgagggccttgatatgttcgatcatatagttaaagagcagagcacactcctcaatactcaacattatggatgtgttattgatcttcttggacgttctggacaacttgagaaggcactacttttgatacaaaagatgccatttcaaccaactcgagcaatttggggttcattgcttggtgcttgtagagttcatgctaatgttcatgtcgatgttttcagactgagaaagttaatgttaaagaagactgtgataaaagaacctgggcggagctggatgattcttgacaaggttattcataccttccactctagtgagcgtttccaccccaggaaggaagatataaatgttaagattaatgagatatatgctgctattaaagcggctggttttgttcctgatctgagctgtgtacttcatgatgttgatgatgagcagaaagaacgcatgcttcttgggcacagtgagaagctggccataacttttggactgatgagtactccttcagacttgaccatccaggttatgaagaatcttcgcatctgtgttgactgccacaattttgcaaagtttgtctcaaaagtttatggaagggagatatccctcagagacaaaaatcgctttcatctaattacagaaggagcttgcacctgtggagattactggtgaaagatacaatgctatactattcagattgctttgctgatagggggaatctgtccttatgttgtgattgtagtgcagataatgatatgcaatggtctcgcaaaaaaatgatatgtaatggtccactgaacacactgagatgaaatgatgaaaaatgtatcatgtgccctacattctgatttcagatgactacagtacttt

SEQ ID NO: 30900 - DNA, 1568 bp, Zea Mays
ggagaagcgcttctgggtggcctccttcctcgtcgtatgggcagcagcgctgcagggccacatgatgtggatgcagcgccaggacaccttcaagcacaagtttggtatcgaccaagcagacggacccgatgctcaggattcctcatcttcgtcttcgtcttcctcttcttagtcagttaccttgtatcgtctgaagcggtttgttcggaacaaatgagacatccatcctttaataaagcgggcgggagagaaggcagatgacaagacaagtgcagttgatatgcaagaccacacaacttctgatcatagcaagaattgtcttgataaagcttttgcagttatagatattatgaatagttctttgttacttgtggttcaggacaatgagacggaccatatcaacatcttaaagatgtgtgatatgctgttccctcaattatgcctgagaattccatccacaaatgcgatgcatgtcaggggccttcagtcccttggtcaactttttggttgtacatccaagaacatcgataatcatttggatgcccttgcatcacaccaaagtgttggaaacaagaatctttgccagagtgagacattgcaagatatgggcatggatcaatctggtcaacccactttattctgcgaagcatcaatggcaacactactgagaggacttgcaatagctcccattcagcttagcccgtgtaccaacttctttatttttctggccattgatacagcctgaaggggcagccagcgatgacattgcattgggtattgctgttggtagcacaggaagaggcaaccttcctggttctacatcagatattcgagcagcgcttcttttacttttgattggtaaatgcacagctgatcaggaggcactaaaggaggtagaaggcaatggggttcttcaggggccttctggatgacacagattcaagggtagcatatactattctgctgcttttcttttgaagagaatgatgacagaggaactagagatctaccaacggatgcttgaaagcctcatctcaaaagctcaacagatgctatgcgtgtgtttggttgcaggtcctgtggtagcctggcttactacatgccttcccgcatggagatggttgagcatacatgcatcgatgcaagttacgtatttgtgaaagtcttttacctgcatgcagggatacgcgtgaaatggccgtacgtgatgggccatgctcacatgagcccggctacacggacaggcatccaatcaccacctatgtgaatgatgtaaattatcgatgggggcatgtacatgcctctgaatttgtttgtttattctttgttagactagtcactgtccaagagagtcactgtggataatcctgtgttatggacagagacacaattctacaattttgtattgctgaaccattcattgagatcttgcatttgcatgtatggtaactgaccaaaggcgtgtatgtttgtaattgctgattttttttttgcaatttagccctttttcgaaacaattttacgtttggatctctaaatgatataatgttatttttggaccctttatt

SEQ ID NO: 30901 - DNA, 2977 bp, Zea Mays
ctctccgccgacgcccaggacaaaggaatccgcctcccggacctcgggcgtcacggccgacctcaagccgcaccagctccatggcgtcgcctggctcatccgccgctatcgcctcggcgtcaacgtcgtactcgatggggcttggcaaaaccctacaagcgatttctctattgagctatctcaagatccaccgtattgcacctggaccatttctggtcttatgtcctctaagcgtcacagatgggtggctgtcagaattcagtaaattctgtccttccttcagggtgatgcagtatgtaggtggtaagcttcaccgccgtgaccttcggaggaccatctatgaagatgtacagaaagcttccacatcatctcgatcctttgaattaccatttgatgtgctcatgacaacgtatgacatagccttgatggatcaagatttcctttcacaaatcccctggcactatgcagttattgatgaagctcaacgtcttaaaaatccatccagtgtactgtataatgtccttgagcaacgtttcatcatgccaagacgtctactactaacaggcacacctatccagaacaatctttctgaattatgggctttgatgcacttttgtttgccttcaatatttggaaagctggatgagttcctttctacatttaaggaagcaggggaatcactgacaggtgatgaagctaataaagcaaaaggccaattcaagatcattaaacatgtactcaaggcatttatgctacgtaggacaaaatttttactaatcgagagtggaattctggcgctgcctccactaactgagctaacagtgatggtgccgttgacacagttacaaaagaagctttacatgtcagtgttgcggaaagagctgccaacacttatttcatttgctagaggatcatctcgccaccagtctttgcaaaacattgttatacaactgaggaaagtttgcagtcacccatatctgttcagtggcattgaacctgagccttatgtggaaggggaacatttaattcaggctagtggaaagctcattgtcctagatcttatcctgaagaagctccatgaatgcggacatcgtgttttgctatttgctcagatgacccagacactggacattcttcaggattttctagagctacgcaattacacttatgagcgcctggatggttcagtacgtgctgaggaacggtttgcagcaataagaaatttcagttctcaatctacaaaaggtcttatcagagatgataatcgaagtgaagcatttgttttcatgatatcaactagagcaggtggtgtggggcttaatctcattggtgccgatactgttatattttatgaacaagattggaatcctcaagctgacaaacaggctctacagcgcgctcaccgcattggacagctgaatcatgtcttgtcaataaatttggtgtcacagcgcacaattgaagaggtcataatgcgaagagccgacagaaaacttaagcttagccataatattattggagaagaagacgggactgatgggaagggaggagatccaggaattgaagctagtgacatgagatcaattatctttggcttgcacctgtttgatccagcagatacagctacagaaacaatcgatgaggatataactgctgagacattcagtgtcgagaaactggcaaagttaaaaacaatgtctgaaaaggttgtcatgatgcgtagccatgagtcttctgaaaaggatgaacgagcatttgagatcaatccaaatatgactgatgacagtggaactgtgattagaagggcttctgattctatccgcattgatcctgggctaaatgaagctgcatacctatcctgggtcaagaagttcaaagaggcttccatttctagtgaagatgccacagttggatttggaaggcaaagagcagcgcctgaagaaaagctcctgaaacatgatgttaacaagcaaaaaatagaagaaaagagattggccaaatgggaaagtttgggttaccagacactagcagttaaggaacctgatatcacagcaagccagaatatttcagacgcgggatccatccaatttgtatatggagattgtactaatccttcaaaagtttgtcccgcaaagcctgccatcatattcagctgcatagataattctgggacttgggggcatggagggatgtttgatgctttgactagtctgtcgacatgcattccagatgcttatcaccgtgcttctgaatttgatgatctccacatgggcgatcttcacttgattcagcttgatgaaggcaactgtacccggagtttggatgcacctttatgggttgcactagctatcgttcagtcttacaatccgaggcgtaaagttccgagaagtgaaatctccatgtctgatttggagctctgtatatcaaaagcagccttctcagctgctcagcattctgcggctatccacatgccccgaattggttaccaaggtggctcccaacgatcagaatggtatacaatagaacgcctgctcaggaaacactcatctctccatggaatcgacatttttgtatactactttcagcgacgacagacagattgccagattgtaacccaggtaggtcatgctgacgattcgacccaagcgtagggatgtctctgtaaaaacccactacatcagaagaatctgggattatgtgtagctagctgcaacaatttgtcttttctttttcttttactgccccttctctctgggaccaaaacgcctatgaatagatgagggagccaaatgaattaggttttagtacatttagctaagaggtgtatgtatgtacaagtgttgtttgcatctgcagtctcttttgatgaaaatctatgtggcatttatattgcttgatttttgttttttgatttggtctattttagacctctttttcttcttcttaacatatatgatgcgtagcgaaaaaatcttac

SEQ ID NO: 30902 - DNA, 2587 bp, Zea Mays
atggcggtcgcggcatgcacggacgcggttggagcagatgcggcaagaacgggagcatggtgtggattttgggaggccgcggttggagcgcccgtgggtgaggatgccggtcgcggctggagtgcctacgattacgggtgggttcatggcaagcggaggggttgcgagatttccgaggcgctcgggtcggttgcaaactccacggtaatggaggcgtggcggaagcgacgtggggagggagattgcgaggaggcaatgggcggagcagcgaagtggggagggaggtcgcgggtagatacgaacgagcggaggcgtggcggaggcggcgtggggagggaggttagggatggtcgtctttttttctttttggcccttttggggaaagtttttcacaatgggatactgctggacaagagcgcttcaggacattctgcttattggtgattctggtgttgggaaatcatgcttgcttctcagatttgcagtaagtagtacacatatttcttcttgtaatcattcattgatacttctacgctgaagcagtgtatttctttagtgtagctgttgtaatataaataaatgtacatttgaagaaatgtgcaccatgtgacttaaccttacaactgcagcccagaaacattgattactataagttttttaaaatcctggagagtttctcttgatgtttctatttcatcgtttcacaaggccatatttgacttatattaaaccatcatccttaaagcttaatgtcaattttctgataactttccttctgtgattaggacgattcttatttggacagctatatcagcacaattggggttgatttcaaaattcgcacagtggagcaagatgggaagaccataaaacttcaaattgtaagattactatgctgtattgttcttttattcatcatatgtgcatggtttgatgtcttgtgatgccatatgtgacatatgttttcctaggtgaactggaaagtaaaaggtaaaatttatccttttcattatagtcagtagagaaactggagcattaatatctgttgacttatcatctacgaaataagtttgaacgtaatgtaacataagttcccactagttagctgatgaactatggaaatgatatttctactcttcatttttatctaaattttgtttaacctgttacattatctagaagcgcaatttggcatgaagtggtagaattatagctacatcaagagaatgtcataatctagtgttcattggtcaaccaagggaatatcataatctagtattcattggtgaatcaagggggaatgcgttgtttggtggtttcttctctttgcacagttgtttccttttataaaagctgtacatttggggcttcccttgcttaaacacaattatgtttatgaattatgatataactcttgcttattccctcggttgacatctttttgtaattgctgcagtgggatactgctgggcaagagcgcttcaggacaatcactagcagctactaccgcggagctcatggaatcattgtaagttggccacctgaactagcaacttctgaaacttgtcaaccatattgatcatattacattattggcttattgttggctttcagattgtatatgacgtgacagaccaagaaagcttcaataatgtgaagcaatggttgaacgagatagaccgttatgcaagtgataatgttaacaagctccttgttgggaacaagagtgaccttactgccaacaaagttgtggcaactgagacagcaaaggcgtttgctgatgagatgggcatcccattcatggagacgagtgccaaaaacgccatcaacgtggagcaggccttcatggctatggctgcatccatcaaggataggtacagccaatgtgccaagtggcaaatgtgatattgctatagtgaaattctactgggctttaacgaaatcctacttgctgctcttctcaggatggccagccaaccagccgcggccaacgctaggccagcgaccgtgcagatccgcgggcaacccgtcaaccagaagacgtcttgctgctcgtcctaagattgcctcatttctttggttccttgtgactatttctacggtttgtgcgcgcacgcaaatgtatttgcattattcctgatagcatctattcgttggccagatgattagagagctgaaaatatgttaagaacaataccatagagagaagttcctcagtgctctcgcagcttaaggagcaaacagcaacactttacttcgttttttatactttattatagccgcactgtttattactcgggctacatttgtgaacagcgactgtaatatttttttactctatattcgtagtgagatgaaatcctgtgtgggcaacaaagttcccttgtgactaggttttttttactagaccacccttttggctagttgtgtggtcacattcatctgcgatcgttgcgcccgggtctgttcgtggattgaaaggctcggattaaatctcctagacgggagacaggaatttataatctaactagattatataatccaacaaactaggaagattatataatccaacaaactaggacggatt

SEQ ID NO: 30903 - DNA, 1658 bp, Zea Mays
aagcaagcagcaacaccgccaaaccctaaacaccaaagccccgcatataaataccttcccctcccatcttttcccctctcctgccgccgccgccgctcccgctcccagctcgtgttccgcttcttgcagccgtcgccgcgaagcgctccagagaacttccgtcaacatggggtatctcactgtcttctgttgaagttttttgatctatcctcgtgtccatctattttctggcttagcgattatgagtgtggttcggtgtgactgcataagtgcatctggttgcttgacgcgcagctttgcttgcgctaatgtgaagtatacatcgtgatctattttgatttcttctcagtatccacgtgaagcttattgacggtccagtgctgatcagatactacaacgtcagcgctaaacatattcataagcgacattaatccgttgctgctgtgtagcaatatctttcttggtccagttacttggatttgggaagctatgcatggtagcatacaccttcattattcttcgcgttttcaaagagtcgcctttttttgtgaaacttcatttgaagttttgcgaaactcccgatttggagccttgaagcgattacagttataatccatttatttaagagtcaacagtttagctgttcaggtactgcaggtgtagtgcacctagtgtttttctcacaaacattttagacgcttattctagtacacagtgaggtgacgaaaacttaattagaactaggaaaactgtatataagtgtgtcaatatatcgactaatatcttgattcagacattcggttacctgttttgttcatgtaatgtcgaattgttgtgtggtattagtccttttctttctagcactgttaaaaagggttttggcatgcattgtcagttgtaatgtggtagtctatcacatttggatagaccactacattaaaatgttaaaacgtgatctgctttcttatacaggaagacaaggcatacaagaagagccatttgggcaatgagtggaagaaacccttcgctgggtcatcccatgccaagggcattgtcctggagaagattggtattgaggccaagcagcccaactccgctatccgtaagtgtgctcgtgttcagcttgttaagaatggcaagaagattgctgccttcgtgccaaatgacggttgtttgaactacattgaggaaaatgatgaggtcttgattgctggatttggtcgtaaggggcacgctgtgggagatattcctggtgtccggttcaaggtcgtcaaggtttccggtgtgtctctgcttgcccttttcaaggagaagaaagagaagccaaggtcttagattgctcttgctaccaaaatcagcaagcgtggagttgaaacgggagggcgttagatgattaagaagaatggttgcttgctatgtttgcagtgcattcgtgcaattgttaacctaagattttgttggtgaaaacgatttcttttcagacttgcttctgttgagtgctatcattccatatcaatgtacttcctcttctagaatttttgttgcccgcaagttcatttatttgttgtccgccagtttattttttaaactaaaacgatacaaataaaaaagaacagagtgtaattgctttgtacaattgcatatcttgatagagctta

SEQ ID NO: 30904 - DNA, 4319 bp, Zea Mays
ccgggtggccccacacgcgcacatcgggagatgcccgcctgacctctacgcctccggccgtccccctctctctctcactttctcttctctctccccggccagacacaaaaacttttacttccccgaggcgaggcccgcagaagcagagcaacgcaccagcacgcacaggcacatctcccctacaacacgcatgcccacgctctagctagagaagccgccctgccctgctgtggtggtggtctagagacaaacaagcctttggtctccgtgcgtgtatcatcgtgttggtctgcctccctccctccctcggcccgcccccctgcctgccttctcgcgcccgcttccacccctgtccctcccgtgtcggaggggacacgcgcggccgcgtgggacgggcgcacgggcctgctcgcctgctccggcgccgcccatgcgcggggcccgctagctagccgacctctccctccccctctctctctctccatcgagcgcttggttggctagccgacggtccgggacgcggagggagatgatcaagcagcagcagcagcaggcgccgccggcgcctgctccggcggcagcgccgccgcccagcgcatgtgaaggggagaagaaggcgccgccgatcaactcggagctctggcacgcctgcgcggggcctctggtgtcgctgccgccggcgggcagcctcgtcgtctacttcccccaaggccacagcgagcaggttgcagcttctatgcaaaaggatgttgacggacatgttccaagctacccaaatcttccgtcgaagttgatttgccttctgcacaatgtcactttacatgcggatccagaaacagatgaagtgtatgcacaaatgactcttttgccagttacttcatatggaaaggaggcgctgcaactatcggaactagcgctgaaacaaccaaggcctcaaacagagttcttctgtaagacactaactgcaagtgacacaagcactcatggaggcttctccgtgcctcgtcgagcagctgagaagatatttccaccccttgatttctccatgcaaccgcccgctcaagagatccaagccagagatttacatgataatgtgtggacattccgccacatatatcgaggtcagccaaaaagacatctgcttaccactggctggagtctttttgtgagcggaaagagattacttgctggtgattctgtcatttttgttagggatgaaaaacagcaacttctccttggaaccaggcgtgctaatagacagccaactaacatatcatcatctgtcctttcaagtgacagcatgcatataggaattcttgctgctgcagcccatgccgctgccaacaatagcccattcaccatattttataatcctagggccagtcctacagagtttgttgtcccgtttgctaagtatcagaaggcactctatggtaatcaaatatctttaggaatgcgcttccgcatgatgtttgaaactgaagaattaggcacaagaaggtacatgggtacaataactggtataagtgatctagatccagtaagatggaaaaactcacaatggcgcaacatacaggtcggctgggatgagtctgcagcaggcgaaaggcggaacagggtttcaatctgggaaatcgaaccggttgctgctccttttttcatatgccctccaccattttttggttcaaaacgtcccagacaattagatgacgagtcctcagaaatggagaatcttttaaagagggcaatgccatggcttggtgaggagatatgcataaaggatccacagacgcagaacaccataatgcctggtctgagcttggttcagtggatgaacatgaatatgcagcagaactcatttgcaaactcggctatgcagtccgagtacctacgatcgctaagcaaccccaacagtccatgaaccaactacttccattgagccaatctcaaaccaatcttgtccaggctcaggtccttatccagaatcaaatgcagcagcaaaagcaaccaacatccatggctcaaaatcagcagccagctgccagccagtcactgatcctgccccagcagcagcaacaacagcaacaacatcaacaacaaaagttggtacatcaacagcagcagattttactgcagcagcaacaattgcagcaacagcaacaattgcagcaacagcaacaaaatcagcaacagctaaataagatggctgcacaaatgccaaatctggcatcacatcagccgcaactgtctgatcagcagcttcaactgcaactgttacaaaaactgcaacagcagcagcagtcgttgctatcacaaccagctgttactcttgcacaattacccctaatccaagagcagcaaaagttgattattgatatgcagcagcagttgtcaaattctcaaccactttcccagcaacaaacaatgccccaacaaagtattcaagttccatcacgggcaacaccaccaccaacaacaaccgtgcaacaagagtcacagcaaaagcttccacaaaagcatgttgggttcactgacacatcacataccaccattcctccgactacatcagtcaacaccatttcagttgtaggaagtcctctgatggcaactggtgccacacattctgtagttactgatgaaattccttcctgctcaacatcaccttcaacagctaatggcaaccatattgtgcaaccagtcctcggaaggaaccaactatgcagcatgatcaactatgagaaggtgcctcagtctactcctatgtcgatcccaagctccctggaagctgtcacagcaacgccaagatcaatcaaggaattgcctaagttgaattctaatgtcaagcaaagtgtaatggcttcaaagctaccaaatgcagggcatgtagctcaaaatttgactaacaatgcacccccgacggactatccggaaacagcttcatcagcaacttcagtgtggctttcccaagcggacgggcttctacatcatagtttccccatgtctaactttaatcagcagcagcagatgttcaaagctgcggctcctgagactgatattcagggtgcagatcccagtaataacacactctttggaataaacggtgatggtcagctgggctttcccatgggagcagatgatttcttatcaaatggaattgatgcttccaagtatcagggtcatatttcaacagatattgatggtaactacaggatctcaaaggatggccagcaagaaatatcgtcatccatggtttcacagtcgtttggtgcatcagatatggcattcaattcaattgactctggtatgaatgatggtggtttcgtgaacagaacctcttggcctcctgctcctcccttaaagaggatgaggacatttaccaaggtgtacaaacgtggagctgtaggtcggtccattgacattagtcagttcagtggatacgatgagttgaagcatgctctggctcgcatgtttagtatggaggggcaacttgaggaacgacagagaattggctggaaacttgtctacaaggatcatgaggatgacatcctacttcttggtgatgacccttgggaggaatttgtcaactgtgtgaagtgcattaggatcctgtcgcctcaggaagtgcagcagattagcttggatggggatctggggaacaacattctccccaaccaggcctgcagcagctccgacggcggcaatgcctggagagctcgctgcgatcagaactccggtaacccatctactggttcatatgaccagtttgaatgacctaacttgccggtccatacatgccggatcacaagtaggcgtctcgtgaggggatggcaggtgcagaatgtttgtagatgtgtcgccagatttacgtccgggagagcgaatcgctcgatggattggtagtgtttttgttcatatgtgtaggttttctcacatggaaggaatgtagtatagaggatgggagatgaagattaccgtaggtgaaagatgatgttgtaccatgaggggggaaaacatgcttgtagtagtaaagactgctgcttcagtccacgtatctaaaaagttcttctctgaccatgtgctgtttccaagtgttaatgttcatgcgtccttcaggaattgaaggcaataattcttgtgttgatgctcacaggaacacatatttagcgctgaggaagtttactcgacaagttcgttttcctgctgctactatggtaggcgcatttgtgggcctcgtatatcagcaccaacattgtcagaaggcaacgactcaacagataagataaagttttccttaaaaaccttcccaagttaaattattt

SEQ ID NO: 30905 - DNA, 2167 bp, Zea Mays
caatttctttccaaatttttcggaggcctgtccaccaccgaaccaccaccccgcgcgccgagctcaccccgatccagatccaccagtcgtccctccggtctgcgacgggcgccctcctcctcgtcctcacgcgcctccggaagccagtgcctgcgcagtgaagcatccatctgcctctcctctcgtcggcggcggcagcatgaagcgggtgtcgtcgcacgtctccctcgcctccgaggcggagatcaacctcgatctgtcgcgcctcatcatcgacaagcccaggttcacgctggagcggaagcgctccttcgacgagcagtcgtggagcgagctctctcaccgccagaacgacggcttcgacagcgtgctgcagtcgccggcattcccctctggtgtctttgactcgcccttctccgtgggcacgcatttcggggggccgcacccgctggtcaatgaggcctgggaggcgctcaggaaatcggtcgtctacttccgggaacagcccgtcggtactattgctgccgtagaccatgcgtcggaggaagtgctcaactatgatcaggtttttgtgagggattttgttccgagtgcattggctttcctaatgaataatgagactgacatagtgaagaactttctcttgaaaactcttcaccttcagagctctgagaaaatggtagaccgattcaagcttggagcaggtgcgatgcctgcaagtttcaaggtggaccgtaataaaaacagaaacactgaaaccttagttgctgattttggtgagagtgcaatcggcagggtggcaccggttgactctggattttggtggatcattctccttcgggcatatacaaagtacaccggagatgttagtttgtcagaatcacctgaatgccagaagtgcatgaggctgatactgaatctctgcttatctgaaggatttgatacttttccaactctgctttgcacagatggctgttcaatgattgatcgtcgaatgggtatatatggttatcccattgaaatccaagccctattctacatggctttaagatgtgctctccaaatgctcaagccagagggtgaagggaaggatttcatagaaaagatagggcaacggctacatgcactaacttaccacatgaggaattacttctggctagattttcaccagctgaataacatatacagatacaaaacagaagagtattcccacacagctgtgaacaagtttaatgtcattccggattccattcctgattgggtgtttggtttcatgccatgtcgaggaggctactttcttggcaacgtcagccctgctatgatggacttccggtggtttgcccttggtaattgcattgccattgtatcatctctagctaccccagaacagtcagttgctataatggatctgatcgaggaaaagtgggatgagctagttggtgagatgcctttgaagatatgctatcctgctctcgagaatcatgagtggagaataatcactggatgtgaccccaagaacacccggtggagttaccacaatggaggatcgtggccagttcttctgtggctgctgacagcagcctgcatcaagactggtcggccacagatggcaaaacgtgccattgagcttgctgagtcgaggctgctcaaggacggctggcccgagtactacgatggcaagcttggaagattcgttggtaagcaggccaggaagttccaaacctggtccattgctggttacctcgtggcccgcatgatgctggaggacccatcgacactgatgatgatctccatggaggaggaccggcctgtgaagccgaccatgcggcggtcagcatcatggaatgcctgaatgcgtggacagttgtttctgaattaaggaaatttagaagcaaaggttatacgtgagtttttttgggatcataaaagtttgatgtgattttgttgggaccggaatagttcaacgttcattatagttgagctctgtcaattaggacagaaattgtataccatagaggatcataggagttacacaggattttgtcacacctttttgttttgaatactaggatcctgttcagttgaaaccttgattttggaataacaaatcactatttatgcacacttttcactgtggcattactggtatctctgataactctggaat

SEQ ID NO: 30906 - DNA, 198 bp, Zea Mays
cgcatgcagcaaacacaactagaagatgttttttcaacagaactgccgattatattgctactagtacaatatccagggctttacgacggcagatcattcatatttgatggtacagtgcgacaattatacaacatgcggggtacaatagcgaaccagtgtgatacagtctctccataaaaaaataatttaaaatcaaac

SEQ ID NO: 30907 - DNA, 2568 bp, Zea Mays
acctccgtctctcttcttttcctccggagctcgcagtcgcagcacctccgccggctcctcgtttccgtccgttcgatctcaccccccccccacgccccccccctcgtgccccaaatcgcaacccgacccgagacgagttcctccagatcagcgggcagggtgccgtagcaaggatctcgccgggccccggccatgaccgaggtcgccgacgcgtcccctccccctccgaccgccggcggcggagaccgcaagcggggccgcgcctcgcccgtgcccccgctgccgggccagcacaagaggcgtagggaggagggcggcggcggcggcttcgaccggcgccggctcggcccggttggcggcggagggcacgagcaggacgacaggagctgcagcaatgttatcaagttgcctggtcatgaggggaccaatcagacgactaatagcctggtatggaaatggtcttggtggcataggaggaagaggtggtgacagtcgatatacaaatcgtgcaccagattctggacgcggtggatggaatgagggttctgggaacagtcgtagggaaggactgatgtcatacaagcagttcatccaggaacttgaagatgatgtttcaccagttgaagcgcaaagcagatatgaggagtacaagtcagagtacatcacaactcagaagaaagcttactttgccctccataaggatgaagattggttaagaaataaataccatcctacaaaccttgaaaatgtcattgaaagaaggaatgaactggcaagaactactgcagatgatttcttcctacaattgcaaagtggaagtctggacaccggtccaggtttgactggttcggcagtgagcaaatcaggaaataacagcagtaaaaatctagatgctgtggaaggggatggtaaaaaggggaaacttggaaaaggttccgacgattcatattatgctgctcccaaggctcacccagttagttctgaagttcgtcgaattcgaattgatattgagcaagctcaaggtctcatttgtaaacttgattctgagaagggtattgaaaacaacatcctctcaagtagtaatcatgaaaagccagacatggataagtcacatggttcaatggggccaattgttatagtacaaggatcatctactgtgaagggtcttgagggtactgagttgctggacactcttgttacttatttatggcgtatccatggtgtggattattatggtatgtctgagacaaacgaacctaaaggcctaaggcatgtgaaagcagatgcgaggacatataatggggctagctcaagtgccaccgaatgggagaataagcttgattcattctggcaagatagaattcaaggtcaggatccattagaaatattgaaagcgaaggagaagatcgatggagctgctactgaagtattggatccatatgtgaggaaaataagggatgagaagtatgggtggaaatatggatgtggagccaagggctgcacgaaacttttccatgccgctgagtttgtccagaagcatattaaactgaagcacacagacttggtggttgatctaacttcaaaagcaagagaagatatttactttgaaaactatatgaatgacccaaaggcgcctggtggtacgcctatcatgcagcaacctgctccaaggggaaaaggcagacaaaggccaccaatagagagtcggctgagggatgagcgtggtaatcataggctcgacagtgatgggtccggtgaaaatcccgacgatcctgtttatgattcgtttggtgatccaactatgcatggcgccttccctccagatattcctgctccccctgttctaatgcctgtgcctggtgccggtccgcttggaccgtttattcccgcaccgccggaagttgccatgcatatgttgagggatcagggcgcgccacctccttttgagcccagtggaggtccacatcctaggaaagcagggaggggcagcggcggcggcggtcctccaatgcgtggtccgtccccagtcttcagtgctcctccgcctcatcatatgcatgaccctcgtcgaatacgaagctaccaagacctggatgctcccgaggacgaagtgaccgtcatggactaccgaagcttgtaggcttgcctccagatactcgtttaggtaaacattacagtgcgaaatcaaaacatcttgctctgtctaaaatcaccgcggaggaaccccagcaggcatctcagcacctgtgtctcgactcctgagctgtcatcttctcactgtttgtgaaacgaaacacactacaggacgctcgacaaaataggccaccgtgaaacacggtgttagctcagtctgtgcaacgcgaaagattttcgtccatgtttgagcactgtaaaacactgttcccaacataacgtccagctggacagagtagagtttaaatatggttagtgagatggatagtttgatggagataagatttattaggggattatctcttacattgctgctgtatcctttgcgccgacccacccggcatccacgaccagcccacccgccccgcgtgcggt

SEQ ID NO: 30908 - DNA, 3983 bp, Zea Mays
aaaagagagaggcagtaggcaacgcccccacagaggcagagagaaagccagaggcagtagtaggcagagcacataaccaaacaacacccatccaaaaaccccaaaaggaagagagaaaggagtgagaaaaccacgcagtcgtttgtccagacaaaacaagaacaagaacccagcagcagtacgcacttcctcctcctcctcctcctctctctctcgctctctctcctcttgctctcgctccctctcgctcccccagtccgcctccctggcccatcagatccaattccttccccgacccccatcccggatccgccgcaattcctccgtgcgtcgagctcgattgctccccgcccgtggaatttgctcctttctcccgcaagaatcccacctcggccggcgacttggggggacctgccaaggtttgggcgcgcgctcctgcttggcgtagcgggccatgggcgtgctgttgccagctaggctgttcgtgcgccggatgctcagggttgtcaggctcaacccgttgcagcgcagcgccaagagtggatgaggtaatttctcgcgagcgcattcagcacagcaggttactattggctgctcgtccacttaagcaggttgaggtatccatttggttcgacacagtgaagaactgaagatacgcattgtgcttgcttgtcttgcggggctcacaaacatcctgctggtgtgctgtgctgggaaggtcacataatccacttggctatatgccggggtgggaatgtgaatcggggcttcattagtgcaggcagcaggcttgttaacttgttttgcaacaagcatgggggcaaaagttgaaggggaaagctatatgcctggatattatgccacaggggatctcaacgtggaagcaagtggtaggtggtctccatactatgaggagatgacatcaaatggccagttatgcaatggcttcgcaacaaaaccaacaagtggttattcagaatttgacaaagaaatactcaagcatcaaattcttgaacatgaagctgtgttcagacaacaggtgtatgaactgcaccgagtttacaaaatacagaaggatatgatgaaacaacatcaaagaaaagaggaaagctattggagagcataatgatacaaaccagtcctgcatgaagttccttagagaaggcagtgtgcagtcttctccaaatggatttctatcaagtgatgctgctccaagaaccagacaaggcacttttgaccttcaacttccagccgatcattatatagatgacgatgacacatcagataacaagcccatagatttccttggtttggcatcagatgcaaaaccccagaatgatgctgagcttacattagttagtgcagaacgcttgggcaagttcagtgataatagttcatcctcaggtttgcggactacaaataatcttggaagccgacaagttaccaacctgaatgaatcaaatactggcttctttatgggtagagcaaatggatctgtttccagaggccttccgcataccctcgagaactcgtggcaccaaccgatattgagatcaagcacaactactttcaatttcagtaaagaatactccaaagaaaagcacacaaatgaaggtacaagctcaaatttttttgacacaagtgcgaaactaacacatgacgacaagccaacaatcaataaaggtaaacaagtcagcagtataacttttttagcacccagatataatgatgctgatcccccaaaatacttcaaagctgctgatgggaggcctgccagttataaccaatttctttaccaagacaatccttcaattgtctccccgatgggttcttgcacagcagacccaaggagcagcattgtcaacaatcctgctttaattccaagattcaatgggtcgtcaaccgtgaattcgtacgccagtcttagtgctgtgacacagagcattggaacttcaatcccaaagctgaaaaatgtggataacttagataaacgctatcctggttttccacttgattcgttttctgtgtcccactcacgacatcaggtagcaatttcaagtaacctggagcaaaagaactcccagaagtttgaagattcagatcaacagtcccatggcaagggtatgaagaacttcaatttgaatgagacactgtcagattgtcaggaagatggtcttgtagaacaagatgggagatgtgctgccagttttcagcatggtaaagacggagggtcagtattcgggatctcttggctcaaaaataaagctgtgtctgctgatccaacagctttggagaaggcagggaagatttttggccattcgtttggaactacaatggagctgaaaaatgctaaagaccagaacgaaccagctgtgactattcgaaatttgtcagactctgcttcgacatctcttggctgtggaattaagaaggatgggccttcagaagacattgccactggaactttgctggtttgtaataaagcccaagaggacgctacatgtttacccctttcatgccagaaacatgtgcctaaagatggacaagatgctgatggagtcatcaagataagtggtgcctccatcaggaatttcatcgatctcaatgatgctgtgccaaacgatgacaattctgaagaatcagtagtgtcacatgaatgccaggcggaaccttcacggaacaaccatcctaaacgagcatttgtgattgatctagaggtgccggcttgtgaagaggatgctgcttgggattttgatcaagaatgtgcacagcctaaacctgatgcacaccaggaagttgacggcagatctgatacatctgctctagctgcagctgagaacatcgtagcgttgtcaaggattattccaacagctctagaggcatctgatgatatgttgcagtggtttgcagatctcgctgtattgaacatcaaggaccttgctgagcaagctgaactccaagcttgtaccaatgattccagtaacgacgagtcagattcattcgaatccttgacactgaagctggaagagaccaagattgatgagtactggagcaggccactggaacctgaaatcacaaccgatgaacaattaatttcaactgctcaccttctcaccaagcccagaaggggccagcaaaggaggcgacggcagaagcgggatttccagaaagatatcttgcctggcctttcgtcactttcccggcctgaaatcatagaggatgtccagttgcttgaggggttagtccaggcttctggtggatcctgggagtcgagtttaactaggcgaggacgttatggtgggcggactcgaggtaggaaacctcggaaaactgtagtaactgtaattgtagaagaggaggtcgaggttagcccaccgccgaaacctgttggcactggcgacctcgaagccgatggtaggggtatggttggatggggcagaacaacaaggcggtgtcgcagagcgagatgtccgtcaggtaacaacttggctgctgcgtcttgagaaagggtattgccagcaagcattggacctgattaggtacttggtggttcacaattgttatagactccgatggatggactggtataaggtgatcacagtcatgagtgtacatactctgtcggcgtattggcctcaccccaactttcatgcttttgggttgaaacatggtttacgttcttataataagttccgtaaattagctggtaagacatttctgcgacagcattgtattaagctgttccaggttatgaggtccggtataaattcattgtgagaaaaaaaactgcaatgcctgtaaaccaccttgatctctgaagattagctcatcgcatgcgcaacaaagggtgtgaaagacttcgggtctgtattcttttttagcttatatatgctctgcctaattggctagtacatattcagtatccgaaatgcccatttatttttgtttagatactgattggaagcacccaaattttaagaacc

SEQ ID NO: 30909 - DNA, 1135 bp, Zea Mays
ccgctctttcggttattcccgtgcgcgtgcgagagagagagagcggaagaaagaagagacggcggcggcggcggcgaaggcgtcggcttccgttggcaaggccacgggagggcgcgagccatatcgatcgcaatggagagcgggcgcgggctgggcggcggcggccaccgcggccattggttcggcctcgtcgccgactgcggctgcgcggcctcgctggcggaatcgccctgccgcagcggctcgtctacggtggagcgggacagcgacatccccgcagaggcgacgcagcgggagtgggacggcgatgaggtcgagagcgacgacggcgaggtgcagagcccgtacaagggctcctccttcgacaccatggacgtgctccaggaggccctgcccttcaggaaaggggtacccaagttttacaatggggagtctggatctactgcaaagcttcaagaccttccggaaccagaaacaccatcccctaggaagcgcaaaggccttcttccattcagtttcaaatgggacaaagaggtataccccgatggtgacgcaatcaaaagccccacaaactgcaggaggatgactacatcgcctgctgccacaagcagctcaacaagcaacagtggcagcgatgatgaacataaccgctctcagaagctgtcttcccgtcgcccgctcagaatgcccatcaatgccctgggtgtttttgcttctccgcctggacctcgtccaccccagccgttctcagctcacatgagatctcaatcaatgcttgatgtgcaggatgtgacagagacagactcagccgccatggtcactcccagggacaagcgcatgaagaagtagcaaaagctgaatagtatcaccgacaatcacatgaagaaatagcaagagctgaatgtggttagtcctgctctagctccagaacatttagtggagttagtagagcaggtcattaggggctctagaaaatcgtagagctagttagaagacatttaaacaagttatttcatttattatttagattataaatgttttaaaactatttaaatctctattatataaattttcgtggttgttacccttctcgctttataaaatctatcgatatgatatataaaagtgtaacaat

SEQ ID NO: 30910 - DNA, 3087 bp, Zea Mays
cttcctttcccaactcggtcgacgcgttcgccacggctgcgcagtcctcctcctcgcctccgatcccctcccttcgacgatgcgagcacacccgctcatcctcttcgtacctgcaccgccacctcatcctcttcctcgccgcgccgacacccaccgcgctctctccctcccgcggcgacgcccttcgccaacgagaaccgcacgccgtcgtctcccacgggcactgtcgcacgctgggccacgctgcagtcggtggcgccgccacaccttcttcctccatgtgccgtcgccgccctattcttcttcgagatgcagccgctagcgctgccctcctcccagctccccttcatggccgcgtgcaggtggaccgctccccaccccgtcgccttcctcctcgtactgcccccaagaacgccctaggttactttttcttagatttgccttttggtttcaagtatgtttctctgatgccctagctgtctggtggattaaatttaattattgagctgcaactttcaccaattggtttggagaaagacaatagaggcttgggttcttttagttaagaaaaattgcgtccgtgttcagttataacataagattgtttattgttctctgtaatctcacatttctttttctatatatgaatagggactatgtgccagtgttagtttttggtaccagtctacaggtctttcatttctacattcaaaggtgagaatcaatcatgttcggctccctttaaaaaagtaatgtttcccaatccttcatagtaaaactaaacacacattgtaaagacatttgtcgtacgagatcttttatagaggtgtgttttaacccaaaggcaggctgtggagatcaattccagatattgccttcttgttgtgtctcagttgattttttttagcattgaacgtaacttacagtttgacataacaagcggtgaatgtaacactacagtttaactcaacaagccattggctgtagctcacaatcagcttggctgaactgccaaaaaaaatacaagcagtccattacagttcaacttaacaagagcagttctgttggtaaagccgatgcaaataagtaccaattgttagttaggaagggaaaagtgtcagcagtcaatggctgattaaaaaactaaatgtctttgaatttgttgggccgtgtgcctagtgcctggcctattaactggcttgttcgctgcggctttaatccgactgcgactgcggcttctacagtattttgtctctaggaattgcagctgcaatagtattttgcagctgcaacagtgctcccgcatgggcagccgaacaagctaaacatgtacatatatacttattataccagtgaggtgtgtgtagagtagtgtactctgtactcttccagaaaactttacatggtaccggaaccgggaccagcggcgacggtgtagtggtgaggaggcagaggagtgccttcggcctcgacggaagaaggccgccgatggagaagaagaccagctgggagcgtggcgcggcgtcgcggtcgtgcacgaggaggaggagcctgcacttgccggagggagaagaagcatgtagcacggtgcggtgctgcagtcgtgcgtgagtaggttcttattattgttttctatcctgctggatatgtagtcatgacagttaaattatgtacaactatgattacaaacgggaatacaagctaggagttgagaccacaatccttatgaaaagttacactgtaagtatgtcgtcctgcttgcatttcttccatgttccttttctcactgtaagcttagtttttgtgatcagcttccagatagaagagttattaaagtagacactaaacgattccaacctcctgaatctctttttactcctgtaacacttccatttatatttatacataatggtattgtcaacagtacacatagtttccatcagtttgttaatagtgcacctttagattgaatgagcttcttgcagagcaccaaggattaggcattgaaatgtgtggataaaaatattagaggaccacacatcattattatgcaacattgtctatgcacatgaacataattgtatcggtagtaagccgccagcatgtttgaaagttaaaaatgtgaattaagaacgaattatcgtatcctgctatacttatgcaacctaccaagaattagggcattgtagaaaccatataaagtattgagatcaatttgaatttgtctgcctcatgattttttgatacctgacctttatgaaggtagaggacaacattaaggatgatcatagactaccaacattcttcttcagattaaatgttaaattcagtaatttaatttgtttcagatggcggaggttctaataagtaaccttatgattggaaattgcagtgatcggttgtgtgtacgtgtctcccgtctgtgaaaaatttatgatcccgaggatgagtataagcttttccatgctcatatggtcctcatcgacgaggaggctggcagtgctcatgctcaaatataccctccactcactgacgttttcaaacctctgataaaggagggcaatgtctacaatgtctcctacattcagatcaagaaagctaataggatgtacaagcatgttgacaacgatatcatgatcggtttcacaaaatggatcctatgctgcctcaacaaacccgcggtttgaacacgtgacagatgacggcttagcttctgtggatggacatcttggtcgcttttgtagatggaatgtttggttggcttttgtagacagaattaggctgcacttgtgattgtgtaacgcttatgagcatggttgtgtggactgtgtcggccaaagtatacctcccaatgccttgtatatatcacatgcttagctgtctatccccaactaggtcgcctgataatagacttcgatcatgtcatgctattctataacaattttcgctgtaacttgcctaatcgtcatactatggtacacgcttaaatttggtgctgcaactttattgtggattataaaagagagaaaaatacagcataaagttataatgtcaaattgccacagctcactgttaagacttatttga

SEQ ID NO: 30911 - DNA, 263 bp, Zea Mays
gaaaccaacgcttgggctagaatgggaagtatgggctttggaccgtcttttctattttttacttttttattttcggaaatttctgatatctaaattcggcaaattccaattaaaatgggtaaccggagcaaacggtcggtaaagcgttgtaccgatttcgatactgattccggtataaaattctgaaaaccgatttcgtttccaaaaagtatcgttaccactgaatttgatcagaaaaaattgaaaacggcttccgaaaaaat

SEQ ID NO: 30912 - DNA, 2096 bp, Zea Mays
cgtttctgatcgaaacgaagcattcccccgttcctgtctctgcttactcacctctcccatgagacgaagcataaaatcaaataggatatgtgggttggaaataggtcgtgaaattgattgaaatacctggggcttgagcgtgatatatagagggtggtagagaccaagcgacgttgggcgagcggcgccgccggggctgcgttggtcccttcaccggtgatgagcatccaccagatacaggaatgaacaacattgtgtaggcacctcgtccagacatctaaggcgaaaaatgctgcgcctgcaccaccatagtgcacctgtctctccgcacgctgcgatttgtccaccgagtaggcttgcttgttcttgcatatgtaacaagccaaacagcagaatcaccgcttcccaggggtggtcttccataaggcggcgaatcaccactgttgccagtggccagtcagtaccaggatacacacctgatgatggcgatcaatgccttgaaacaggcaacaagctctcttttgctactgtgaaggaggctttcatcagcctgaactctgtgggtgtcagaagtgagctaattcttctagctctaccagcagtcttgggtcaagctattgatccaatagcgcaacttatggagactgcatacatcggtagattaggtgcactggaattggcatcggctggtattggtatatcgatttttaatattgtgtcaaagatcttcaacataccactgttgagcattgcaacctcatttgtggcagaggatatttctaggagtgctaccaagcatcctagttcaggcaaattggagctgacatctgtatcatctgccctgatcttagctgctggaattggtataatggaagcattagcattgttcctaggatcaggattgtttcttaaactaatgggcgtgtcacctgtatctccaatgcacagacctgctaaactctttctttcattgagagctctcggagcacctgcaaatgtgattatgttggcagtccaaggtatctttcggggattcaaggatacaaagactccggtgttttatataggtggaatgctgttgggaagaactctttcgattctgctaactatgaccattggtacatcaatggctgctcggcaaggcccaacagcgatggctgctcatcagatttgtttgcaagtatggcttgctgtatccttgcttgcagatgcattagctgtttctgcccaggcgctgatagcaagctcttatgcaatattggactacaaaaaagttcaaaagacagcaatgtttgcgttgcagataggagtgtttagtgggttagctttggccattggattgtatgcctcatttggcaatatagctagactgtttaccagtgacccagaggtcctaacggttgtcaaatcttgtgcactgtttgtctgtgccagtcagccaattaatgccctggccttcatctttgacggtctacattatggtgtatcagattttgaatatgtggctcaagctactatcgtggtgggtgttacgtcttcactcgtcctgttatgggctccgtctgtattcggcctggctggagtttgggctggtttgactacactcatggggttgcgtatggctgcaggcatcctgaggttgctacagaaagcgggcccttggtcgtttctgcacgaggagccataagctgaggtgtatcaactaccagcctgcgcagtttggagctgctaacttactgctgggagtttacatcactgcaaagattatccgagtgtcatggaggactcgctgaagatgttacccctgttactcctccggctcagaacaaaatctgacttcattgcatttcttaaaatcagtctgctagatggcatggtttggtttggattggtttggtgaaggcgtgaggcccatctgaacatcggtgcggcctctatttttttttggcgaactcctttgtatgctatagcagctgtgcagtttctgtagaagaaaagatacaaggatcatttatagcatcgatatatgatgtatgcaactcctctgaattgtactcggtgtaaattattttagaaccgttttgttgattaggtac

SEQ ID NO: 30913 - DNA, 326 bp, Zea Mays
tgtttgcttgtgcatgtttatattcgttgcgcgtcacgaatagattgtgatctgttcctgagcttcgaggaatcgacgatcaaggtttgttgaaccactggtcctgagatcaagttcttcgagtcctacgaggttgaagaccctgagcatctgtttggtgaaagcaagtgttctctaacccattatgtcctatttactttataattcactgtcccgcgtactatgatgaacctaaggattgactagtttttatttatcttgtccttgattaccttttgggttattgtggttagcttcctgctattgctttactttaatcaacgaac

SEQ ID NO: 30914 - DNA, 1637 bp, Zea Mays
cggccggccattgggacttttcctcctctcaatgatgccctacccatctcatcgctgttccccttcttgtatttcatgataagggacctgaacgtcgctgaaagaaccgaagacatcggcttctacgccggcttcgtaggtgcctcgttcatgtttggtagatgcttgacttcaaccgcctggggaatagcggcggaccgtatcgggaggaaacctgtcgtcgtgttcggcatctcctctgtggtcgtgttcaacacgctgtttggcctgagcgtcaactactggatggcaatcgccacacggttcctgcttggtgctttgaacggcttgcttggaccaataaaggcttatgccatcgaagtctgccggcctgaacatgaagctctagcgctatcacttgtcagcacggcatgggggataggcctcatcatcggcccagctcttggaggctaccttgcactgcctgcagagaacttcccggctatcttttcacctgactcggtatttggaaggttcccgtatttcctaccatgcctttgcacgtcggtcttcgctgctgctgttctagtgagctgcatatggatgccggagactctgcacaggcacaaagttcacgagagtacgagccaggacgttgaaaaggttcaagaaagcggcattaggaagaagaagagcttattcaggaactggccgttgatgtcgtcgataattgtctactgcatcttctcgttccatgacatggcttacacagaggtgttctctctatgggctgaaagtgacaagaagtatggtggactgagcttatcatctgaggacgttggtcaagttcttgcagtcactggtgccagtcttcttgtttatcaactctttctataccctagaatcaataaggttctcgggccgatcaaatcttctcgaattgcagctatcctgtgcatacctatcctctttgcctacccctacatgacatacatctcagaaccaggactgtcaatcattttgaacattgcgtcagcgataaagaataatcttgctgttacgatcattacaggcactttcatccttcaaaacaatgcagtgcctcaggatcaacgaggagctgcgaacggactgtccatgacagggatgtccttcttcaaggcacttgctccggcaggagcgggcattgtgtgagttctcgtgggcgcagaaacgccagcatgcctttttcttcccaggtgatcagatggtgttcttcctgctgaacgtcgttgagctggtcgggctcatcctcacattcaaaccctttctggcagtgccagagcgatgcgatagtagatagctgttctttggaggatgaactatagaagttttggaatgattcaaaatttcatcgtgtatggcagcaataccagtgagacccaggaagaagcaagagctgtgtactggtaaccgtaagcggtgtatgcagtatcgctgcattagcatttgtgcttacgaaatgcacatgtatgtaggtgataaatgactaaatgtggccagtggatcgagttgttgctgcactgtgagtagtggtagtgtaagattcagcgactcgaaattgtgtgttggaaataaaattggtaggtgttagacgcgcggtatgagcgccaatcatt

SEQ ID NO: 30915 - DNA, 1441 bp, Zea Mays
cttctcaacagctgcctcatactctgctgtgaagttgtgttgaatgttgcttgggcattgtggatggtgatgatgttgaattgaataatcttcatcgacagataattcataaagaagcatatgttggacaatctaaagtgaagtcagcagctgatgcttgcctcaggattaattcctctatcaaggtagtagagcatcaccatactctgaagccatgcaatgctttggagattgcacggaaatatgatatagttgttgatgcaactgacaaccttcctactaggtatatgatcagcgattgctgtgttttgctgaacaagccacttgtatctggtgcggcattaggcttagaagggcagttgactgtttatcatcataatggaagcccatgctatcggtgcctctttccaactccaccacctgtggcagcctgccagagatgctcagacagtggtgtccttggggttgttccgggagtgattggttgcttacaagctctggaggctataaaggttgcaactggtgttggtgagcccctatgtggaagaatgctactatttgatgcactctctgctcgtattagagttgttaaacttcgtggaagctctccagattgcacccattgtggcgaaaactccgttttcacagaagaagactttcagaagtttgactatgagagcttcacacagtcaccaatgtctgataaggcagcagcaagcgtgaacgtactcccagagagcgcgcgtatcacttgcagagagtacaagaaactggccgacgatggtgaacctcatctactgctggacgtacgacctgcgcatcacttccagatagcttcgatctctccgtcccacaacatcccgctctccatgctggaagagaagctgcccgcgctcgaagcctcgctgaaggaagcaggggaggggtcagccttggttgtcctgtgtaggagaggcaatgactctcagagagccgtccagcttctccgcgagaagggattcgccaacgcgaaggatatcatcggtgggctgcaggcgtggggacaagacgtcgatcctgatttccctgtgtactagcgagatggaaatggatgcactaccttgtaacagtttggatgccgctagaacgagaactctgatactatgatttgagtactaattttgccataccgtgtacttgcaaaaacaaatatacaactggtatggacacggtattgtgatgaataatgccatggacaaaataaaatttgagtgatatttttttgcaggtttaaatttttagctttgtgtactacatttacgattttgtaatgattgttaaaacattgcgacatgttgagttaactatattttggctaaaggggatgcccgaaccccaggacaccaatgaattattgttgtttcaatccagagggcacactgctctgttccagttaacaggc

SEQ ID NO: 30916 - DNA, 2280 bp, Zea Mays
cccatcacgcctcatccgcctgattcatcgcaggtgtgggaaacatggttgctgtcggcgaacggcgttaacagccgcacctccgttcctccgggcgtgcctccgttcctccggctgcgcccccgctcctccgaccgcccccggtacctctggttgacctcgcccccattcctccggctccgcttcgtgttctccggcctcgcccctgttcatccaaccttcggttctagcccctcgtgaaggtcgaccgttgtatctaatggtcgttgatccggtgacctcccccacaacaactctacccaaagactacgatggctctagggaagaggtccacatggacctcacggaaacccgaagaacttgtgccaactgattacgagaaaataagggctatgaatatgatgaagaacaatcaattgtttcaacggctaggccttggacaattgaaatcactggtgactgctacagctgcaaacaacaaagaagactgtcctcagcaatcagagagtttatatgatggtgaaaacactgacaattctaatgaagaggaatcccaatgtactaacggtggttgtgccaacatctccaatgatggtgatcagatctcaacaaaagtaacaagaggaaataaaataattgtggcacctacggaggagcgaacaattagagtcactaggcaaagaattgctaaagtaaaccaagaaaatagccacaacctgtctattcataaacaactcagttcatgtcctgctacaaaccatgattcgatagaaactcttgttgttcctacacaacctagttcaaatgccaccataaacaataacacaacacataacgtagataatgctatagagcctaattctctgatataggaggagagtgataaccacaatgcagttgaaggtaactaaacattttaactgtttagacattgaactatccttgagcaaataacttttatgttttccagcattagtttaggtaactagtataacttaaatttgaacaaaattactcatatgtttttgtatgatttatggcaactaattcttagttatatgcagcatcacacatatcaacaagtttttgtgtcctgaccaggaacaatagatatcataccaaggagaaaaagtatgggctaacaacttgaatcgttaagcagaggactaggaatgaagattccaatccaaattactgaagggagcaagaggccagagccacccattcaagctgctaagtttgcatcagaggggggaatcacattgaggcagcacattccaatatttcaccactggaaggagtacaagaagaaagagaatgaacctacaataagaaactatattggaaaagatattgctcaattcaccttggacaatgatagcaaggcagtggaagatgcatgtctagatatgctaaagggtggacaatgccaaatgaggtatagactaaaacaaaagtatttcaatgggatacctgctaatcaagtgaggactacatcacctatttcaagcatgtctgatgaggactggagaaagttggtggagaagtggtctacccaaaacacaaggatagttgtatgaagaataaacttaatcgtgaaaaagtacagtatcaacaatgcataggatcccaatcatatattgcaaaagcttatttactgaaagaagagaaatataaggatgctgaaccgagtgcaatagatcttttcaaggacatgcattgcagcaagaagaaaggtttttctgaaaatgtaaagaaagcaattgttgacatggaagcaagggtgacaacaccagttgaggatggacaacaacaaaagtctcctatagaagttgtttctgaagtgctatggggctccagtttatttctacagaatgttggtctgcaagataactccaagaaaagctccacaacaactgtttttgctaaggttcaagaacttcataatcaattggagtctgagaggctagaaaaagatgggcttcaagaagaagtagaaaccttaaaggctcaggcacaggcctcaaaggagaccatggacaatatgaagagatcgatggaagaaaataacagtctcctccgtcaactgttgagcttcaatcgaagccaaacgtccccatcttaagtctgctatagtatcatgttatattagttctggattcaggttttataaatttggaatatgtttaaaactttcatactttgagttgaagttataggatttcctttgtattttaagttacatgatctacaatcatatgatttgaagttataaaagta

SEQ ID NO: 30917 - DNA, 222 bp, Zea Mays
tcaaccaactcctacacttaagtgcacggtacaagcctacaaacattaagtgtagtaaaatagcatatataaacggttatgcataaaaccgaggctttcctttcacttaggtagtgtttgctgggggaggtactcgcttggcgagcatccactggttaagtccatccttccttgggtcgtccatcaactggatcttgtggttggcaccacatcacttgcacg

SEQ ID NO: 30918 - DNA, 3652 bp, Zea Mays
gccgatccgaggccaaagggagggaggagacccctttccctctcgccgccgcacgatggtcgacaccaggcggagctccgcggccaagcgccggggcccgtccgaggactcctccccgtcgccgccgacgacgcaggcggacccgacgacggcgggcttgccggtggagcccgcgtcgcccccgccgtcgtccgggagccgatcgggcaagcgcgccaaggtcgcggttgcgcgggcggaggaccccggtgcgccgcgcggcaaggcggtggaccccgccgcggtcgacgtgctcgacagctccgtggcgaacctgcagggcgtggcgaggccgccggccgccaacgtggccgcgtcctccgccgtgtccaattccgtagggaggaggaagaggaatcagtctgtgagggcgatcccgacgggcgaggggacgctctggaagccgaggcccgccggtggccgcgctgaggcctggggcagattgatttcccagtcttccgagtatccctcaattccaatttatactactcatttcactattggcaatggcggaaagtgtgacttgaaactcactgagacatctcctgggccacttatttgcaaactgaagcatgttaagaggggtgctgcccttgagatctacatgaacaaagttgtccatgtcaatgggaaggccttggacaaagctgctaaagtcaccttgatcggtggtgatgaagtcatgtttgtttctcttgggacacatgcttatatatttcagcaacttctagaggaaaaagcaagcacaccatctttgtgttcaaaatgtgtcattcaacaagaacaatatccagttgtcaaagataaggagatagtcagcagtttatgtaagactgtgggggagcaaagctaccacccttctgaggaaaatatgacatttggtcgacaccaacttttgaaggatgatttgaagaaagcagctataagtgcaagtgatatatcagaatcatttgataattttccatattatcttagtgaaaataccaaaaatgttcttttgtcatcatcgtatgtaaatctatgctgcaaggaatccactaagtggacaaaggatatatcttctctttgtaaaagggtactattatctggcccaccagggtctgagatctaccaagaattactggttaaggcacttaccaaatcctttggtgctaagctgcttgtcatagattattcgctgctgtctggtgggcagccttcaaagtcaaaggaatcaaaaccatacaaaaaaggtgatagggtgaggtacattggtcctattcaatcatcagggtttatgtttgagggacagagggtgaagtgaggcttacttttgcggaaaatggatcctcaaaagttggagtcagatttgataaacagatccccgggggcattgatcttggaggcagttgtgagcttgatcatggcctattctgttcagttgattctctatgcctcgatggtccaggatgggaagatagagccaaacattcatttgatgttgtgtttgagtttgcctctgaagaaagtcaacaggtgcctgtaatcctatttctgaaggatgttgagaaaatatgtggaaataattacacctaccatggtctaaagaataagcttgaaagtttcccagctggagtttttattgttgggtcccagattcagacagatgctcggaaagataagtcaaacaatgggtctccttggctcaagttctcatatagccaagcagcaatacttgaccttgcatttcaggatagctttggtcgggcgggtgaaaaaaataaagaagcactcaagatgtcaaagcatataactaaacttttcccaaataaagtgacaattgaatcacctgaggatgaaacggaactctcccagtggaaacagctattgggtcgtgacattgaaattcttaaggcaaaggctaattttttgaaaatacaatcttttctaacccgccatggtatggaatgtactgatttagaatcagtggtttgtgttaaagatcgtaatctgacaagcgaatgtgtcgataaaatagttggttatgctttgagttatcaactcaaggatcaccctattcaaactcctggaaaggatgcgagagttgtcctttccggtgtaagccttaagtatggaattgatttgttggaaagtatccaaagtggccctaagaagaagagcacaaagaagtcactcaaggatgttgtcacagagaatgaatttgaaaaacgtcttcttccagatgtcatccctccagatgagattggtgttacctttgaggatattggagcattagaaaatgtcaaggaaactttgcaggagttagttatgcttcctttgcaaaggcctgagttgttctccaaaggacaacttatgaagccatgtaaagggatattgctttttggtccacctggcaccggtaagaccatgcttgccaaagctgttgcaacagaggctggtgctaattttatcaacatatcaatgtcaagcattgcttcaaagtggtttggagagggagaaaaatatgtgaaagctgttttttcacttgcaagcaaaatttctcctagtgttattttcgtggatgaggttgatggcatgctgggtagacgtgagaatccaggggaacatgaggccatgcgcaagatgaaaaatgagtttatggtgaactgggatggtcttaggacaaaagacaaagaacgtgttctggtacttgctgccactaataggccatttgatcttgacgaggctgttgtcaggaggctccccaggaggttgatggttaacttgccagatgcacccaacagaaagaagattcttagcgtgatactagcaaaagaagatttggcagatgatgtagatctggaggcgttagcaaacctgacagatgggtattcaggcagtgatctgaagaacctgtgtataactgcagcacatcgtcccataagggaaattcttgaaagagagaagaaggagagaaccttagctgaagcagaaaataggccagccccacctcagtgctgtagcggcgacgttcgctccctaaagtttagtgatttcaagcacgcacatgagcaggtttgtgcgagtatatcatcggattcaaaaaatatgaatgagctcgttcaatggaacgacctctacggagaaggcgggtcgaggcacaagacaccgttgagctactttatgtagcctaacgtttttttagatgatttgtacatacagaagcagcctttgtataggtgtgtttccagttaattttgctggaaacatttattcatgtcgggtttcgtttctataatcatatcagcttgtgtctgcatctagtgtagcctgagcttctgattagttattaatttatttcagtccgttggatcttgcgtcctggtatagtctgtgaaaggtctcgacggagattcatttggatttatttaatagtctggatgatatggtaatgtttgtgtgggtgtgtgcgtgacagagaaggttttacccttccctctgcactaggtatggcaaagaggaaattctccacaggtcctacgaacgcttgtggtggccatttcttttccatcttcgttattcgtggggataaatcctatcggaattccaattataattagatagtacttgattt

SEQ ID NO: 30919 - DNA, 378 bp, Zea Mays
aaacttagaggaaatttcaaagaaacattaaggcagtcgtgtggccttgataatatttttaatatcatggtgaattgccattcagaagtggaggtaataccttgtttatgtgtccaatagtatatagcaattataagctcgttgcaataaaataacagtaaagcattgccatctactagtgtatttgaattgtaacatgttctaggaaagatgctaatggacctagagtccgagacaaaagaatacatattcgcagatggttctagctcacgggtttgaccctcaatcacaactgaaatagctaaatgtgaaactttcggagtacctaccacaacaaaccacgaggagtcgcaactggtagcaagtagcaactataaa

SEQ ID NO: 30920 - DNA, 4233 bp, Zea Mays
atgggggataggagggttctgcttgttgcgtctcctgaggtagcagtctttggttatgatggggtcgtctcattggcaagcgttcaggacgctgtggatactgttccgttgaacaaccaaacgcgcaccgtcatcaggatcggtcctggtgtgcaccagcagcaggtgcgcattcctaggaccaagaacttcatcaccttgtgtggatcttcgataaaggacaccgtgatctgttgggacaacaggactacgacttgcatcaaacacactcagccatcaggagcgattggcacagggacactgagcagtgcaacagttatcgtggaaggggacgatttcatcgcagagaatgttatttttaagaactcagctccccagtctggacaagcagcagcagtccgtgtgacggctgacaggtgtgccttttacgactgcagattcctcgggtggcaggaaaccttacatttgcatggtggaaagcagctcctgaagaactgttacgttgaaggtagttatgacttcatctttggagattccgctgcccttctggagcattgccatatccactgcaaatcagcggggtatattactgctcatggccggaaatcatcttcagaaccaactggattcgtgttcttcaagtgtgttattactggcaatggagaagctgcctacatgtacctaggccggccctgggagcccttcgggagggttgtttttgcagaaactttcatggatcgctgcatagagcctgctgggtggcataattgggacaagcctgacaatgagcaaaccgcctgcttctacgagtacaggtgctccggtccaggatcaagctcatcaggacgggaacgttggtgcaaagaactgttcggtgatgaagctatgccgttccttgcacagactttcattgatccagatatcgagaatccatggttggtccacagcaaagccgttgcggtcgtaggagatctcggagatgcccaactcgttgcacaccctgacgagctcctccccgagcctccgggcagcctccttgtccagggggagccgacgaggcaatgcaaagtcaactcaagattccccgccggagtacaaagcaaatcccagacggagaagacggcggcggcggcttaccaccgtgccgcagggcgggtcgccgcagatggacttctgcagcgtgctgccgtagaagaggatctccttgttgtggtcgtcggcgagaacggcgtagagctgccggctggagcagaacaccgagagcctgggcttcgtcgccgtgccgttgaactgcagcagccagcgagagtcggcggaacggcggtttcgttacatcctgccggctgcaggccttttatcctgaaattcgaagacccaggtggagcatcggaacgttcgtactaccttcttctgcagccgacggttcctgaccttggcgctctccgtgcgagcgccgcgtctcgccgtcgcctcgatcatgggcgagaagtcgaggctggtcccggagcctatcagcgaggtcgtagggtgacggaccgggagcgcggggcgcggcgggtagcagcgccatcgccagtggggcaaatcgtcgaacagacgccgcgcggccagtgggctgctgcgctattggcctattgcctttgtttggcgtcagtttaccccaccacatcaagaggcccaaccgtcgagagaggaagcaggagtaccgagtactccgagatctggcctgtgtccacagccttctcttccctgacctcgacatcttgccgatctgcactgactccgcggcccgcgttcatggcggtgacctttccctctcccaccccgcggtccccgcgccggccggatgccattgtggctcctgacccctcgtctgctgacatgtcgccctccctcgacttcggcgacccgacctccttcaccgcgctgcgcgtcctcaccgacgggggtgccgccacccgccttctccacgagtgcgtggcctaccagcgcgccctcgacgcccgtctcgacgctctcctcgcccgccgcgccgacctcgaccgcgccgctgcttcgctcctccgctccgccccaccactgctctcgctcgcggcctccgacgccgccgcgcttaaggagtcctcctcctccaccgcggcgcttgccgacgcgctctcgtcccgcgtgcgccaccttgacgcggcgcactccagggcggacgccgcgctggcgcgcgccgaggccgcgctcgaccgttcccgcgcgctcgaagcaacgcggagggccttggccgctgacgacctcgccgctgccgccaccgccgcgcacgaattcctcgctatcgacgctcggttccccaccgacgacgatctccgccgcgatctgattgacatcaaacgtcgcctcgaggggctcgcgcgtcggaggctagcggcggtcgtcgacgcacaggaccaccctgccgtgctccgcctcgtccgcctattcccactgctcggactcgctgatgaagggctccaggtatacgtcgcctacctcaagaaggttgtcgctctgcgtgcccgtgcagactttgagcacctcgccgagctgacctccgcgacccagccgacctctgaccggccggattttgttggctgcctcactcgtctctttaaggacattgtgcttgctgttgaagagaatgatggtgtgctgcgtgagctcaggggcgatgatgttgcttatgccatcattgagctgcaggaggagtgtgattcgcggggcacccagatcctacgccgttatgctgattacaggaagcttgcacgtcttgcatcagatataaactcctacacgaagaacctcctttcagtcatgggttccatggccagtgctgctggaggcaatgaagggcctgatcccagggaaattgagctttatcttgaggagattcttgcgttgacacagcttggggaggactacactgaattcatggtgaataagatccgtgtattgagagatgtgaaacctgaacttgggccgcgggcgatgaaggccttccgtaatggtaactttaataaaatggagcaggatctgactgggttctatgttatcttcgaggaatttttcatggtggagaatgtgaggaaagccatacggattgatgagcccatatcagatggtctcacaacgtcaatggtggatgatgtattctttgtactgcagagttgctgccgccgggctacttccactgcaagcataaactccgttattgctgtgcttggtggggcaacgagccttctgagcaatgagtatcaggaggcactacagtggaggatgcgggagccaaatttgggtgcaaagctcttccttggtggtgttggggtgcagaagactggtgaggagattgcgactgcactgaacaacattgacattagctccgagtatgttctgaagctccgccatgagattgaggagctctgtgtagagcaatatatagcaagcaataccaagttaggcaagcaagacaataccggcagctcaggtctcaggcaagcaagatagtaccaacaaggaagagcagaggagtcgggacttcatcttcgtgcacagctggggcctgcaggtgctagggcagctctggtgggtggtgcgccgcagggaacgcgggcgtgcggcgcgggggcgggtggcctgaggagcgaggagctggagtggggtggccagagttgcgtttggtggcgctagcagcggtgacaacaggggaaagaaagaagaaagcacaggtacatgggcgcatagggcacaaggcatacacacatggcccattggagcccacttcagcagctaggcgacggcacgttgtcgcctgggagcctgcccagtcgctgtggcgtcgtctaagtcggccaagggccgccctagttgggttcaggccaaggagctggagtggggcggccggagttgcgtttggcagctctagtggcggtgacaacatgggaaagaaagaagagaaaacaagtacctgggcacatagggcacaagacatacacatatggcccattggaacccacttcagcagctaggcaatggtacgacgtcgcctgggagcctgcctagtcgctgtggcgtcgtctaagttggccaggcgctgccctagttgggttcaggcgaggtgacagatcatggtgttcgttgccggccactggcacctaggtgtcacctaggtgacacagtgacaacagtgagtatggaatgtatgattgatcc

SEQ ID NO: 30921 - DNA, 2625 bp, Zea Mays
caaccccttcgttttgcttcccctcttcgattcggtcctttccttcccaaccaaaccccctcaaacctgcgttcagggaaaaacatctttctttctctcagtcagtctattctcctcccacttgcaatccaaacgaaagcaagaagccgccgccgcttacagctagaggagaggagagagaggggagggaagggagggcccgagagggaggctccaggggccctgcattgcgtcgggctcgggactgtcgattgggccgccgggatggatcacggcggcgaggaccgcgtcgtggcggcgagcctcgcggcggcgcggcgcacgctgcgcgccggcttggacaagtcgcgcgcgctgggccacgcgctagcccgcgcggggccccgcctgaaggagatccaagcggcgctgccggtgctggaggccgcagtgcgcccgatccgcgcgccgcgggccgagctcgccgccgccgggccccacatcgaccgcgccgtgggccccgccgccgccgtgctcaaggtgttcgatgccgtgcacggtctcgagccgccgctcctggcgcccggcgccgcgggctctggcgcggctggggacttgccggggtacctcgccgtcctggcgcagctcgaggaggcgcacaggttcctcgccgacaactgcgggctcgccgcgcagtggctcgccgacattgtcgagtacctcggcgaccgtttcctcgtcgacccgcgcttcctcgccgacatcgaggtcacgctcgacgagctcaaggcaccccctaccggcgacctcgacggagggctcctggccgccgccctcggtatcctcgaggccgagttccgccgcctcctcgccgaccattccgcgccgctcgcgatgccgcagcccggcgccgccgctggctcaaccgcgccatcccgcgtgcctgccgctgccgtccacaaactcaccctcattctcgatcgcctcgtggccaacggcaggcaagaccgctgcgtggccgtttatatcgacgcgcgcgggggtgtggtcagtgccagtcttcgcgctcttggcctagactacctgcgtgagccgtctcaggatgcacaggcattgggacctgctcttgagctgtgggggcggcatctagagtttgtggtccgccgtctcctcgagtcggagcggcagctctgtgccaaggtgtttggcctgcataaggatgtcgcgtccgcatgctttgcagaggtggcggcacaagctggggttcttgaattcttgaggttgttcggtggcaaagcatgtgcggagattcagagccagacaagggaccttgtcaagttgttgatagacggtgctgtcgagatctttgaggagttgatcgtgcaggtggagctacagcggcacatgcctcccccagtcgatgggggcgtgccacgcttagttacctttgttgtcgagtactgcaaccgtctgcttggtgagcaatacaggcccatgcttgggcaggtgctaactatccatcgcagctggcgcaaagaggtgttcaatgacaggatgcttgttgatgtggtgctaaacattgtcaaggcccttgaagctaattttgatgtttggtccaaggcatatgacaatgctacgctctcgtatctcttcatgatgaatactcattggcatttctttaggcatttgaaggctactaagttaggagagatcttgggtgatgtgtggctgcgagagcatgaacaatacaaggactactatttgtcaatgttcatcagggagagctggggagcactttcgccactactgaaccgggagggattaatactgttctccaagggccaggctacggcaagggacctggtgaagcagcgcctcaaaacattcaattcaagcttcgatgagatgcattgcaggcaatcatcatgggttataccagacaaggatttgcgggagaggacatgtaatcttgtggtgcagactattgttcctgcctatcggagctacttgcagaactatgggccacttgttgagcaagatggaaacaccagcaagtatgtaaggatggatggaaggaactaaggaacttgaaatcatggacactgccacactgcactattgggcattcgcattcagggcaatagaagcatctgaaatccgtttggagaattttgtttgtttattccccattgcactaagataccttggagcaatctgacagtcttaatgggccacagaaagtttgggcaggaaacaaacacttagtggcagatgaaatagcttttgatctggactcgcatccaatagccgagacacccttcttccatgcctgcatggggtcatttagacgccggggaactgcagctgcctaccaaactcttgatcgagctcagcaccagccaccagattgaaattgttggcaggacatggacgttggatgagcatggggattttcagaaggaatggttcgtgcagaacatgccaattgtcatagagccatggaggtcctctagcggatcaatcaaggccacaaacatgcaaacacaagagtcaaaacaagcacaggtacctttcacaaaagaggggggggggggggggagagagagagagagacgtaggccaggaaaggcaaaaaaaagttttgtt

SEQ ID NO: 30922 - DNA, 466 bp, Zea Mays
ctcggatcggcctaccgccgtacgccgcatctgttcacttcacccagcgtgctctctctctccctcctccctctgtgcgacggctgggtgggcttccgccgccgccctacgccaagtgccggggccatatagccggtctcttcgccggcgacgagaacgcatcaggcgaggctaacggcaacaccgagccaggccgtccgggtttaattggttcgcggcgatgggccgcccggagccggtcgtgctgttcgctcagacgatcctccactcccagctggacgagtacgtcgacgaggtgctattttctgagccagttgtgatcactgcttgtgagtttcttgagcagaatgcatctccttctacgccaaacatttcccttgttggtttactgaaaatgggcataacttttataacatctgatgatattgatgtttggacccttctgattattggtgataggatttga

SEQ ID NO: 30923 - DNA, 3030 bp, Zea Mays
ctatgatgaatggaatggtgatggatcaactcatcctatttcataaaccaaacaagaaagctactcgagaggaggccaactcacaacctctgacttctttgcgtcggaacaagagctcagagttctcacgcatgatcaaagaagccaagcatctcgggttggcccttggcatcccttgcttggatggcatggaagaagccgaagcacagtgtgcattgcttaatttttcttccttgtgtgatggctgttttacatcggattcagattcattcttgtttggtgcaaagacagtttatagagatgttttcataggagagggtggttatgtaatttgctatgaaatggaagacattcagaataagcttggtttcggcaggaactcactgatatcacttgcagtccttcttggtagtgactattctaatggagtccatggctttggcccagaagcagcatgccgccttgttaagtctttaggggatgacaccgttcttggtcaaattttgtccgatggagttaaacctgcaagaaaatgtaaaggaaaaggcagtggcgccaatgcagggacggttggtggaacgtgcccaaaagcaagtacctgtgaggttgggattaaccaagattctggtagtcaatttcgtgacataataaatgcatatctggagccaaaatgtcattcaccagattcagaagctgtgcagagggcatgcagccagcggccatttcttcgttcacaactccatcagatatgcgagcaatactttgcgtggagccctgtgaaaactgatgaatatatccttccaaagattgctgagagagaacttcgaagattttcaaatctccgctccacgtcttcagatctaggaatgaaaccttcgctgaatgagattcctgtaccgtgtcctgtactggcgattgtgaagcagcgaaaagttcaaggaagtgaatattatgaggtttcatggagaaacatagatgggctccaagtttcagttgttccaggggaacttgttagaagtgcttgcccagaaaaaataactgaatttttggaaagcaaggatgctcagaagaaacaaaagaggagagctaggccaaagaaatctggtcaagctgccgtaaaagacgtggatgcgcagctccaagaattgctacttggaattgaatctgaaagtggtagctttccatgtacggccaatggccctcagacagcagctatacagatggttgcaccgctccaggaatttgttgatctatcttctccatcaccacctatacgatcttgtaagattgccaggtccagaaagttgagtgattcagacacagtaacaatggatgggattcatctgcagcaccaaagtctgcagattggatcgatggagtcaaattcggcactgggtcttgagccaattgatctgtcatcaccctcgccttgtgctgctcataaaccccaggctgctccagaagcaccaccactgtgtatggaggcagaaagaagagccctttgggatataagcaatttggtcgagaaagaaccctcctgttgcaagcatgaacctggaacaaatgtgcaggtggaagagtcaccattgttcaggcatgggactgggatggcaggcgaagctgattcttcacggagaggcgatgcgcagagtagggaagtagtagaagctgccatgatcgacctctcttctccatcaccagttaaagtcgataatagtagaaggaatggtaagaaggattgtgaggctggcagcagcagtcagtctccagaacacgagaggaaagcgagggagctcagattgttcctagacagtataagagacgagttgtattaacattcgattggattgtatgtaaaccgatatgtgcaatgatgatgtgtgttctccatttcaatggtatctcatctactggtggtacaacagtaaccaatgaattgtgcaggtattggaaccagcagagaatgtgaatagcaatccagctatcagagcaaccagtagcacaatcagagcatctatgatgctgaaattcccaccaccttgtcttttgcttgaatcatccttcttctgtaaagacgagacgaacgactgtccgctgcgagatccaggcaccatatcccaaagggattctaatgtgctacaagctgatgcactttctggttccaggattgaagagctctccgcggctgtttccagtgcggatgcacggccatagcaggcttgggaaatcgcgtgaataacctgaaagatggtaaagagttcacatccaagccctcgaaagcatggtatggtatcagcaagtggagcctggcatttttttgcataaataagagggaaccattgaaaagaagaagctgacagtgctaacctgcgacaaggcagcaggggatgtggccttgaatgatgcctcggaagcccatatgtaagtaagcgtgcaacaacagattgctgaagaataagaattcatggtgtgaaccgtgagtagggatggcaatggatgtgatttatccgcgtacccgcggataaaaaacccgttgggcacggttttgggtacgagtttgtacccatggatacggatacgggtagcacttgatatccgtggatatttttaaaacggatatgaaaaatcaatatccatacccaaatacccgaatatccattaaaatatcttgtagtctcgtcccacaagtggcaggcttttaagtgaccatcgcagtcgtctcactcctaaaatggtggaagctttgatgtgcattcaaagttggcttcgtcacactcttaaagatgctggtgatggaagattcaatagtttttggtcttgccttgaagataatgaagaagacatgaaaggagaatcttgtgtgttggctgctgattctgaataaccagctggtctttggtgttgattcttatggcttgtgtgtttgtaattttatcaatttgaataattcagatttgattttgctagacaattttatattgctcgctgtatgccttaatacatgtatcagatttcattgctggacaaatt

SEQ ID NO: 30924 - DNA, 850 bp, Zea Mays
ccttccagttcccacgaaaaaggaaaaaagaaaactcaagagcccaggcttatctagaaacctcgctaaccctcgaggcctcgagtagctatgaagcagcgaggcgacgacggtgccgacggcgcagctgctttcgccggctgcctggattgcaggtcctccgaccattgctttttgcggtaaagagaccctttccatactatccttcgcttttcgattgtgtcgatgttgtagctttcgtgccggcagggaggcaacgccgccgccgccgccgacagtgacgacgctgctgccgccttcggtttctaactccttcgatcatcgcttttctgagttgtgtacaaccaaatatcatttgtggatttagagaaagaactcttcatgaagtcattcatagcatcatatggaagaaatgtcattgccatcacccagatgaaacattccactatctgtcaactccaacaaaactattgtctagaccaaaacaatcattctccaaattaacaggatagtcctggagatgaaggccaggacctaccgtcgtttgagtcaccataaaaaagaagcaacattcgattggttggttggctaacggacccagcgcattgtccaaagctcaaccgcagcatggcgggaggcagctcatgcacatcagccagtcaccgatcgagcatcggcttgcggtaccggatagagcaagtgatacatttggcggatagatagccagcttttgtctaatactatagtttacaatgttgtatctaaacactatttatcaaaaccatggtatgtttggagctaccaaaactacggtattatcatagcaattgcaaagtataatattataaaa

SEQ ID NO: 30925 - DNA, 2915 bp, Zea Mays
ccgcaaatgaaatgaagtccttcctagggcgcccccttctcatccttgaaacgtaaggaacgtgtacactaaatcctccaaaggtatcctttctagtaggatagattgtgcccagagaaccagtctcattgaaaggtgctactcgcgggttcattaacagttcatcatgtgcaggcctttttgctggtgaagaattttttacagttgagtcatgagtctcaatgtctgatagctcctctatgtatctttttgttggctttctagttcgcttgtcagtgcattgctcgcctagcagatttccttgtggttcatcattatggatcggcaccctcttggaagaatcttcctggtcctcgctctgatagtaagagctagatggagagtccccttcgtttcctggatatataaccacagaagtagctctaagcccagtcttagctctttcatccatgtctgacatatcatttttggcatccttgccaacaattttgtagtctttaactacacaacctgaacttggaacatcgtaggaattagtcaagcccattgtaatccgtcttttgagccatatcttgtctttgacattagtctgccggccaaacgtggctctaaacgcctcctgaagttctctaatagtaagatcatccaaacagacttctcctcttaatatggaaaaatcaggcatggaactattaactcccgaaacagatggatctgtagatgtgtcgcatacagatcttgagcaggcatcagccttatatttttcagcacagcaagagtcatttaacactgtcgattttgtagtctcagttgaagcattgtcctgtcgagtgacgtttgccccttgttctgtaagcaatttatctgaatgctgactatgaattctaaagtctgagggaggactaagggaatcatccaatgactacaaacaacatacctctaagttggcacccaatttttgtgtgtgtgcttccacagtctccaatttggaagatccatctgcacaatcaggcttcttcagtaacatgcagtcattgttgaaaaactcttccacatggtctgcatcttcaataggaggaagatcaaccttctcgttgtgaaggaaatgttcaaactgcaaaacatcatcctctgtagcaggaacaagtgttccatcaccttcaacctgaacatatttaaagcatttctcaaaagactcgagtaagcatctaagtttttatattaacatgtggccgacaaatcataaaattaactaagaacttacccgaactagctgataaaccacaggatcagaagtgcctttcttttcaaagtcattctcttcacttttattaaccatggtgccatgtgagtcatccatttccatagataagtcaaacttcatccaacatttgtgacaatcaaaatatacaagtattaaaccctataatctgcaagtgaattaaaaattacaaattcataggattatacggtgaccaatttcatcaatcccagaacaaacaaaggtacgcaatgttctaacacatgtgatgactaattctgggactgggtagacaaatggattttttttgacatcctgaataaaaaaggaggcaaacaaaaggatgcacttgattacatacaaattattgcaagatgaaacaaaacacagctatgtactctatggaggtgttcggtcattgtgcatcgataatggtcaaacacagtcaaactcaaactttaataattaaagtacaaatcagtgatagcttgattaagccatcaattctacttcagtgtagatgcatttatgaatcactgaaatcaagagcataatgttgaatagtttataaaagagaatgcaaagcgagatcaacatgttactacccaagaaacaaggtttgttgcataatccttgtttccatgatctcaatcttgtgttagactatgaactttgtagtaaaaagcgatttcttgcatcatgccaaaatctcttgctcttgataggaatatattggttgggcagaactagtaaatcatgcatcgtgctgatacaaatggtacacaagatattttgagtgagtttctcagcaacaagccacagaaccagttgctcctagaagctaaaatgaactgagagctagtgctatgtaagaaaattgtcactaggcaacactgagaataacagaactgcagaagggatcaagcccaaagcagtcatttgcgaaactaaacctatccatgtttcactgattacagctacgtaccaaaactagtaattctgaccgtttaattcacactataaaccattgagcccactctaaacgagtgtaagaactaagaactcgtatactgatcctggattccccatgtatttacaacataccatatatataaaaagcaatactattactatataaaagtagataaagggaccgagttatggaagcagaaacgaaatccccaccgaaaaataccgaaaccccatgaaatcggaacgatcatactaatttgggaccattaatgactagtactactaaattgctctgctaaagccgtcagaatagtaattgaaggccacggttaagcagaatcgaaccttttcacctgacacgaaagccaccgcgtagcgcgtacaaatgttccagcataaaaataaaattattcagtaatccactcacatcaaagtcctggagcaactagcctccacaaggttccgccaacgccacaccgcacaaactgggggccgcaaccgcgaagaactaaccaagcaagcagaactagacaagtcggaccgcgcagaaaccaaattgagccgcgagccatggaatcgcacgggagctaagcgcgggaagcatcccgaaacgccatcaattaggcggatcggtgcgaagcgactcaccgtgatcagcggcagctcgatgcacgcagcattg

SEQ ID NO: 30926 - DNA, 208 bp, Zea Mays
tctgctggtgcgcagggaaaaagacgcaggggaaagccggctggaggccgacgcggagagcgcgggccgagcaccatgggcagttgagggagctcgggcgtcggttggggagaggagacgaggctgcatgctagtggaagaagtggctggagcagggaggaggatggcgttcaaggagctaggtgccatggagagagggaagagatcc

SEQ ID NO: 30927 - DNA, 258 bp, Zea Mays
tttggtgagttcatgcacattattccccacaacttgttgagctatgaacatatgtgagctcactcttgctgtctcacacccccccacaggtcaagaacaggtaccacaggatgaggcgcgtggaggatactgtgacgagttcgtgagaggtctaggacgtcgtctccctatcaactttgagttcctggaccgttgtcttcttataatgtatttatttatttattttgtatataactactgttatttagtaaagatgtg

SEQ ID NO: 30928 - DNA, 2646 bp, Zea Mays
tctactaaactcgttctcgaatatttgttgtaggctaatttatttttgaattaaaacacgtcaaataaaaaagaacggaggactaatttatattctgacagagattagtacagaaccaattatctctctaatagaaacccagtagaatcactcaatcagagaatcaaatatcatcaataatcacagaggaacgaagctcttcgaaacgggactttgccctctttctttgtgcttcacatcgcactctgatcaaagatacggcctggtccaaaagagtacacacttcctgctggcgcacccatgatgagggctgagctgaggccggagaggcggagacccatactgttccgtgctcaaccgattacggcccatcaaactacttccttcctctggtccaccagaaacgcacacgtcgcataccagaccagacctcaccttccccacccggacgccaccaccgcctgcgccctgctggctgccgcgatgctgccgtactccggtgaccaccagcgctctccgccgccgcagccaccgccacgagcggcgttctcctcctccctctccccatccgccgcgcccttccccgccgctgatccggtgggcccgggcccaggccccggccgtgatctgcccaccgccccgtccgtctacacggcgggcggggactggggcgccctgtcgtggatggagcctcccgcgagctacatggcccccgccgccacgccgccgggttataaagcggtggagaaagaagaaagcactcacaagagaggtgaagacccttctcaatgttatccaggtgttgaggggaatatgctgaatatgtcttccgaatccagctctagcaatcaggcaatatttctgaaactaatgcacaatctatcagtagtgcttctatcgacctgcaagggtggttcttcattacaggaagatgaagaggaacttctccaatcagtgattcaaaatcttacagctgccagttccaaaagaagcaaggttgaacaaaaaaatgatgatggattgagtaactccagccaaatgaaattcaaagatattaattatgtgaggaaacacttttggaggtcaatgcatgaagactcagaacaggagaatgctgattcagaatttaaggccactgtttcacaggttcttactaatcaccaggaggataaggtgctcgacaacactgaagttcctcaggcatcaatctatagaaacttgtggattgaagcagaagcttcagcttgtaaactcaaatatgagcttcaacatgctctcctgaagctcgagacagcaaaaggcctcaacgacacaataaaagtaacaaaccacagaaccatgggaaaggaaccgtttcatgcgctgcggcctttcagggccacggaggagattctcgtgacaagcaatctcctgttgtaagtaggagcattttcaatggtgttgatgctgatgtgtttgcccgatttgaagttttgcagtcccgtattgataatataaactccttgagtgagattgactgtggggagcagaaagaagcaagcaagagaccatatgcagtcgaagatactgttatggcgagactgaaagttttgaagtctcgtcctgacaatataacctctttgagtcaaggaagcactaaacaccagctagatggaagcacaaacagtgcagataatgttgatgacactgttattgctaggctgggaattttggagtcccatcctaataatgaagccctattgggacaggaaagcagcaagcgacaactggatgcgagaacaaatagagaagatgggattgatgctgctgttatggctaggctgagaattttgaagtctcgacctgataatgaaacctcaatgggcgatgccaacaaggagcagcaagacgcatgtggtgaacaattaaatggggatgaccttggtattgtgtccaatggagccattagcaacaccctgagtgagaagtgctctaagtttacgcactctgatgatcatttaggagaaaaaaactcagtaggtgtcccggacacatttggtgatggaaacagtgctagggagaaaaaggaggttggtggttcagcagatgttgctacccccatgaggtgcaaaggtacatctgatggagtgagcgtcggaagcgcagtacatggtgaagataatcttggtgaaaaccatgtgtggcttcaaactgctggggactctcatgtttgcacagaagggtctcaggaagcgcacccaatctcctctccagttgaccagtatggtggttcacctacagagtgggagcacgtgctgaaggagaatttcttccatccaggcaaattggcgaattctgacccataaactggaaagcttttgtttcagctcatgttgcctcaaaatgctgatgcttcttgtaaatatatgatacgatattatacatcccctcccccgaacctttgtctctatgttcaataatctgcatatctggtgatcaaggaaacgcactgtgcccccgatggtgctatatggaactagtctggtttgtctgcttgggtctatcatgccatagtctatctgtaaatggcacatgtatgttctggaccgagagtgaattattgtatatatttacttccagcaaatttggatattgtggactgtgcag

SEQ ID NO: 30929 - DNA, 3102 bp, Zea Mays
gcgctagggttactcgcgcacgctccatccgtcaaccacaagagccccacgcgctggccttgcctctgcccctcgccctcgcctcgcctccaggatcttgtcctcccccatctcctcgggccaaggaatcgttctcatccggcgacctacctccgttacgtctcaggtcttgttctgtatcacaagcaaagcaaaggatcggaggctactccattcggcagcaagctgactctgaagtctgaacgttggagtagaacaaggtgcttgttcaaaattgttagttgcatggagatgggaatgactcctgaagtaatgtatggacaaaatgttttcgttcctgctactgcaaatccctaccaatatggctatacagaagttggatcaccaatggaatggtatagtcacccgaactcttcaggatatgctagccaagatattttctattcggctgaaggcatgcaatgcgtatactatgcagccccagacaatggatctatgcatcctacctacattccttatccttcagatccttctttcgtacccgatggctcatttatgcctcaggagtatgttgctgaccctgctaactccacatgccaaataggcccgtcatcctattacattccagctgttcttccttatgcacaagatagtgtcccgggaagcgcaaccacacctctttactcctccaatgttgcatttcttcctggcataccaggttatgctgcaacatctgcaaatgcagcatttcctttaattgctcccgtcaccacaaaaagtgacatcgttgtgcatccacctgtacagtctactattgtacctttgaagcagttgcaggaccatgcaaaaccgccaaaagttcaactgcacaattcggttccacagaagcaagagttgccagatagattgtatttgtgattaattcttacatataggagggattattgacttccttggaccactataagattctcgtcttttcgggtatcagcacatttgtctggaaacaattgccttggatgtgctgctggatctgatcttcataagtgggctgccgccgagaaattccagccatcttcaaagtcaagtggtcatctaaatggtactggccaaaaggtgcatagcttagttgattctgagaaaccaagcaatcagagctttgccatgattgtgaaatctcacacattaaggctccctgtcggtaatccggatgggacaatcattataagaaccgaccagtacaacagagatgatctccgagttgactatatgtatgcaaagttctttgttatcaagtcaattggtgaggcagatgtgcacaaatcgataaagtatggtgtatggtcaagttcctccaatggaaacatcaagctagatagcgcattcagggatgctgacaggatatcaaggaggcattctactaagtgtccagtattcttgttcttctctgtgaatgggagtgggcacttctgtggcatggctgagatggttggtcctgttgattttcacaaggacatggacttctggtgtcaggataaatggaccggctgctttcctgtgagatggcacattgttaaagatataccgaatggttttttgcagcatatcacactgcagaataatgaaaacaagcctgtgacgcacagcagagatacacaggaaataccatacctccctggaatatctgtgatcaagatcttcaaagacatcaaagtgagggactgcctgtttgatgattttatgagatatgaggcagaagaggcgcaaatgaagccgcacagaagatgcaagctgagttacgatgctccagattttgtacctgtctcccagcgcactgagcagacgaagtccagcagtgtgctggtagacagaacatctgagatacaaaatgtgtctgagaagccgcatgatgctaaggtgatcaatcctcaggagccgcgtgcctctgataagcaggcgagtgaggctgagaaagagaatgaactacaggaaagtcattgcagcggcagtcagaaccaagaggatgcagcgaaaactgcaaccaaccatccaccaggtccaagcttgaaggcggcaggtgcggatgggaaacagcagtactggaagaaggtcgaaaatccaaagcagcatgcagacagcggtgctgcccagggctcactgaaagcacctgaaaagcggctaaatggagtcagcggctctgcgagcacagttccagttccagagggtggcgagcagcagagggtcactgccaaacttgggtctctcaagataagctccaaggcagtggaggctgaccgtaagactagcacagctggtatggagaagcagctaaatggagtcagtggctctgggagcgcagttcctgagggtggcgaggagcagaaggtcaaaatcagttccaaggtagtggaggctgaccggaagacgagcaaagctggtgtggtgacaatcggctcgatgccggtccgggttgacagttatgccgtctagtggccagcgggggggagcttttgtttttatcttttttgcccttctggggtaatctttggtgccccggcttttcatcttcctttctggtagaagaatgcttgtcctggttggtggttctttcctagcttctatatggtatcaaaaaaagaaaaaaaaaagagacgacgaatagttagattcttttttcgttgggggtgaaaagctagttttgcaggcaggcagcattctcatggtggtggtttcgtttgtggaaaagagagaagatactataatatgtgttcgttttcatgacattctattaagaaagaaaaagggaggagattagtaacctgggctcgggtgtgaattcttgcttgttctatctccccttgttttctttgtgttgtggcaggatcaggatcttatatgagcgttgctacaaaaggtggcttattttataatattattaaactctgatgtggcgtgcaagagagcattgttcaaagtaggatcggagtacgagtagtgtggtgttttggacattcagtagtgaattcggtcgtcctctctgaaggctgaaggagtgctatacttttcctatattattaattattaattcttgtttttgtaata

SEQ ID NO: 30930 - DNA, 3196 bp, Zea Mays
aacggacggacgccacgccctgcccgccggggctgcttgccactcctctctcttcctcatccatcctcgccccggccccgcccccagaaccaaaccagcctccctccccagcagctcacgagagagcgcaagcaagtattactgcgcaccgcctcgcccgcgggcgtcagcgtgaagctgccgcacagctaccccgcgaggcatggggatggacgccggcggcgggaagctgccgtacagctaccccgcccaccaggacggcaagctggtgaagagcttcagccgcgtggagccccgcaagttcggcctcgccctcgtcgcgggcttcctgctcgtcacctgcgcctacttctccaccgccaagttcgacgccatccacgtcgccatgacagtcagccccgtctccggcaatgcggctgggatcggcccgctagtgggcgccgccaacgccgacacctccgactccaagcagcgattagatttgggcaagcaagacccggacgacgcgctgtccaggtccgaggaggaggaggggagcagggccgacgaggtgctggagaaggacgacggcaaggcatcctcgtcgtcggggacaggtacaccgcgcttccgtcaccggcaaggcatcgcctgttgttttttcgagattgagtggccgtccgtgcttgcccttcccttccatggaggcgtcaagctggccgccgcggccggactcgtgtgcccccgcccgccgtactcccaacgtcctgcaccgctgcacgcaaagccagccccaaaaatcagataaaaggaccggccggttttttcctccgcttccctttcccccactctataatcaatcgctttttttttcttttccctgtcatcaccagattccggcagcaatgcgccgctggaggacacgaggagagacgagacctttgtgggggacagcggtggtgcatcttccgcggcgggcgccaggagtgaggcggttcctgccaggcacgagcacgacgatgacgcccccgctgccgccctgcttcctcccgtgacgtcagagggagccgcgaacagcacgcaaggatcaggagttcttgaggacgaggagctgcaggtgcaggacgctgtcgccaatccttccaagaggagcaacgattcagccgccacgcgcagcagcagcagtggccgctcgccctctgtggttcactctgatcctgccatcctccctgctccctcgcagcagattgctcctgctgctcctcaagaggcagataaggctcttgctgttcagcatattccagcgatacctgaggttaagcaatcaggtatcctccctgatccttctcctcttttgtggtaaaaaggatgttttctctcctgtcaaattacggtgccggtaagcagctagtcaatgtgagggacgccgaaaagaaaagaaaagaaaaaaccgtgcttgcaattctacagcgtctcaggcatgtcgttgcaaaatgcactttggtcagcctacagtcgtagtagcgttttttttctttgcagccttctatctcaacgaagggcccgatgctgttgctgctattggaccactgcttttgatcacactctgtcctatgtgggctgtggctctgtgtccgtgctcatgttcttcgcctttcttgagatgagagcaacgtgctactactaggcagcatcatcccgttccaatagctgatggattgctccatctctaggcatctcgtccgatcatactatacttttccgtagggtccggtggacggtggtctaccatgaaccttgttcaccctccgtcaagctctttttcctgctattgaaaacacacgcacgcacgcactctctcttttggagctgccttttcttgtccagccggtcattccatgattagctgacaagcaacgtgctaaactgaaattttttttaatggtcgcaagattcggagacgccggcgcgggagtggaagccgctgtgcgacatcacctcgaaccgccgcatcgactggtgcgagctcgacggcgacgtccgcgtgctgggcgccaacgcgagcgtcacgctggtggcgccgcccggcggggcggacggccgcaccttccgcgcggagtcgtggcgcatcaagccgtacccgcgcaaggcggacccgaacgcgatgcgcgtcgtccgcgtgctgacggtgcggtcggtgcccggcgaggcgcccgcgtgcacggaccggcacggcgtcccggcgctggtgttctcggaccgcgggtacacggggaactacttccacgcgttcacggacgtgatcctgccgctgttcctgacggcgcggcagtacgccggcgaggtgcggctgctgatcgcgcgcgcgcggacgcggcggttcgtgaacgcggaggagatcgtgcgcggcgcggagaagctcgggttcgaggtggtggtgtcggaggggacgcacgaggtggcgcccttcgcggagctggccaacagctgcgacgccatcatgggcgtgcacggcgccgggctgaccaacatggtgttcgtgccgacgggcggggtggtcatccaggtggtgccgctgggcgggctggagttcgtggcgggctacttccggggtccgtccagggacatggggctgcgctacctcgagtaccggatcacgccggaggagagcaccctgatcaaccagtacccgcgcgaccaccccatcttcacggaccccaacgggatcaagagcaagggctgggagtccctcaaggatgcctacctcgacaagcaggacgtgtcgttggacatgaagaggttccggcccacgctcaagaaggccatcgcgcacatcaggaaggccagggccaaggccaacgccggcggcggcggcaacaactaggcatcgccgtacatgtgctcattcatcctcctcttactctacttttgtttttcctcccctccttttcggattatggcagtacttgtatgtagcaagcagaaatcgatcaaatgtataatatggcagggaaagaagttagagcaaatcatatattctcttttccccccacttttcggtgagggtcaatggtggatggagagtatgatcaggactgagattctcctataaacattttagatttagtttctctcgaggaaaaaaaaaattcagatagcgaatagtacctacttagtacataatagtaattttttatacaaatttaataaaatatag

SEQ ID NO: 30931 - DNA, 2751 bp, Zea Mays
gcagacagacaggcagaggcaggcaggcaaggccaagagcccaagacggtcggggcggagcgcgagaggcaggcgacgcgaggagaggaggcggtgctgtggtggcctcacctgccctgccatgattataaaaaataacggagcgcgacgcgggtagaaaccggaaggcccgccgctgcccgccccttcttccttcccgtcccacacacgccgccgccgccgccgccgccgctcgcttcctccaccccccggtccgcgcggcgcgggctgcctgcgcgaccagggaggcagggcacgcggcaaccacgtggggaggcgacgacaccacaccaccctatgctctctgtcctcgcccgcaggattgcagcagcagtgaatttgggagcttgaagcgttcatccgagacatggaaaaagtgatctgccgggcatatctccttcaatgcaagcgattcttttcgaaagaaactcttgattggtgtgtcttagcccgtgggaacacccatctctcctctctggtgaactacacatagtggttatatgctcctctatgctccacaacaagcaggctgatgcgatattttcctgaagttattatattccagtctatgccagacatctacatcacatcaacttctgaaaagtttcttttcaggtagatgatgctcatataagggggggttaatatatttgccatcttcagcctacatctgttgctgccctaattagttgatttgtcttctgtgtactatctgaggcaagatattgatcagctagaacttggcaaacccttgcctttcgtgtctgttcatatttctcgtggcttggttattctgaagggtaaaacttgcacaaggcagctttgatattacaacaatggatagattcaagttgattaaggaagttggcgatgggacttttgggagtgtatggcgtgctatgaataaacagaatggcgaagttgttgctgttaagaaaatgaagaaaaaatattattcttttgaggaatgtatgagtctacgtgaagtaaagtctttgcggcgcatgaatcatcctaacattgtgaagctcaaagaggttatcagggaaaatgatatattatacttcataatggaatacatggagtgtaatctctatcaacttatgaaagaaagggtcaagcctttctccgagtctgaagtccgcaactggtgttttcagatatttcaggctcttgcatacatgcaccagaggggctactttcatcgtgacctcaaacctgagaatctgttggttagcaaaggtgtcataaagctagcagactttggtcttgcaagggaagtctcatcattgccaccatatacagaatatgtctcaactcgctggtatcgggcaccagaagtcttgctccagtcatctgcttatgattctgcagttgatatgtgggcaatgggtgccataatggctgagctgttgacactccatcctctctttcctggaaccagtgaaccagatgagattcacaagatatgcaatgtcatcggtagtccagatgagcaatcttggcctcaaggattgtctcttgcagaagcaatgaagtatcagttcccacagaccaaaggcagtcaattgtctgaggtgatgacaacagctagtagcgaggcaattgacctcatctcatcactatgctcatgggatcctagcaagagaccaaaggccacagaagtcctccagcataccttcttccagggttgtacatgtgttccgcttcctgtccgtcggaaagcttcatcgcttcctaaaacacctccatgtgttggatcaaagagaatttccgagaacagtgttgctagaagattctcgaccgggactctatctacgatgaaatctcatagcaatgcacctgcaaaatcaaacggtttatctaggactggtgtacaaagaaaacttcacttggatcgtcagccaccgcagaagagtacaaaaccgaccgagaacagcaataagctagctacaaatcgggtcccagcccggaacagcccagggaatcctgtacttaggcattcacgcagcttgcctgaaactggtcgacgagcagtacagaaggtctcatcaatcacagagaaactgtcgcaaatgtcggtgacctccagaacacgaagcgccgtgaagcctgccgccccgacgatgaaggccggacatggcaagtcagacttcctggggaagtctgacgatatccctccggcaaagaggctgacgagaaaattggtcagctaaacaagggtacgtagagtgaaaatccgatcatctgcaggagggtggagggatatggtgtatagtgtgcaggaaccagtgtgccgaagagaggctagctcatcctgagcgtttgcctgtcgatggtcgcgcggatttgccatcgccacagttttgctgcatcgagtcatcttaggaatggctttgcaaactcctttgtggagtgctagagcctgcttcgagccttaaccctcttcctggccttcgatctgccttttgcctgcgtcaactttgcccccatgttttaataaacatgatgtgtgctattaattttgtcttgttcatatcttgctgggatggacgtttcatgtttggtttgaatgtacaggtacagtgcacaggtgagaacaccgtaaaatgccaatttcacgtactgtatgcacatgagttgtcactctccaatatggataaagtattataccaagtggcgctagaaaataccaatgtggatgattggaaa

SEQ ID NO: 30932 - DNA, 1064 bp, Zea Mays
ggtcggaagctgcaggggaaatgcaccatgcagcgcggctcggccccagcccccagatccaggcacgcaaccgagccgcggcccccctgcgcccttgtcgtcgccgcaccgtccgtccccgcccgcgtcaatccgtcgtcgtcgtcgtctcctcgtcaccccgcgagcttttttcaccgctgccctgccctgcccccgcgcccgttgacgtttccggcccccaattcgaaagcctcgcgctccccgttgctcccttccttgcctaggcggcaacgccctcgtgctttataacccagcggcccctcccgcgtgaggcaaccgagacgggaggagaccagaccagcagcagcccatccgaaccccgcctcctcctcctcctcccgggttcgcgtgaggctgtgtgctgctgggaggcggcgccggcgccggcgccatggaggcggagaagaagccgccggcggtgtccgacgtgggcgcgtgggcgatgaacgtcgtcagctccgtcagcctcatcatggccaacaagcagctcatgtcctcctccggctacgccttcgccttcgccaccacgctcaccgggttccacttcaccgtcacggcgctcgtcgggtggatctccaacgccaccggctactccgtctccaagcacgtcccgctctgggagctcgtctggttctcgctcgtcgccaacacctccatcaccgggatgaacctcagcctcatgctcaactccgtcggattctaccagatctccaaactgagcatgattccggtggtctgcctcatggaatgggtgctcaacagcaagcactacaccactaaggtcatatccgcagtcatcgtcgtggccgccggtgtcgggatttgtactgtcacggatgtcgaggtcaatgccaaggggttcatctgcgcttgcgtggcagtgttctgcacgtcgcttcaacagatccaaggcactgttattggaagcccgaactttgcaactcggctctgaactacagtaatacagatcaatggtaaaaaggtccactatactctgaagggatgagctgatgatgtgtttc

SEQ ID NO: 30933 - DNA, 3559 bp, Zea Mays
cccgaattccccaagccaccatgcccgactccgctgatcccctccccacgcaaccctcgccggatcccgacatgccgccgcggaagcctctcgctggcggcaagctcaagaagccgctcactgacaagcagcgcgctgccgcggagcagcgcctgtcccacctccgcgcccacctcatcctgcgctccctcgactcccccgctggcggggcccgtgccctaccgccgccgcaggaggcggcgctcgatgccctcggcctgctcaatttcttccgcctcgacctgcaatctgacaccccgcgccccgacctcatcgctccgctcgtcgcctactacgacccggtctgcaagcgcagcttcgtccgcggcgtccgtgtcagcgtctcgcgccaccacatcacccgcgcgctctgcctaccctcgaagcccgcctccgcagcgccggccccagcagacgtcgatcccgcagcggtggtccctgccgttatgcagctcctgcaggattacgtcctgctcccgtttcaggggggcgacatgtgcatactgccgcaggaggtggccgccgcagagcagatggtcagggagggggcggcgcatagggttgattggggagggctgatctggggcctcgtcgagaaggagatgctcgagctgcccaagagggaagacggggtgtgctactatgggccgcacctgcagaggctcatttattccgaaaagccacatctgttggagctggtggaggaagggcctgttccggaggcgtccgctgatgtggagatggaggatgaggatggtgatgtggatttgaaaagcaagaacttggtggaactggagccgggggatggggatggagaagcgggtaacgatgtcagaagcgagagcttgaaggattcagaattggggaatgctggtgcaaggaatgatggtttggacaagttggagttgggggatgctgttacaaggaacaaggtcatggaggagttgggtttaagggatgtagatgctaggaacaacagtatagaggaactagaggtggtcgaggaagatgcaaggagcaagagcttgaatgaatgtgaggctgtggatgtggatctggatgctatggacatcaatataaatgacagagagacgatcaatggagatacaaggagcaagagtttgaacgaatctgaggctgtggatctggatccagatgccatggaaaacaatatagatgaaatggagacggtcaatgaagatgcaaggactaagagcttggatgaatttgaggctgtggatgccataaacaacaatatagttgaattggatgcggtcaatgaagatgcgaggtgcaaaagcttgaatgatgaatcagagctggttgaagaggaatttaagagcccaagctttgatgacatgaacaccgtggatgagcacgtcaatggcacagacacggatggattatgtttgggatttgtggaagttgaagcggtgcctgctgtacatgaggcaatgcctgataataatgaagaaacgacagaggaagcaccagcagggggtgctgatgtggcaggcagtgataatgtggcagtgcctacagatgtggattgtgaagaacactatgttgaggcagtagttgtaacacaagaggtagtggctgttgcagaggagttgggggatgaggaggccaagagggatgaagagaaggatgtgatgggattgagcttgggttttaattctaccaatggttatggtgctatggatgtggaaaaggaaaccaatgttgaaagtttggatgaggacgagagtgacagtggcaatgaagaggcagaagagtcagaggatggtgcatttgacgttaatgatggagaggacatgaattggagaattggggatgtcaacgggggtgagggaatgacacattccttacaacgctgtaacacatttgggggcatggagtttgagaacctgaataaaggagaggatgagatgagggatgagttaagatttgacgattttcctgcaagggcatctttggaaaggatgacatcatcaaacctcctccaagccatgaactcaattccctcatcatacaatgtatcagagaatgtgcatgatctgccctctggggatttcttggctatgggggctgatgcacataagagtggagtggacctgggaccagggagctcatatttatttgggaataatggtaagaggaatattgatgatattgatgggtacaatggcaatatgcaggtgcaagaggggtttcctcggtctaatcagcagaagaggatgcggcatagtaacagtagcaacatatcacctggatcaggctttttcaatgcaagcttttcggtgcctatacagaacttgatggttgaggcaagcaggctctatgagcagaatgagcaaaaacttcagagtttgcaatttgagaagcaacattggtctgacatgctgcagcagaaggaagccattatccaatccctaaactcagctcgttttgagcaacataataagtatcaagcggagcttagacgcttcgagcatgatctgaatgttatggctcagttggtcactacatacaaaaaagctttaaaacagacccgggcttcttttgatgagtacaggaagaagttcccttgcaatgttcctctttatggtgatgttgcttgtggcggtggtcttgttcttagtgtgagggagttggagaaaaggcggtgtgaggagcagcagcaaaatattgccatggtaaatggtatgattgaaagattccagtacaaatggctctcaaagtttgaagagtggggactttctgtcaattcactgtggagcagaatggaaggactctataaggagattgagcttctcaaggaaaacagaagagcaagatttgctaccccagctacagaggaatctaccctagctacagaaggatctactccagctacagaggaatgagctccctgacaatcagaggttcagttgtgatgtgaagatgactccctattactgccctaccctctgctggatgttttggtgtcaacgagcatacaagagcaattgtggctgcctggtggtggtacatactgtagtaagataaatagtttcgcttgtaactatggttgtttcctcatgtagggacgttttgattattagtgcttaatttaggtgcatttagggttccgtaatctatatcaaagtgtgcgtttcatatccttttttatgcactaacgacgtgctcatggcctcggaaagccatttaaagactgcatatgctagtggcaccactaatccatactgccttcagcttaactgctggtagtagcttctgcacctgactagtggcctagtgggcggatactgctaggccatgaacaagtttcaggtatcatacgcgatgcactagctgcatttggctctagtggtttgaacgctaatctctatattgggagagggagtttccagtagggtctctgattctaaatcttaattccatgtgtaactaaataatagaatttaggaaaattgattccaattatcaattctgtacacggatatctacatccaaa

SEQ ID NO: 30934 - DNA, 1681 bp, Zea Mays
gcccgcatctcgcaaccgtcccgcacgagcaaagagccctcgttcccctccccttccgctcgagttcgtcgccgtcgccctgccctcgtatctcctcccacgacaccggtgacaaccacaggccaccgtcctgatcctcatccgggtgatccccaggcaggcaggtcggcgaggagggcagcaagaccgagccgtgcgggggctcgggacgggaacgggacaggaccccaaaatctcagatccttcctgctcgcccgcccgtgcccgtcggcgcgtcgttcttgccgtccgcgccccacctccgccctctcctcctccaggggaatcagatatgccacaggctgcgcgatggtgttgtgggtcttcggctacggctccctcatctggaacctcggcttcgacttcgacgacaaaatcctcggcttcatcaagggctacaaccgcacctttaatctcgcttgtattgaccacagaggcacaacagagcatccggcgaggacctgcacgcttgaaaccgacggcgaggcgacgacgaggccatatgcgtcagcatggtacaagcctacaaggagaaagtttatccaaaaaacaaggtatgtttggttcatgctaatcctcacctccttcccttgctgccgtctcaggtaaataagatggaactttaaaagaaagttcagttgctatttatgcatcaattgcttaacctgtttgttttggtgacgagctactatcagtcgcgccataacttattgcatgttttctcatgtatcgctttaggaccggtattgctttaggatgtgatatggcatttgacaacgttttttaatttaattactgaaattcgaacgactggaatgcattttgttacgtttattacacaacattttttatttgtttgttgctgaaagtaacatcaattaggaaatgaaatttgtacttggtattcgcctctgtacagttgaactgctgcagcatgagccagaagttggttatgaactaccatataaggttcccttccagagtctcccatgctatatcgtgaattttcccaagcaaagcacctgccaggcgccaatatgccaccggggtagccattaaaatacttaaaatcaactccaaggctcatcgaacgttatccagtgcttcaccgtgtttctgaactccctaaagcagatgttgtcatgttggtcagtttggtgttggtttaatttctacgggtgtcgtatatcagagtttgactagcaactaatggtgcctatacatgtatttatggagcttcttctggtcatatgtgtagtggatctctcctcctgttgttcccttcaatcatgtccaaggtcaagaaccattcaggtcataaacccctacgacaggggccacgagggctcatcttcgccactgcccctactcccaccttctggataaaagaagtaggcgcaatgaggagtcgtgttcattcacaagctctaacagagaaagttggggcagatgttcatctttaggtgcagccagtgatgaattattctcaggcaataataatgataagcagatatgagcccttgggcctccagttcgggcaacaagcatatggcaaagagagtgagggggcatgatattgttttccaattccaaactgtgatgatgtgtagaggcaaaggatccttcagagttcatcactcat

SEQ ID NO: 30935 - DNA, 2335 bp, Zea Mays
cgcattaccgcacgtcccattgtcccaaccacccctaccggtgtgcgggcccatagccttgacgagcccacggtacagtgaccgctccagtaggccgccgcgccgccaacgtggccgggatgccagctcctggcgtgctgagctaaggtggtggatgaaagaacggacccctttcttggtagattgactagaccagccaccattgaccaatcccacaatttcttctctgatgtcacaaacaacttcaaagatttttcaactgtagtttcagagttgcatcaacaccttctggatgcaaatgtagaagttacttacacagaatacttagatctgatgaaagtggaagttgatcaacatcttaataagctctcggaggacataagggacctcaaaagctgtaacttggcccacaaatatgacacagatggttcatgctgtacagcatgccatgttgggaagctagctgagatagatgacaggttcaacagcttgaagtttctgctggctgtggtgttccgacaaattagagagatcctcacagtggtcaattcttcaattcatgatcttcagtgggagcatgagttacagtcagaagttaccggcatcattattggagactgtattagaggtcttcaggatgaactcgagaggaaactgtatgagcaaagttccatggtgaacagtctaagaaaaaactgccaggaaactgtggcgcagtttgcttccatacgtgaagagctgattgctatttctaatattctgttaccttctgaagaggaaccacaaatttccctctgtaggcatgaaagtttgggtaactggagtgacagatggaagttcagctttttcagaaagcgagcacaccaggatcactctttatcttccacgcaaaaccagaattctgcaacacagaaatctataagtcctagtgaagttatatcagaaagatccgacttccgacatctgaagggtatgactagacatgaaatgcttaactatttcagatctgagatcagtaaattaagaaggctgcatgagttggatttgcaagagaaaacagaagagctgtttaaattcaaacgagagaaatggtcattggctcttaagtatgatgtagaatttgagcctttaagaaggaaattccctgaggtcatttcaagatttgaccaaatcatgtccaatggaatggcagcagcagtacctacaatctgcagtaatagtgatgcattcgatgaaacgagcagattgagcagtataattgattcactataccgtgaaaaccagcatcttcattgtttgcttgcagagaagatgaagaatattcaggaattatcaagccaaatatctgattccaccaggaaaatgtcacttcaatattcattagaaaaacaaattttgagacaactcaacagcactcaagtagaatatgaggatctttttgttgaaagtactatcagagatgaaatttaccaaactgttgtgagaacattggttgatagtcataggaatgttttggaggataccacccaaactttccgtgcaaaagtgtcttcacttgaagccgcactctctgaaaaggacaaggcgttgtgtttatctgatgaggaaaatcaaatgctaaaggaaaagttgtcaacactagaaaaagagcattttatccaaaataatcagcaagatctcgagctaatcaagcaagaaagtgaggaaatggttctccgtgatattgagatggagccacaaagatcatgtgagatttctgatcgagatatacagtacgaagggctcatcaagctgaatcaggttttagaaattgcctcaaccacggcaaaagaaatagaaacaaaaaggttgaatctcagtgatatccaaggtaaaagagagcaagaaaaacagctagattgcatcctggtatctatcatggatttgtcaaaagaatttatggagactgaacatagagtgccaaaagatataaaaggaaatgaaaaaaagactgataatctgcatgatcaatgcaattatatgatacaacaggccatcgtattgacaaagaagggtctatggtataagcaaatgcttgacacaaaacgttctgagcttcgaaaagctgaatctgaggttgacattatgggagacaaggttaatgcactcttgagtcttgttcaaaagatatatgtaactcttgagcactactctcctgtttttcagcatcatcctgtggtatcagaagcagacaaaaaaaggacttgcaagatacaatctaagttggagcagcaagagcaagcagctgcgaccgtcgaggatcggagcgagtccaggcgcggctgttacctccgac

SEQ ID NO: 30936 - DNA, 2094 bp, Zea Mays
ctggataactgtttttcggttccttcatcgcgggcagggcgacgaggtcacagcggttcgtggtgcgtgcgaacgccaaagacattgcctttgaccagaaatccagggcagcgctgcaggccggcgtcgagaagctcgcaaacgccgtcggtgtcaccctcgggccacgagggaggaatgtggtgctcgatgagtacggaaaccctaaagttgtgaatgatggagtcactattgcccgtgctattgagctgtatgatccaatggaaaatgctggtgcagcattgattcgtgaggttgctagcaagaccaatgattcagctggtgatgggactacaactgcgtccgtccttgctcgtgaaatcatcaagctaggccttctgagtgtaacatctggtgcaaatcctgtatcactaaagaaaggaatagacaaaactgtgcagggcctaattcaggagcttgagaataagtctagaccagtcaagggtggtggtgatatcaaagctgttgcatctatctctgctggcaatgatgaatttatcggatccatgattgctgaagcaattgacaaagtggggcctgatggtgttctatcaattgaatcctcctcatcttttgagaccactgttgaagttgaagaaggaatggagattgaccgaggttatatttccccacaatttgtgacaaacctcgagaaatcaattgtggagtttgagaatgctaaggttcttattactgatcagaagatcacaagcataaaggaaattcttccaattttggagaagaccacacagctgagagcccctctgttcattattgctgaggacattactggtgaagctttggcaactcttgttgttaacaagcttcgaggaattctcaatgttgcagcgattaaggctccaagttttggtgagcggcggaaggctgtacttcaggacattgccatcgtcacaggtgctgagttcctagcaaaagatcttggtttgttggttgaaaatgctacagaggaacaacttggcacagcaaggaaagtcacgatacatcagactacaacaaccctcatagcagatgcagccagtaaagatgagatccaggcgaggattgcacaactgaagaaggagcttgctgagactgattcagtttatgatactgagaaattggccgagagaattgctaagcttgccggtggtgttgctgttatcaaggttggagctgcaactgagactgagcttgaggaccggcagctaagaattgaggatgcaaaaaatgccacttttgcagctatagaggagggcattgttccaggaggtggtgcggcatatgtgcacctatctacggttgtccctaagatcaaagaagcaattgaggaccctgatgagcggcttgcgctgatattattcaaaattagatggtatgaactgtatttgccagaggcattggtagcacctgcttcattgattgcacacaatgctggagtagagggtgaagtggttgtcgagaagatcaaggagagcgattgggaggtgggctacaatgcaatgactgacaagtacgagaacctgatggaggctggtgtgatcgaccctgccaaggtgaccaggtgtgcgctccagaatgcggcctcagtagctggaatggtcctaaccacgcaggccattgttgttgagaagccaaagccgaagcctcaagtggcagagccaccggagggagcccttaccgtttaaaacttaacgttcttgaggctgctgtccagacggttcagatctgttgagagggtagaactttggtttgagaattttggttcagatccactgggagttgtagagtaggattgctattttgcagacgaagagtaattttactctggtctgaacttatccgaattgaagacatttgcatcaccattttttaaaaataagctcatggcgatgctggattgtacgagcaagtacagtatgtttttagcctctcaatttttgcgtctgtctcagcttggtttttagtgttgcgtaatctcctttgactgcgtataggatcgttttacgtaagattgtgttaattgaatgattagtgccttcgttaaaccgattttcc

SEQ ID NO: 30937 - DNA, 3432 bp, Zea Mays
gagttgctcttactattttgaactctattatacaaataatacaatctctagtataaataatattctgtaagaccacttagaacaccacttacacgaactgctggaccggagatggcctaaacatagggtttagaccgttgccgtccctactcccgcctagccgaccccactcgtcccagtcccagtcccagtccgccgcctggttccttcttgctcttccctccactctctacagacgcagattgacaaggaagagagagagaggccgaggggaggaggcgtcgtcgtcttcttctgaatgcctgaacatagtatggctgccaaaatggctggagctgtccaagtgctcaaggatgacactgttaaacgcacacccatggcacgacctagtaacggccgtgaaggaaagcccattaggttgctgtcgaaccacttctcagtgaagcttagaggagttgatgctgttttctaccaatacagtgtctgcatcaaatctgaggatgataaggtggttgatagcaagggtattggccgaaaggtcatagataaactattgcaaacatactgttctgagcttgatgggaaggattttgcatatgatggagagaaatgtctatttactgtgggacctcttccacagaataactttgagttcactgttatcttggaggaaacatcttcaagggctgctggtggaagtccagtgcatgaaagccctactcaagctaacaaaaagcgagtcaagcgatcacatctggcaaaaaagttcagtgtagacataagttatgccgcaaagattcctcttcagtcggttgctttggctcttcgaggaagcgagtcagaacatggtcaagatgttctgagagtccttgacgttgttttaaggcaacagcaggctaagagaggttgtctacttgttagacagtcatttttcagtgatgatagtcgaaaccttgttgatttaactggtggagttagtggttgtcgtggactccactctagtttccgtactacaattggtggtctttcactaaatatggatgtttcaaccactatggttgtaactcctggaccagttattgattttctcgtcacaaatcaaaatgtaagagacatcagagatattgactggcccagggccaagaaaatgcttaaaaatctcagagttaaagctaagcacaacaacatggagttcaagattattggccttagtgatcaaccatgctctagacagatgttcccaatgaaagttcgaaatggaaacatcgaaattaaatctgttgatatcactgttcaggattattttaaatccaagcaagttgagctaacaatgccttatctgccatgtcttgatgtgggaaaaccaaaacgccctaattatctcccaattgagttatgccacatggtatcacttcaacgttatacaaaggcactgtcttctcaacaaagggcaatgttggttgaaaagtcacgacagaaacctcaagaaagaatgcgagttgttacagatgctgtaaaaagtaatatgtatgatgatgatccaatcttatcttcatgtggtattgaaattgagaaacaacttactcgtgttgacgctcgtgttctctctgcaccagcgctagttgtgggcaacagtgaagattgcatcccaaacaggggtaggtggaactacaataataagaggctattcgatccagtcaagattgagcgttgggccattgttaatttctctgctcgttgtgacatgagccgaatctcaagagaactgataaactgtggacgcagcaaaggcattttcattgaatgtcctcacagtttggtggatgaggacagccagtctaggagatgttcacctgtggaaagggttgaaaagatgtttgaaaaagtcaaagcaagccttcctggtcctccagagtttctcctttgtcttttaccagagaggaagaattgtgatatttacgggccatggaagaagaaaaatcttcatgaaatgggtattgtcactcaatgcattgctccaagtaataagatgaatgatcaatatttcaccaatgttcttctaaaaattaatgctaagcttggtggaatgaactccaaactggcactggaacatcgtcaaatgataccagttgtgactcaaataccaacattaattcttggcatggatgtttcacatggttctccaggtcgagcagatataccatcaattgctgcggttgttggatctagatgctggccattgatatcacggtacagagcatctgtgcgcacccagtctccaaaggtagagatgattgattctctatttaagccactggatgatgggaaggatgatggcataatgagggaacttctactagacttctaccaaaccagtcaacaaagaaagcctaagcagataatcatcttcagggatggtgttagcgagtctcagtttagccaagtactgaacgtagaacttaatcaaattataaaggcatatcagagtatgggacagggggaccttccgaagttcacagtgatcattgctcaaaagaatcaccacacaaaactcttccaagctgattcaccagagaacgttccacctgggactgttgtggactccggcatagttcatccaagacagtatgatttctacatgtgtgctcatgccggaccaattggtacttcaaggccaacccattaccatgtgttgcttgatgagattggcttctctgcagataatctccagaagctagttctttcactttcatatgtgtaccagaggagcaccactgcgatttctgtggtggcacctatctgttatgcccacctcgcagcagctcagatgggccagttcatgaaatttgaagagtttgcagatacgtcgtcagggagtgtcaattcatcatcgccaccatcaataccagaattgccacggctgcatgctgatgtctgcagttccatgttcttctgttgacgtgattttagtttgaccgttgtggggtagggccaattctttgtgaaaggaaccttaccttatatgttggcacacagcaggctaaccgtttttgtgaagaaaccatgtaggtcgttagttgtcgtatatcgcacgcgtgcatctttttggagcggttttcggctccccccacccacaggtggcggttccgttaggtacagtttccagattttaacgatgctaatacagtaaaagcagtttgtacattctacgcagattttgcagggatacgtggttagatgatctttttgttatgcccagaaatacgtgtgcattggggggttatgaaagtgagctaaatttctgtgcctcgcatggcatccaattgtactcggagattgtgtttgtgctcgatacgcttcctgccactgaaatgcgaaaatgaccacttccactcgctactcgtgacaccacaggaaaatccttgcatcgac

SEQ ID NO: 30938 - DNA, 2981 bp, Zea Mays
tgggccaaattcccatactgtaaaaaaaggtctgggagctcacagcaaacaacattattatggtatcagctattggaaatgatgggcctctatatggcacattaaacaacccagctgatcaaagcgatgttattggtgttggtggtattgattacaataaccatatagcttcattttcctctagaggcatgactacgtgggagcttcctcatggttatggtcgtgtgaaacctgatgttgttgcatacagtcgagatataattggatcaaagatcagcacaggctgtaagaccctttcaggcaccagtgtagcaagcccggtggttgctggtgtagtatgtttgcttgttagtgttatacctgaagacaagcggaaattgatcctcaaccctgctgctatgaaacaggcccttgtggagggtgcttctaaactttcaggaccaaacatgtatgaacaaggtgctggcaggcttgatctctggcagtcatatgaaatcttaaaaaattaccaaccacgtgcaagcatatttcctactatgcttgacttcaccgactgtccatatttctggcctttttgtcgtcaacctatgtatgctggagctatgccagtaatcttcaatgctacaatcctgaacgggatgggggtgattggttatgtaaaggatcaacctttatggcaaccttctgaggatattggcaatcttcttagtgttcacttcacctactcagatgtcatctggccctggacgggataccttgctctacatttgcaagttaaagatgagggttctcagttttcaggcataattagtggcaatgttactctgactatttataccccagcagctcatggagaaagcagcccacggagtagtacatgtattcttcacatgaaggtcaaggttgttccaacacctgttaggtcaaaaaggatactgtgggaccaatatcataatattaagtatccttcaggatatgttccaagggattcccttaatgttcataatgatatccttgactggcatggtgaccacttgcacacaaacttccacattctgttcaacatgctaagagatgcagagtactatattgagacacttggatcaccacttacttgctttgatgctagcaattatgggacattgcttatggttgatcttgaggacgaatactttgatgaagagattcagaaacttagggatgatgttatacacaagggacttggtattgctgtttttgctgagtggtaccatgttgatacaatggttaagatgacattctttgatgagaacacccggagttggtggactccaattactgggggtgcaaatattcctgcaattaatgaacttctggcaccatttggcattgctttgggggacaaaattcttactggtgacttctcaatcaatggtgagcagacccactatgcttctggaactgatatagtgcaatttcctgcgggaggtttcttgcatagcttccagctccaagaaaactcaaagacggtgcaagatcacataggaacactggatacagaaagcacccaggggaaaggcaagctctcctcaattcttggagtaatagaagcaggggaagggaggattgcagtgtatggtgattcaaattgtcttgacagtagtcacatggtaacaaactgctattggcttttgagaaaaatattggagttcactggaaacagagtgaaagataatgtccttttctcagaggcagcacagttaaagtttcctgtttttgagaatatccatcatccatcacgtagaacggatgtaaacttttcaacatactcaacagttgttggcaaggaattaatctgccaccaagattcccggtttgaggtttggggaacgaaaggctatggtgtccaaccaataggcacatcaagaaagcttccagagtaccagatgcatgaaagttctagttctcccaatgtaacaatacaaattgctggcagtagacaagataaagttgaaaggcttcaaagaaatctttcgataccaaatgctgctaaatttgatgataaaagagattattttggatttattggtcatgaggaggttgacataggaatgttaatggcaagccaatggatgataccttgcttcgctgccactgcttgccttatgttgtatcttagttgtagagtgcaacaaaaacgccgcagacgaaggaaggggtcggtggctagtgctaatcggctaacaagtatggtataattcgtcattcgcgcggtggtgctgaaaaggtttttttagcgtatctaagtttcaggcctccagccatgatggataaccaggaagcgccatctgcgcagcatgacagaattttagtagccagaaatccctggtagtgaagacacattttaactcggcaactagaggctgaacttgagagaaagctggctcgtcacttctgtggtcacatggaaagcagcttgtcttcccagattcagccattcgtggcatctactgctgttgcttgtagtcgctcacaattttgttcttcgccacacgtagttgtagccacaaaaatcgctgctaagggctagtttgatgaccagagatcacgagaggatccataaatagcaatgggattcctctgacatggatctcctcgtcatccctggccaccaaattagcccttagatcatggagatcggaagggattgagagcaaaattagttcatttctcatcaatctcttccaatctctcccaatcttccgtgatcccctttgtcactaaatcaaccctaagagccaatatctagggtagaagctagagctagtcatttgtcatctccttggaatatgtgaaggagatttgagcttctctgtagatccatgagcaataaggggcagggggactcggcatgagcttggcaggtacaaaggaggcttaggcttattgggaactttgtaaagtaaattttgtattgttaatttaaaaaaaagaaccaggcc

SEQ ID NO: 30939 - DNA, 1186 bp, Zea Mays
ccaattcatagaccgggtccacagatagaagaatccctctccccatattccttttctctgcgccggcaccgccgtctcgtctggtctgctcttccattccgttcgcctttgaaaactacccacaccacaaagaaatcgaagaggggaacagaggagagagaagggagatggcggaggcgacggcgtacgaggagcagcgccggaggcaggtggaggcgaacaagcggaagctggaggagcttcagctccactacctctccgccgccgtcagagaggccgcagccgccgccaagccctcgccggtcaagaagcggaaggcgcgggtgccgcttgacgccgccgactccgtgatggagccactacggcggtccggccggctcgccaacctccccgataagtccgtgcaccgcgaggaggttccaactttttggagaaagattaggaggacgtatggatcagtgagaaaagatctggaaaaccgggtgtacgcgaccgacgaggcgaggagctacgccatctgtaaggcggaggaagtggagcaagagctggactccagcttccccgtcttcatcaaacccatgacccagtcccatgtcaccggaggcttctggctgggcctcccaaatcatttctgccggaagtacctgcccaagcgtgacgagacgatcaccctgctggatgaggatgacaacgagtcctacacgctatacctcgcattgaagcgaggcctcagcgctggatggagagggttcgctatccagcacaagctggttgatggagattgcttggtcttccagctgactgagagaacaaagttcaagtttatggaggtgggctgcattggacaagcttgcatctggaaattgctgggtgtcttgaaccttttgggttacagagttatctcatgtacaaaatgtttacacagcccagtagctaccaattgctgatttgtgtacttcttgggcttaccacttgcacggttcagaaacctgcactatgtaagaggatgttgatggcaattgacctcattttgtaaatgatcctcgtttatcttggattcatttttagtgttcagtttggcagttgaccaccattgttggctttgtgtggtgttaatctacaaaaatgcgatcttgtgaattgcaccgggctagttatttgtgaggtgagagggccagggcatggc

SEQ ID NO: 30940 - DNA, 2697 bp, Zea Mays
ttcctgtaaaaattctgcttgtccaaaccttttgtgttttggtttatttattttggactgaacatttatttgtttaatatgaaatcattgaaatgatctacatactttagtactcttgcttttcagggagtttgcattggtttgagtgaggtcatgggcagtgcaggaaaacaccagctattaagttttatggatgaacttattcctaccattcgtactgctctatgtgacagcacccaagaggtccgtgaatctgctgggttagcgtttagtactctgtacaagagtgctggactgcaagccattgatgagattgtccccacattgctacgagctttggaagatgatgatacatctgcaacagctcttgacggtctaaagcagattttaagtgtcagaacagcagctgttttgccccatatattgcccaaattagtccagcctcccctctcttcattcaatgcacatgcattaggtgctctagcagaggttgctgggccaggtttgaattcacatatcggaactgttctcccagcattgattcttgctatggatgatgaagatgcggatgtacaaaactcagccaggaaagctgctgaaactgttctgttggttattgatgaggaaggagtggaaactttgatacctgagcttctaagagggatcaatgacagtcaggcatcaatgaggcggggttcagcctatctaattggtttcctctttaaaaacactaaattatatttggctgatgaggcttctgatatgatgtcaaccctaataattttgttgagtgatacagacaaggctactgtatcggctgctttagaagcattttcaagagttgttgcatctgttccaaaggaacagctcccgacgcatataaaactagtgcgcgatgctgtctctacagccagagataaagagcgtagaaggcgaaagggtgtgcctattcttgtgcctggcttatgtcttcctaaagcactgcagccttttcttcctatatatcagcagggtttaattagtgggtcggccgagacaaaagaacaggcagctgaaggtctaggagagttaattgacgtaacaagtgagaagactcttaaggaagttgtagtgccaattacagggtctgtccgggcgagggctgcagctgctctgggaaagcttagtgctctcagcacacgggtggatcctttagttagcgatcttctgtccatgttgcagtcaggagatgaatctgtcaaagaaagtgtgctttctgcgcttaaaggtgttatcaaacatgctggtaaaagtgtcagctctgcaataaggtcacgtggatgtgctcttcttgaagatctgctgcaggctgaagctgatgatgtccgcagttgtgctgcaaaagtgattggcacattgtctcagtacatggaggagacagagatttcagatttggtgcaaatcctattgaacatgagcacttcatcagactggtgtaccagacatggtgctttgttatcgttctcatacatatcaatgcattctccatcaaaattgtgtcatttggcatcctttccatctctggtcgatcttttgaaaggttctctcaaagacgacaagttccctgttcgtgaagttgctacaagaactctgggaaagatactctgttttgagctacagccagaagctggcaccttgcaacttgttcagctgcttatcttggccttgcgtgatgattcaagtgaagttaggagaagatctttgtcgtgtatcaaagctgctgcaaagacaaatcattcagctcttgctacacatcactctatattgggcccggcaattgctgaagctttgaaggactctagcatgcctgtacgtctagctgcggaacgctgcgcccttcatgttttccagttaacgaaagggccagataatgttacagcagcacaaaagtacctcgggatgactggcttggaagtgaagaaaatcgcaaagcttgacgtggacagtgatggtagtgagagcagcgatgatgacaagaggacatagactctactcaacagcaatcttttttcggttcagttgttatgatctttacatatagttagctacattgatagcggaatgtggggtcattttttctgtctggcccattttgtgtacatcctttttgacaacaaacaggtaaaagtgacaacgtttgcaaatcgacaaacaatggtgagttattcaatctaagaagtctgtctacccagtttttcccagatagttcggacccggaacttatattcacctcaatttgaatggaccaatttccaggacacaagttgtattgcaaccaaggactgattcgttagtttgagcacagcacaaccacccagttcaacgataacgcatgtcaatgtaagccacgcataccatatagtatcatatcgtcgagtattgttcgtaccacatcttcctcccagttgatctccttgggcaaggtaggcccttccctggacagctcgttgggcatcttgttgagcatgctctctgctctgtacctgaacgctggagtccacgaacagactgctctgagcggcgtcaatgtggataggaatgtaatcggacgtatattactggttccatgtttgttttcatattttctcattggatattaatgcaaatattatcgagttgggcatcggatattaatgcaaatattatcgagttgggatt

SEQ ID NO: 30941 - DNA, 7471 bp, Zea Mays
ccgcgctcgcgctcgcgcccgcgccacgacgcgagagcgcgcgaggcgtggagccctaaatcccggaagcttccgaggccgctcgccgggggcgggagagggagctcgccgccggtgacggagccctcgccgccgtagatctcccgatctgagacgccgcttctcaattccctacaggtttttcggtgccggcgacggagatgactgtggagagccccggggagctaggcttctgaagcgcaccgtggggcacagcttggcggacgacggcccccgacagccaactaggttttccatgggagatgggggtgtcgcgtgcgccgtccgcgcagtcgagggcttccatgccggcgccctcgtgaggagaggaggagcgggagaagcgatgccggataagggggagaaggctcatggacaccaccaccagcagcagcactggaagaaccagcagtcagcgtcagctactgacctggaggagggggagctgctcagtggggaggcggagaccaatgggttgcctgagaggagcatgccacctaagaagtggaggaaggtgctggcagcctccgcagctgctgtggaggtggagcctggggagattgtgagtacgaagcaagcagtgccattgaagaaagcaaggagaaatggggaggttgacaaggtagagctgctgccggagaggcagaggaaggtaaaatcttctgggaagagcaccaggaagtctatcaaggatgacatggagccaggggagattgcaccgccagaaaaaaggcgagatgccaagtcccaacgggctgatgataacagcaggaggccaagttcatctgcccagaaaagctccttgcgggattctgatgaagagcctggtgaaattaagccagagagcagcaccagtggcagtctaaggaagaaccagccaacagagccccacagcattaaccacaagcaccacactgacacctctgaccagtcaggatcaaaaagtcataggaagggtccgaagggagaagggaagagatctgctgccaggcatttgtctgggagaaaccgtgagatatcatcaccaacacgggatcggcgtgatcggcacgagaggagcccaggcatcttgggtcgttttcctcatgagcgctctcgtcatgacaggtatgacaggagcccgagccgcttagagcgttccccacatcgagagcgtgctcgccactacgaaagcagagaccacagcccatatgtttcacctcgacatagagctcgtcagccccatttcagggataacacgccaagtcgtgttgataatttccctcgtgggagagtccagcgtgaggatgtcagagaccgtagcccatttcttcacgacagatcgccttctgaacgttttcggcctactgatactcatgaagcaagcaagaagagcagaagtggcaacaactcagaaaagtcacagcacaaaagcaaatcagcgaagcaatcttcaaagaccaagagtggtagcaatgagaagaatgagaaaatctccaatgaaaagcccactgaaagcagtaagtacactgaactgccaccgccacctccactaccgctgccaccaccgccgcctccaccacctccacctccacctctgccacctgctgtaccgcctcccctgcctccaccaccagaacctgagccaactggagttctagccgaagatatgatagaagacatggatatctgtgacaccccacctcacactagtgcagcacctgaacccacggatccaatttatgatatagggaggtggttttaccttgatcacttcggtatcgagcaaggaccttccaagcttgctgtattgaagaagctggtggaagatggatatcttctttctgaccatttgataaaacatgctgatagcaaccgatgggtgactgtagagaatgcagcttcaccactggtgccatctgatttcccctctttttattcggacacttcaacacagatggttaacccaccagaagcaccaggaaatttgctcgatgaagctctagaggaggcttctaacttggcatcaggttctgaggataaacaaatggtggaagcttctgcagaagatagtgaagaattctatattaatgatagggttgaagcactgatggatggatcaattttggtgcatggccaggagctcgagatcattggagagcttttaggtgcagattttcagcctgctgattggcaaagattgagtcaccctgaagattttactaggttccatgtgcacatcgaaggagacgatgaaatcattggaggcacagaattcttagaaaatagaacaacagatgcttatggccttgtttctgtggacaacttccatcattatgtcgagtctagcgaatggttttctgggagatggtcttgcaaaggtggtgactggaggagaaatgacgaattgggccaagatactccattcaggaaaaaacttgttctcaatgaagggtatcctctatgtcagataccaaaaggtagctatgaggatccacgccggccctgcaaggatgagttgtactaccctgtacgtggtaaaaagcatgacttgccattgtgggcattctcatcgacagaagaagatattgacggtgttaatgacaccactaaaaacactgttgtgcctgggaggccaggtcagaccagacagcctcctagcgaagtgaaggtgatgcttcaagtggttagtataaattatcatgttattaaagaccaatcatctgtcgaaccccgtacaaaacccagaggaactgatcgaccaccgtcgagatcttcacgctcccattcaattggggctgagagaagttctatccatgatggttcgtcgcatttcaggaagcaccatgaccatgattcacaaagttttcacaagtccaagtctgttccaaacattccgaaggaccatgtatgcactgttgatgagctgtcagttaatcggggtgactggtactaccttgatggcactgggcatgatcaaggcccattttcttattccgaattgcaagaattagttaaaaaggacactatcattgaacaaagtagcgtgttccgtaagatcgataacacatggtttccagttcttaaggatttaaaacctggaagctctgttcccagtgcagcaccaagctcaaacttaattgctgcttttacgcacccagaccaatataattttggtgtgaaccaaggatcaagtagcttccatgagttacacccccagttcgcgggttatacacgtggcaaattacatgaactagtcatgaaatatttcaagagcagggaacttactttagctataaatgaggtcttggatccatggatttcagcaaagcaaccaaaaaaagagtttgaagcatacttttctcacaattcagcatctaggaatttcctgccagaagatggtgggtctgcaaaaagggcaagattgctacctgaccagagtgacgaaaatattcatttgtcagaagacattattgctagtcggaaggaggacatctgttttgaagagttatgtgatggagcatcgtctgttgataatgattctgtgaatcccagagcaggaaatgcaagctggggtctactaaatgaccatctgttagcaagaatctttcattttatgagggcagatttgaaatcacttatttcttctgcagctacctgtaagagctggaatgctgctgcgaagtattacagaaacatgtgtagattcattgatctgtcttctgttggtcctctttgcactgattcagtgttttgtgatattatggctggctttgagaagcaaaatattaggactcttattttagctggttgttcgaaccttagttcacatgcccttggcagagtacttgaacaccttccacaaatatcttatgttcatattcaaggttgcagtcatctaggggatctgaaaaataaatttcagcatgtaaaatggatcaggagctcattgaatccagaggggtcatatcggaaaatgaaaaccttgaagcagataggtgatgggaacaactatgcatccaaagttgcaaggaacttcgaccagctagatgattctgatgagcttgatggttattttgctgatatttcaaaaatcgagggtgctagccttttttcatttggacaaggtttctataaacgatcgaaattgcttgatgctagaaagtcctccgcggttttgtcgagggatgcagaaatgaggcgtttgatgcagagacaggcagagaacagttacaggaagatggaagagtttgtcataaacaggctgagagaaattatgaggtgtaacagatttgattttttcattccaaaggtttccaagatcgaaggtaggttgaaaaatgggtattatgctcgccatggttttcgtaccatcaagcatgacatccgtaccatgtgccaagatgcattgagatataaagatggcaatgatttggatgatgtaaagcaaattgttgtctccttcatacaactagcaaagagactagggaacccaaggtacatttctgagagaaacggagcagcagcccaggacagcctggacattagtcaatattcattcgatactaaactcaaaaagaagcaaaacaaaacaagagcaaatttggtggctgctggagcagataattcatctcgcgcatttgaccttgaaatcaaaagaagcctgtctaaattaaagaaaaaggatgtctgctctggtagtgaaacatctgatgatgatggctactctgaaggtgatgaaactgagagtgaaactactgtttctgatactgagagtgactttgatgtaaattctggagcctgggatttaaaaggaaattgcctaaagttaactgaacatggggagtctgtgatcgatgatcgtatattaggtgcccgcatgacaaaggccagccttgttcctccagttactaggaagtatgaagttattgaggagtaccttattgtagcagatgtggaggaagtacaacgaaaaatgagagtttctttacctgatgactattctgagaagttgctttcacagaagaatggcaccgaaaatttggagcttccagaggttaaggattatcaaccccgaaaagtagcaggggatgaaattcttgagcaagaagtatatggcatagatccatatacacacaatctactgagtgacattatgccttctgatcttgagttgtcacctactgacaagcatatctttattgaggagttgcttctgaatgcattgaataagcaagttaggcatttcactggtttgggaaatacccctatgacttacaacattaggcctgtcattgaagaaattcaaaggtctgcggaggatagtggtgacagacgaactttgaagatgtgcttggggatgctaaagtccatgagaaatcgctctgatcagaactttgttgcttatagaaagggtcttggtgttgtttgcaacaaaaaaggtggatttggtgtagatgactttgttgttgaattctttggggaggtctacccttcttggagatggtatgaaaagcaagatggtattaaacatatacaaaataacagtgaagatcaagctcctgagttttacaacattatgttagaaaggccaaagaccgacatggatatgacttggtttttgttgatgcgatgcacaaggccaactacgcgagtagaatctgccactcctgcaaccctaactgcgaagcaaaagtgacagcagtggatggtaaataccagattggagtttacacacttcgaccaattgcagaaggcgaggaaatcacttttgattacaattctgtaactgagagcaaagaagaacatgaagcatcagtctgcctctgtggaagtcaagtatgccgcggcagctatttgaatttttctggtgaaggagcctttgagaaggtattaatggaatttcatggtgtgctcgataggcatagcctactgctacaggcttgtgaaacagactctgtctcccagcaagacttgattgacttgggtagagctggtcttggtacctgtttgcttgctggtttgcctgtatggcttgttgcttacacagctcacctggtacggtttatataccttgagaggcagaagctccctgatgagatcttaaggcacaatgtggatgagaagcgacagttccttatagaaataaacatggattctgagaagaatgatgctgaggttcaggcagagggagtactaaattcaagattacagcaaatagtgcatacacttgacaaggtgagatatgttatgagatgcatatttggagacccaaagaatgctcctcctcctatggtaaggttgtctgggaaaagtttggtctctgccatctggaaaggggacagttcgatagttgctgaacttcttcagtcgatggaacctcatgttgaagaagaggtacttagtgatctgaaggccaaaatctgtgctcatgacccatcagattctgaagatattgagggaggcatccgtaattctctcttgtggctgcgtgatgaattacgaactcttccatgcacttacaagtgccgtcatgatgctgctgcagatttgatccatttgtatgcttatacaaagtgctttttccgagtccgggattacaagacagtaaaatctccaccagttcatatcagtccgcttgacttaggccccaaatatgccgataaactgggaccaggctttcaggagtactgcaagacatacccagaaaattactgcttagcccagcttatctattggtatagccagaattcagaacctgaatctagattgacaagagctagaaaaggttgcatgtcattgcccgatgtctcgtccttctatgtgaagtctctaaaaccattgcaagagcgagtttatgggaacagaactgtgagattcatgttatcacgcatggaaaaacaggcacagagaccatggccaaaggataggatatgggtgttcaagagtgatccgagatactttggcagtccaatgatggatgccgtgttgaataattccccccttgacaaggagatggtgcattggctcaagacgagaccaaacgttttcctaggctagaaaaaaaatgattgtaggcagataagatggtatttggttgtttctcccttttggagattttagtctgcaggattttttttttccaggctcacaccttggctacctgatcacagggagtttagcttatagatagcagggtaacagtcaccaccccccatctgtacattccccagtccctacataccttgcggagatgtatctggttagtaaatgatagatttgtcattgatttaatgtagtgaattttcccataggaatgcccccccccctcttttgtttcatgtaaatgcagaacaatttcaatcttgaattcagtaatgtgttacaggcattttgcatttctatggttcagttgggttgtttcagtcaataaaatggttttaagggctcaata

SEQ ID NO: 30942 - DNA, 2346 bp, Zea Mays
gcgccgctcgtctcgacagacacacgcccacggagactcggagagggaggagggagggaggaggggagaggccgagagcacagggaacagacagacatggtcacgggatccatgaagcacctcgtgcaggtggagccggcaagggaggcggcggcggagggcggggcgccatcggcggggcccacgtaccgatgcgcggccggtggcaacgccgcgtcgccgcccgccgtgccggggctcgagtgctgctgggacatattccgcttgtccgtggagaagtgccccgacaacaagatgctgggccgccgcgaaatcgtccacggaaaggctggcagctacacatggctgacttacaagcaggtatacgacaccgtgctcgatgttgggtctgccatccggagctgtggcgtcggcaagggcggccggtgtggcatctatggagccaattctcctgagtgggtcatcagtatgcagaggtacaaattgcttttgttgaggaaaagaagatcggagagatgctcaagacatttcccaatgcgaccaaatatctgaaaacacttgtaagcttcggtaaggttgatcctgggcacaaggaaaaagttgaacagaatggcttgtccatctactcatgggaagagtttctgcaactgggaggtaaagagaagtttgaacttccacccaaggaaaaggatgacatatgtacaataatgtacaccagtggaacaactggtgatcctaagggagtactaatctcgaacaagagcattgttaccattgtttcagcagtagatgagttcctcaacaactcaaacgagcagcttaacatggatgacgtttacatttcctatcttccgcttgctcatatatttgaccgggtgattgaagaggtgttcattcgtcatggtgcttcaattggattttggcgtggggatgtcaaactcttggttgaagacattggagaactcaaaccaacagttttttgtgctgttccacgtgttctagacagaatttatggaggattgcaagataaaattacagctggtggtttcctaaagaaaaccttgttcaatgttgcttacaaatacaaacaaggcaatatgttgaagggaaacaagcatgaagaggctgctgccatgtttgatcgcctggtcttcaccaaggtgaaacggggactaggtggaagggttcgcctgattctatctggcgcagctcccctatctagacatgttgaggagtatctgcgtgtggtaacatgctcccatgtccttcaaggatacgggctaacggaaacctgtgctgggtcctttgtttccctgccgaacaacatgtccatgctgggaactgtcggccctccagtcccgtatgtcgaagtacgcctggagtctgtccctgagatgggttatgatgcactgtcgagcgagacgcctcgtggggaaatttgcatcagaggggacaccttgttctcgggatactacaagcgagaggacctaaccaaagaagtcttggtcgatggctggttccacacaggagacattggtgagtggcagtctgacggaagcatgaagatcattgaccgcaagaagaacatcttcaagctctcacagggagagtacgttgcggttgagaatctggagaacatctttggtcaaactcctgctgttgattcgatttgggtctacggcaacagcttcgagtcgagcctggtagcagttgtgaaccccaacacacaagcactggagcgctgggcagagtcgaacggggtaactggagaatttgccacgatatgcgaagaccctagagcgagagagttcatcttgggagagcttacaaagatgggtaaagaaaagaagctcaaaggctttgagctcatcagggctgttcatctggaccccgcaccgttcgacatggagcgcgaccttatcaccccgacgtacaagaagaagcggccacagctgctgaaacactatcagaccatcattgacggtatgtacaatagcatgaagtaggctctgcacggctccacctgttgcctcacggcatggagaatcaaaatgctttgctagccgtcacctcggcaagcagactccaatgtgaattgagattatttcattagattgtgtcattaaaaagttatgctacatgatgttagctaggttttttttatccctcctggctcctgaaattggcgtacaagctgcgtgaatgcacccgtgtcagtgttgccatctaaataccttagataagcgtatgccctgtgcctcgatttttttaattttaccttttaaaaaaacatatttacatcccctagtgatcaaaacttgacttcagactccaggggcgccgaga

SEQ ID NO: 30943 - DNA, 401 bp, Zea Mays
aatagccaacatatttggttgtcaaagtaacatcaattccaagctccaactcatactttattgcatattgacgcatatcaatcctgaattatttcatgttaggaaacaaacaacctagctacatagaaggattcatcctatcgtacaccaccctcttctgatctggaagaaagtcttcacatggctgatcaacatggtggtcatccttgtcaatatccctaatttcttgcacattacaagttgaaccatatctataaaattcatctcttctactgttctcagcctcgacctctttattgagtccaatattacaatatatctcattttcacatggtacttctactcttccttctttctctagaacatcagaaactaccatagaatcccaatcaaattgtgtt

SEQ ID NO: 30944 - DNA, 888 bp, Zea Mays
gtgtccaaaccttctccacgcgttccttccttccctccctccctccctcccctcccaagaaacacaagagccaggcagcgcttgcgaggctcaagcgccgcagcaatgtctctggccccgtccatcccttccatcaaggtgaaggtggggcccgtctcggtggcgcccccgcaccgcgcatgccgatccttcgcggtggtcaggagctccaaggcggagggccccatccggagacccgcggcgcccccgctgtcgccaccgccaaagacgccggctttgtccactcctcccaccctgtcgcagcctcccaagcccgctgctccacccacgtcgtcggagtcgacaccaccgtctcctcagccgaaggcggctgtggccacagcccccgcggcagcgctgcagaggccgctggctggggctgtgacgctggagtaccagaggaaggtggccaaggacctgcaagactacttcaagaagaagaagctggacgaggccgaccagggcccattctttgggttcgtgcccaagaatgagatttccaacggaaggtgggccatgtttgggtttgcagtagggatgctaacagagtacgcaacaggctctgattttgttcagcaattgaagatccttctttccaatttcggaattgtggacttggattaataatgccgggcttggtgttttcgttatgcataagtcttttaaatgtaccttgatttacacgggagaaggacaacactgtaggattgaccgagttgcagtgtgggcaaaaaggattatctttaatcaagttgccaaatgccaataatagtatatgcttctagataaataacaacggatttagattggtattgctatattatgatgtgaatatgtcattgttctatc

SEQ ID NO: 30945 - DNA, 815 bp, Zea Mays
tttttttttttttgacgatgagcgacatcgacgtcctggacgacggctaccggtggcgcaagtacgggcagaaggtcgtcaagggcaacccgaacccgaggagctactacaagtgcacgggggcagggtgtctggtgaggaagcacgtggagcgcgcgtgccacgacacgtgcgcggtggtcaccacgtacgagggcaagcacaaccacgacgtgcccccggcgcgcggcagcgcctcgctctaccgcgccgcgctggcggcgcagatgccgccacagcaggccgcgagctaccagggcgcgccgatgccggccgcggagagaggcagcttcgccttgtccgggttcggcgacccggtgggcacggcgtactcttattacacgaaccaccaccaggagcaggagcagcagcagcagcagccgaaccaggcgatgcgctacgccaaggacgagccacaagactgcatgtcgtttttcgagcagcaactcctgttctgaccagatgaaacgctgccacatcgattgtggcaagacatgctcgcacttgtgaattgtgattcttttttttttactcgacacactatgtacactatctgtagtgatttgtttggaggctccaactttgcaggcatctgcagagtgggattgccttctgtaagatgtaggacacatcatttccgtagcctcctagggagcaaaggtcagggcaaatgatttttcagcagtttgactgctttttttttgtcaaaaaggaaatcgttgtaagtgcgcagatcttaaaagaaaaggtattcagttcacgtatcttaagtacag

SEQ ID NO: 30946 - DNA, 3166 bp, Zea Mays
atttaaaatgcttgcatattttaattttgttatggtttaccttttcccaattcagaatgctttttccattttctttccgtgaagtatgggtgataaattgcatgtttgggtttgataaagtctacaagtttgcattatgatgatggaatcctgttgctattgactcagagaaagagttctatcgctttcaggggtgatcttttattccctctgtcgtgttaagtttatgaggcttgcttacttgattggttatggggctgagatagaaaagagtccagtcaacagtgcatctttaagcatgctaccatggccaaagccagctacatggccttcaatccctcctgattcgtcagcagaaataatggaaaaagagaagatggttcttcaagtcaattcaagagaaaagctcttcagcattcacaggaaacctctgccattagaaccttctttacttctacgtgaggctaataggcgcagggcttttctctctgctggaaatttatctgagctttatgattcatctgatgggtttagatgcaaattcaaaacttcctcccaacagatctgcttctaacttaatgacaagaacaatgtcaggtccagcaacgtccgagacttcactgccagttgatcgtcccatgaggttgtcagaaattcatgttgcagctgagcatgcactgaaacaaacgatatcagatcctgattttatgacatcactttcatcactagaagaatttgagaaaagatatatggagcttactaaaggtgcagctgacaattaccaccgatcttggtggaaaagacatggagttgttcttgatggagagatcgcagctctgttctttaagcatggaaattatgacctggctgtgaaatcctatgagaaagtttgtgctctctattctgcagaaggctgggaagagctgttggcagatgttcttcctgatcttgcagaatgccagaagattcttaatgatgaagctggttatttggcttcttgtgtaaagttactatcgctggacagtggcttgttttcatctaaagagcggcaaggtttccagtcagaagttgttcgacttgctcacagtgaaatgaaacatcttgtgcccctagatgtctcgtcactaattacatttgctggaaatgctggtccaccactagaattatgtgatggagatcctggtacactatctgtagcagtttggaatggcttcccagatgacatcacactggagtctctcagtttaaggttgtcagcttcttctagtgcagatgaaggtatcaaggcaattaaaagttcagattctcatgttctagtaccaggtagaaatatcatctcttttgacattcctcgtcaaaagcctggctcctatgtgttgggtgctctcactggacagattggcaagctgtcattcagatcacatggattttcccaagatggtccagttgaaactgatgaatttatgagctttgagaaaccgacaagacctgttttgaaggtgagaaaaccaagggctttagttgatattacacctgctgtgtcctctgctttgcttatgaatgagctccaatggattggattaatcgttaagcctatagactattctttaaaaggtggaatattgcatatcgatgctggcgctgaactgaaaattgaggagtctcagatgattgaaatagaaatttacgtaagtgatatggagtgtgctaattctgccaacagctccatcaaagctggaaaggttgaaaaggtacctattgaaaatggaaagatagaacttcctgattgggctagtgatgtgactactcttgtttggtttcctgttcgtgctattgatgacacaattgcaagaggagaatccctagtgtctcagaaacagagcgttgtagatgggatgagaatgattgctctcaagcttgagtttggagttttccgtaaccaagtgtttgaaaggaccattgcagttcattttactaacccattccatgtaagcacacgcgtcgtggacaagtgcaatgatggagctctacttctacaggtgatattgagttccggagtgaaggccacactgcatgtaaaggatgtacggttagatcttcaatctggatttgatcacttgggcaaaggagatggacggccagctttgagtttattccctctggttattgctccttcttccaaagctggaattttattcatgttacggttaagtggtacaaaggatgtggacgacgcagaaaatgcagacagcacgctgaatatcacctacgggatatctggtgacagaaaaactggagcacattctcctatacctgtcaaatctggtgattctgaagaacttgtgttcaagattgcactcagactgaagcgacctgtcctggatccatgtgtagcagttggattccttccattttcaactgactgcctgagggttgggcagttagttaatatgaggtggagggtcgaaaggctgaaaaccccggaggatgcatccatatccattgacgaaatactttatcaggttgaggcaaacccgcagaactggatggttgctgggaggaaatgtggtcacgtatcgttgtcaaatgagcaaggttcaaggatggagatcacggtgacatgtgtgccactggtgtctgggtacgtccacccaccgcagctggacctgccggaggtgggtgaggcaaacattagctgcaacccagcagggcctcacctggtgtgtgtccttcctccagccatcagcacatcctactgtataccagcgatatgattcttcctgggctgacagtttgctgccatttacacatagatgagccatagtatgtttttgccgagacgtgttttttgtgtgtagacatgtttcactggaatgtgtttcttgtaattctgttgtgccatgatcagtgtacaattctgcattgactgatggtacatgaaactggttccccagtattccgtgaaactgcaagccggatttgctgtgttcagattgtgttgttgcagactggttgcctttcgtaaatcagccagattgtatccttattaggtcgttttcatatctctgaggaatggatgattctagaatgattcttagatcgtttgtgttttactccgtccgttccaaaatatagttctttgtagtcctcttttttcgtccatgtt

SEQ ID NO: 30947 - DNA, 2260 bp, Zea Mays
tgtcaaactaagttatggttcatcttgcgtgtaactaacttctgtttctacattgtagatcagacgtacggccagtgatctcggccagcgatgcttgatcgtacggccagaattaccacaccacgctgcggtgaggactgaggacttccccgcgcgccactgctccgcccgcgtccgcgtctatacaaaggctgtcgcgctcggcactcttgctgtcgcgctctgtgcacagacgaccttcttcccatcccttccctctgctagtctgcttcgttcctcggccatggtggtcctcgccaagggtgagctcgagcagatcgccctcccggctgcagagccgcccccggccgacgtgcggtcggtggacctgtccgccccggcgggccccgcgcgcgaggccgcggcgcgcgcgctggtggcggcgtgcgaggagcacgggttcttccgggtgacgggccacggcgtgccggccagactcgtgcgcgccgcggaggccgcggcggccgggttcttcgcgcggccgcagggcgagaaggaggaggagggccccacgctcgggtacggaagcaagcgcatcggcggcaacggcgacctcggctgggtcgagtacctcctgctcggtggcacacccgccgccgcgccttcctcggcattattgccctgcgccgccgccccgtcgccgtccgcgccggccgggccgttacggtgagtcgtcgacgccactcgcagcggggcagaacggtgccggcgctcggcgttgcaggttgcaccggcatctcgcttcgcttgcctcctgagtcctgactcctgttggtttccctttgatacgtgactgcttgcctgccctgcatacaaacatgcacacagcacacacatagcagatagcacccatttgcattgcctttccttggctccatgctctctgctcgtgcttgcaatctgtcacgtggagcaatacaacaccaagcatacgcacgtgctcgtaacacaaggaagaacatttgtacggtggaagatgagactgcccgtcgtggcagcgggcccaccggccgtggcccgtccccgtctatatcaatctgcgtcttggctagatcgagcctcgaggcatcattttcttgaaggaaaaaagagaggaagaaacccagacggaaaagaaagagttccttgtgatcttttttctttccgcctgcttccatgcatgtttgcctgacaacatttctgtacggtgtcacgcgcacgctgacgcagggaccttctggacgagtacacggtggcggtgcggcggatggcgtgcgcggtgctggagctgatggcggaggggctgggcatcgccggcggcgccggggacgcggtgctggcgcggctggtggcgcgcgcggacagcgactgcatgctgcgggtgaaccactacccgccgcggccggcgctcaaccccagcctcacggggttcggcgagcacaccgacccgcagatcatctcggtgctccgcgccaacggcacctccggcctggagatcgcgctgcgggacggcgcctgggcctccgtcccgcccgacggggacgccttcttcgtcaacgtcggcgacaccctgcaggtgttgacgaacgggaggttcaggagcgtgaggcacagggtggtggtgaacagcgagaagtcccgggtgtccatggtcttcttcggcggccccgccgcccggcgagaggctgggcccgctgccgcagctcctgggcgacggcggccggagccggtaccgggacttcacctggagcgagttcaagaccagcgggtgcaggaccaggctcgcggaagaccgcctgtcccgcttcgagaagaagtagctagaggctacgtcatttgcatgaccggcggtaggatcgattaccatgtatgcttctctgtatatgtcagttgcattgccacagctctagctactggcgcccgtacgtgtatattagtggccatgctcgtattgtacgtgcacgtgtatgcacgcatatacatggtggcaccacacagggtatcatgcatccaatgttatctattatccatggagtaccaaccatgcatgcatggtcctgttattagcttttacaattacaattatcccccggtgcttccagacagtccaggcgtcgtacgtgtgcgggtgtcggtaaaccaatcagcggtgcaacaacgtaggcatgatgacgtattacgcacagccaccaatgatgctggcacaggcagagatccaagtaggactatctatcaggactag

SEQ ID NO: 30948 - DNA, 1043 bp, Zea Mays
agggtttagggttttccggacgggagatctccttgttggccctctgccccagccagatccggcggcgaaggtaaggcaagatgtacaccgcgaggaagaagatccagaaggataagggccttgagccctccgagttcgaggactccgtcgcccaggctttcttcgacctggagaacggtaaccaggagctcaagagcgacctcaaggacctttacatcaacggtgctatccagctggatgttgccgggagcaggaaggctgttgtgatccacgtcccataccgcttgcgtaaggccttcaggaagatccatgtcaggatcgtcagggagctggagaagaaattcagcggcaaggatgtggtaattgttgccacaaggaggatcgtgaggccgcccaagaagggttcagctgttcagcgccctcgcaccaggactctgactgctgtccatgatggcatcctggaggatgttgtcttcccagctgagattgtggggaagcgtgtcaggtaccgtctggatggtgccaagatcatcaagatcttcttggacccaaaggagaggaacaacacagaatacaagctggacacctacactacggtctaccgcaggctgtgtgggaaagatgtggtctttgagtaccctatggccgaaaatgcataaatatgacgcccggatatccccattttattttgttgaatctggatgtttctttggggtctcaactagactgctccgtatgtacttcaaaaaccatagttttgatgccaaagttgttgcctaggaatttggtactcgggaattggtagcggacctgaacaatgttaagttttgagcatttaaatttacctttgtcatgataacatgttgcgagtttttatttaattgctggacgtgtttgatatgccagactgcattgttcgtttgattctacctagaatcaaatcaatatgcaactacaagcctcgcacctgtaacgtctaacctgggtttttcttgttcatttaaactttgtaacatcatgtccactctgacttgctctggcag

SEQ ID NO: 30949 - DNA, 1337 bp, Zea Mays
cgctacctccagccgcctgcgccgcccgccggccaccgccgcctcgtcgtcgcagaatttctcctcgcttatcttttctccatctctttcggattttgaatctgggaggaaattcgcggtccggtggaaaatctgttggatttgttcgtttgaaatttccatctgtgtttttcttttcggtatgaagtagttgcaaagatgtatgctttctgaattttttcgtctgaatcaaacccggctctatattatgagtcaacagcaggcgccgttcgatggcgtcctgactgccgcgtggagcccagagtgacgcccaagccaggagaagattgtttggagatccatcttccttttagttccaagccacaatacctggccacacctcggcgcaagctcgcctcgcccaagtagcttcgtctcttttgcgttcggaatccgagtttgttttggttttttgttttgtttttttgttttggtttcttggatctggttcttgggacggcatcattagacgaacgggtgccctccggcgatccatggaggtttttgccctttgcaaggtgcccagatagacgcctacacacgattggacgaggggcatcaagcgtcatgtacgtttctgcctcgtccaaatttcatatggctatatcatctgtcgatccggtttcctttttctatttcttgttcggcggttcggttcctctgtgtcgcatcagttttttcttttgtttttgcaactgaaacagttaatgaaatgtaacggatctgagaaacgtgattcacatctgttaatctggaacgttgcgtcagcgattggttaaggcattctgcaaaaactaaaatttgcaatgtgatacatatgatttcgaattaattacttatggaatctacgaaatggattacgtaaaacatttaacctagaactacagctaatggaggggatttgtgaataatgcgttctcaactgaaacagtagagatgacgaaatgattacaccttatatagcagatagaaagactgctaagctggaaaattttagaaatcgtccatttgagcttgtatacaacagtgacctcatagagaggtgttttgaatggactaaagtcaatagttacttactaatattagttatgtgtatccaaacgtcgttgcaacttataattagttatatctcaaatattcattagtttctagctacctcacaccggctaaaaccagctaacactttattcaattattcttatcaattataaaagagaaatccacctaattccactaaatccatatggattgagagacaaacgctctaattagtattgacaatttctccccatcgacct

SEQ ID NO: 30950 - DNA, 1492 bp, Zea Mays
ggaatctcggtacgaggggaatccgaggtgttaaatcatcgaagtgattcagaatcgtctttattcgatctcgtcattcccactaaaggctggacctgcaaacatctgaaacagttgatttggactgggagaacctgggttttgggattgtgcaaactgattatatgtatattgctaagtgcgggacagacgggaatttttctgagggtgaaatggtgccttttggacctatagcgctgagtccatcttctggagtcctaaattatggacagggattgtttgagggcctaaaggcgtataagaaaactgatggatccatcctattatttcgcccagaggaaaatgctgagaggatgcggacaggtgctgagaggatgtgcatgcctgcaccctctgtcgagcagtttattgatgcagtaaaacaaaccgttcttgcaaataagagatggattcctcctactggtaaaggttctctgtatattaggcccttacttatgggaagtggggctgttcttggtcttgcacctgctcctgagtatacattcattatatttgtctctcctgttggaaactactttaaggaaggtttagcaccaataaatttgatagttgaagacaagttccatcgtgctactcctggtggtactgggggtgtgaagaccataggaaattatgcttcggtgttgatggcacagaaaattgcaaaggaaaagggttattctgatgtcctctacttggacgctgttcacaagaagtaccttgaagaagtttcttcatgcaatgtttttgttgtcaaggacaatgttatttctaccccagcaataaaaggaacaatattacctggtatcacaaggaaaagtataattgacgttgctttgagtaaaggcttccaggttgaggagcggcttgtttcagtggatgaactgcttgatgctgatgaggtattctgcacaggaactgctgttgtggtgtctcctgttgggagcattacatatcaagggaaaagagtggaatacggccaccaaggtgttggcgttgtgtcccagcagctgtacacttcactgacgagtcttcagatgggtcaaaccgaggattggatgggctggactgtgcaactgaattagttggccgtggttcgtggatcattcccaacagatgatgggttcgcaagatccaaatctggaggatcacaaccatgtgtacctcttcggttacagttttgtagtgtcttatgcgatggcgtcctgctgtatatttcttagacggtatttaaaccataaaacagtattcgtctgtacgactgtacccttcagttctgtagcatctgccggagacgagtactagttttgttattttctttcttttacaaaccaagaacagttctatagttttattgtagacactggaccatcatatgatctcaatgggtagctttttcctttttatatttaaaaataaacagaattttaattttataaattttatattttaa

SEQ ID NO: 30951 - DNA, 1840 bp, Zea Mays
gcactcgaaaaccccaaacccaaaggcatctcccagtcggagtcgccccatggccccacccacctattctccctgccggcggcagccttaaccctaatctcatcgcctcctcttccttctccagttcctcgaaggcccagcagacaacagcccctctttcttctcagccatgtcggaggacgaagcgaacgctgctgctgcgccggcagagggaaagaactggcggcggaaggggaagcacgacaagcccaagccgtgggacgaggaccccaacatcgaccgctggaagatcgacaagttcgaccctgcctggaacgagggcggcatgctcgaaagaagtacctacaggaggcgtggccggtcgtgaagggcgcattgaaggagtacgggatctcgtgcgagctcaatttggtacttgatgagtgattaaccttttcttattgctattgactggcgatattgttatgtggtaaacaaatgctctgaagcctctctctcggtgtgtgtaggtggagggatccatgactgtgtcgacgaccagaaagacaagggatcccttcgctattatcaaggccagggaactaattaagcttttgtccaggagcgtccctgcacctcaggcaatcaaaattcttgatgatgagatgaactgcgatattattaagattggtggtcttgtgagaaataaggagcggtttgttaaaaggagggaacggcttttaggccctaacttgtctacactcaaggctattgagattttgactggctgctacatcttagtgcagggaaatactgttgcagccatgggcaactataggggaaggggactgaaacaagtgagaaggattgtagaggattgcatgaagaatgtaaagcatccagtgtaccacatcaaggaactactaatcaaacgtgagctagcaaaaaatcctgctctagccaatgaaaattgggacagatttctcccgaagttcaagaagaagaatgtcaagcagaagaagcctcaaactaaggagaagaaaccgtacacaccctttccaccgcctcaacagcctagcaagattgatcttgaacttgagaacggtgagtatttcatgagtgacaaaaagaaatcagcaaagaaatggcaagagaagctggacaagcaatctgggagagctgaagaaaataaaagaaaaagagaggctgcatttgttcctccaaaggagaacactgcaggtccatccaaatctgacaagaatgccagtgacaacagtgagatagccgatatagcgaagtcattaaagagaaaggcgaaggaatttagaaagaacgaggcccaggagagtgtcatagctgaatcatatatcgcaagtaatgatgaattgcggcaaaaaaagaaaaagaaatcaactaagtccaagtagccctaatcctcatgcataatgacactggcaattgagaaggattgcatgagccatccctataattatgtcattcatgctgtgatcgtattagatgatgaaacaaaattcgaaccttccgctggtctgttgttgcaacagttcatatgcaataggtttttaatgggtaactgccatgataaccaaggaacagaaagagccctcaagcttatcattctccaaagatatatattttcatcctataggttgtgttggttggtagagcctggctggtctaggcctgttgtatcatagtacgttatatgcaggcctcggcatttggtagaatcggtcaagctgcagagttttggttttggcaaaatgttagtcgaatttactgttaaaaaaagctcaacatattttcataaaagaatatccaagcaagggtgagagtgcat

SEQ ID NO: 30952 - DNA, 1268 bp, Zea Mays
cggacctttctttagcgtgagcattcaaatcaaggtaactttttttttcctatcaattcggttggtaatgggtttgttcgctgcatgacatcctgtcaatccgattcatgcatccgttgattgattcagctcttccctccttggctgtgcgagactggacataatgagttttagagatgtcccacccactgtcgcagaaacaaaactgaacttccttaagtcatacaaacgcccaatcccaagcatttacagtgcagtcttacaagaacttttggtgcagcaacacctgatgagatacaaaaaaacctatcagtatgatgctgtgtttgctcttggcttcgtcactgtctatgatcagctcatggaagggtaccccagcaatgaggacagggattccatcttcaaggcatatataacagcattaaatgaagatcctgatcaatacagagctgatgcactaaagatggaagagtgggcacgttcccagaacggtagttccttagttgatttttcttccagagatggagaaatcgaggctattctgaaagatatatcagaaagggccaagggtaagggaaacttcagctacagccgattctttgcagttggcttgttccgtttgcttgactttgcgctgcactaaacgtcagtaaaagaagtgtggatagggaccttgatgtttaccgcaacatactctcaaagttggttcaagccaaggaacttctcaaggaatacgtggatagggaaaagaagaagagagaagaaagatcggaagccccgaagccgaacgaagctgtcacaaaatttgatggaaacctttattccacaaggcattagaatcagccctttgcagaggagagtttcccaggataacagaattaacagtaacatctggaccgtgttgagaaaccaccaaatgttcccctttcatcacagacgtctttggctgctcgtcttgtgatgtagcattctgccgtacaaaaggatccagattattcttactactggacagatatttgtattttctcatatgtcttgaaatcaaatgtatacattttctgtgtgtaggggtcaatgttactcaagcagagaaatatagttttctcttttgtatttaaattcaggtaatttgggaggccgtgttcacttatatataatatagtgtggcaaccatgaaaacaattggtgaagttctttatgtgagtttgtatgtaccgggctcagcactgaaaaatatctgaggttgaaaagtcttaacagccggcttt

SEQ ID NO: 30953 - DNA, 1309 bp, Zea Mays
tagttgatacactgaacaagaacaactttcagcacaaatggcaataaatccagagatggaagtcattaaagaccagatgaatagtatggatccaaaatcagtgcaggagggacaagctaaaatgaaagcgctgttcaaaaaacatggtgttagtccacttactccaatgaaaggactcctgatccaagggccaatattcatgagctttttctttgccatatcaaacatggttgagaaagtaccttcattcaaaggaggtggaacattgtggtttactgacctgacgactccagattctctttacatcttgcctatgttaacaggactgaccttcttggccacagtggagcttaacttgcaagaaggaatggagggaaatcctatggctggtaaaatgaagtacttttctagaggagtagctgttttgacagtcccatttacaatgaactttgccacgttttctgttactggacctcatcaaacatattcaccctgttatatggtcttgttatccggcgaccagctgtgaggaagtggtttgatcttcctgctttggaaaatacgcgttcgctcacggcaaagccagtattcaatatgtttggtggatccaaggcaataccagccgcacagtcaccagtagcgatcgcaggagcccagcaatctggtctggaccaacctgatgcttctgctcttggctataaggtcaaaaatcttgagaagaaagtgaaatccaggggtaaatctcggaaacacaggtaaaattttgtgcatctgtgccccagatgagcaatctgtacttccaccatcggaatgatggatacttgatttgtcctgatatgccccccaaaaatcagattttgtattaggaacctatcttttcgtcgtttttggctgcttttgttttgatttttcaggggggggcgggggtgaaataagccacataaatgtttgacttagtaccagagttgattatacacaaaatgtatttcagtaacttgtgatagttaaaacattggagggtcatcttccaaggattggtatgaaagctacgttgaagttcagggacagtcaatcaacttttgaggcaccattcgacattctgtagcaattggcaattaggttcaaagtgtgctgggcagaattttgtggcctgaatgaatattgagtttgtatgtactaaactgtcttagaataccatttacaggacgtttggatcctttcattttagaggaattggaattcactcaataaagtaacttatttagtttggaatttgacattccaccactttctaaaattcagatataaa

SEQ ID NO: 30954 - DNA, 471 bp, Zea Mays
cgcacacagggcaacgatatttcttgctgctagccgatgactgtatctacttcatgtggttttaggatttccatgcaactaacggtgattatcttaggtgaggattgctatggttgggaagtacactgtcttatgagattcgtacctctccgtgttgaaagccctcttgcacacatctgttgattgccgcaggaaacttgttgttgctgattggatcttgatgattccacggcgattgaggtttggcacagtagcctattattcaatgtgccaagtcttatgtcctgaaactgacaaagtctgaaacgaaaacattgtcaaagataatgctataaattgcaagtactccaaataatctaaccgtctgtaacatctatttctctgaatattagataaccaaagcttcaatcatcatgtctagagactagaggtggtagactcagatcccgttggatgggaattgtgttccag

SEQ ID NO: 30955 - DNA, 3264 bp, Zea Mays
gcagggatgaagagagacattctaccgtgagatcagcggtggaagatggcccggcgcagccgcgacaggatcgagctccggtgtgcgcgacgggtccggagcggagcggagcggagcgggggagaaggcatataaaatgcgaagatgagacgagaagcggaggattaacagagcaggaaggtgaattgggcgcagagactctcagacgcgcagtttttgaagctcgtcgcgaaatgaaggaggcgaggaatcactaccacacccggggctcctcgcgcggcggcggcggcaccactgccgagcgcgacctggtgttacagtggggcaaccggaagcgcctgcgctgcgtcaaggtgcagcgccgtgacgtcgaggccgccgctaccgtggccgccgagaaagccgccatcagccagcgccgcgccgcggccacagctgcccagcaccacccagacggccacacccaccaccgtgttttcaggtctatgcctttctctaatttgtttccttttttatcgtttgtgccttcgtggtgtcgatgtgcccattgcgtgtgccggctctcagcatgattgctttgttttgatgtctacttgttaaactagtgcccatttttgggttatttcgtaaagcaacaactcgatgtcacgtgatgtcgtccgcgtcgacaagaaaaaggcagagacctgatctggtttggtttttatttgaagagaaattcaatttgaatgaatgtggacaaagatgtggtctgtctttttttcctgaagaactcgatttgtacatcgaattcgaagatgtggtctgtctttttcatgaagaactgataataccgaagttgctagttttctggtagtatggagtagtccgtgcccagtactgccgagttcagtatttgttggttttttacttgcatcgctaaaatcaggcctgtttttttttcttccaaaaaaggggtcctggaaggctaaaagaagacggtgtttagaacagaaatcttgatatcagttgcgaacactgagattagaagctagtttaaggaccaacaggctccttatcgccatcttcgatccatccagctgaatgtatttggagttattattattctctgaattttcagtattttctagcttatgtgccaattcgatttctgcatcacatgaatttttacgtgcccttttgttggtacagttttctcagactggtttgtgattttgcttcgccgaaactattacaagaaagaactcctagactgctgtcaataatagcttatccgtgttctcttaaaaaagggacttatcggcattacgataaattttgatggctgagtattctttgccttcatctgttgctatctttggactctagtcacatcatatcaactatattttgttgactaattttggattccgaagaaaacaacaattttatcttgaatcagtcaccaccacacgtataagtggatggtgagggcctgctcattattgctcttccttttgcatcctcgaattcatagcttggtgcctggacggtacgaagcgttggtataggtagtaggtggaagcttttgccttctatgttacccctctcccctaaattggaggtgaatcatgaatttatgcagtctgcctatttcagaatttaattatattttgaagttaattgcatgagggtttaaaatctagcctttaattttaaattttaaaattagaccatttgaacatcctcgccagaagattgaactgcactattatgccccctttttcatttaaaatatcgaaatccatgcattctgtgtttactggaaaactcgtcgaatcaaatttatagaaatatatcttgtatgcatataacttttccgttatgtgaacaccttcagtgtgtctgtgtgtgtcacttccttctctttatcatgtttgttcttttctaggtcttacgtatggtttggagcaacaagatgtctttttgttggatagattaaaactgataatcaggtgcatcccttctaatgatctaatctatgttgttactggttttgtaggaacacagaagagtttgcgatcatgaaatcgccagcacggcaacaacagaacagcaggatcgacgcagttgcttcaccggacagggagtgccctggtagaggtaacaacaacaacaacggaggtccacagacctgtccagatgacaagaaaggctcttcatcggggagtgaggggtccatctggccgaagtttgcagtcaccctgtcgaacagggaaaaggaagaggatttcctggtgttcagaggatccaagctgcctcaaagacccaagaaaagagccaaggtcatccagagaactgtcaatttcgtatgcccaggaacgtggctgtgtgacctgactcttgaaagatacgaagtccgagagaagaaggtttccaagaagcgccccaggggattgaaagctatgcacgacttggacagtgactcggaataaaaaacagagagagaagagatcactgaacatgagaagctgaacattagagagaaggccaggacagatgcagcagatggaggtcgaccataaagcttcctgatggaatgaggaccaacgggtcaccactcctcgcgattgatactggagatcgatttgtccaaaaggactaggtttttttaaaagcaaatggcaggagctctgcctatccattaagagagagggagagagagaaatttacaagaagtgagcacaataaaagcacgcccaaacataacgagggatcccaataagaagtcgtccctgctgctacaaaaaaaaaaggacttgtagcgatcggaggacgaccgagatgtcaggaagttgcacggaagaacagagaggagagctgcaggagctggagttcctgaacattagcaaactattcaattccctggaaagcagcaacgctgttttgctattctctcatgttaatatgaatggcgagctagccagtcctgtcgcgtctagtttgccttccgtagtttttttttatcctctggtgctgtatgaaaggtcagtggatattctttcaggggcatgagacagtgtccggcactctcagtccagtgcgagtggatcaggattcaggcaaacatagaccgacgatcggactttatgtgttttcaggactgccagacttgtaaattctgaaagtttcagtgaattttttttatagtttaaattttatataggcctaccctccgtataaaaaaattgagaactttttttacgtgatattggaagatgtttg

SEQ ID NO: 30956 - DNA, 1790 bp, Zea Mays
ttttttttgttctagagagaaattaataaaaaaattatataaatttttattactatacttcataatattttcaataacatgataataaattagcttcaaattctatatatatttatattaaaatatagatttgtcgatattttagaaacatcctctcagagccacccgcaaaagtccgataatccttttccggcacgacagatccaccgtgtttggccctctcgaactcaaccgacagctgccgattcttcacccttacttttcacgtcatgaatgctcgtcagctcgtgagacgtgacgccgtgtcctgaaaaaaaaaagacccgtcccggcgacccccacacccttcaatccggggaaaaaaagcaacagctcgattgcccgggtcttccaaaaccctcgagatctcggttggtggtgtggtggggtggggtgctcttccctctcgcctccgctccgaagcatcgatccgaactcctcggttactcgcggcagcggcgtgtcgagatgcgccccaacattatcacagaggctgggattccaactaggttgaatcagtggtggagcagcattccgtttgttacttctggtgttatcttgatatgtggagtaatttatctgctctgcttgttgattggctatgattcctatgtggagatatgcttcttgccttctgctgtagcatcacattttcaagtgtcttcggcctcttcaatgttcctgcaaaatggtacgcatggattttgctagtgctatttcagtttctcgcaagcaatgtttcattgctgggacacctttgtggcatcttgtcaggatttgcatacacttatgggctgttcaactacttgcttcctgggccatcattttattctaaaatcgaaggcttgtcagcactatctgtttgtgtgaggcgtcctggctttattatgtgtactggaggcactacttatggtcagcttcctacatactctaacacgtctgctgcaccaagtgctctcataaatggaaatttcttgagaaatatatcttcatggatgcctagcagacacacatcaactgctcaggaaggagaagacccaaggtttcctgggagagcacgaacacttggttctgtaggaactgaacccactgcaagggaggcatacagctgtgaacacagtcagagctgatgcaacagtgacagctgagcaggttgatacatttgatgaagaacttaagaagctggttggaatgggctttgaaaagactcaggctgaagttgctcttgctgcagctgatggggatccaaatgttgccattgagattctgatgagtcagcagggttgaagtttgaccataaagtacaaattgaaaggaagcacggtatcgagccattttttgttcttacaaaggttcaaaaagtaggctgtggtttggggagtctgaaaaaggatggctgcaatcttgtttataccgggggtgcagaaacaacgtgcagcctaattgcaattctcaaggctttatgtaaggtagaaagtaacgttggatgttctgttaaatacgaacaatcagaaaatgctgaatttagtctgaaaatagccagtgtgtttgttttagcttgcagattattacaatctacaagccaggggaaactagattattgggctgtaacaataagactttgacgttgggactggttcccttttgagattgtggatccgtcctgcgttgagacctttttagcggcctatgaattttcacatgggaaaaatctgcaaaaataatgcataatctttaacctcaaatcaaca

SEQ ID NO: 30957 - DNA, 1009 bp, Zea Mays
tcaaggaaaacaaagaaagaacaaaaacataagtttgttttctttcgaggagaacaaaaacatgaaacgagaagacaaatgaacagtttgacgggccggccctgacaaacctgggccaagaataaataggcccatagacttgtatatagggtctaaagtgactgaaaagtcccgcatgttctcctgcctccgctccgccgccgcaacaaccatttccttctctagccgccgcctccgatcccctcccgaggctacagaaccagttcatccaggcgcgaatggcggcggcgaggagcctgcttctgaggcacctccgcttggcggcggccccgtcagcggcgtccgtgaggccgacggcgtcgttgcatgaggccctgtgggggcagcggtggatgtcttcggaggatgccaagggctctttcctggacaagagcgaggtcactgaacgcatcatcaaggtcgtcaagagcttcccgaagatcgatgacccctccaagatgcccatttcaagaatgatcttggcctagacagtttggatgcagtggaggttgtcatggccctggaagaggaattcagattcgagatacctgacaatgaagctgacaagattgactccgtcaaagttgcagttgacttcattgcctcacacccgcaagcgaaatgataaagatgcgttgcctggtatagcaaagctatatcgtcattaatctctgtttatgaagaaagttcagtttgaagatgtacactaccgtgcccatttggatacttctgctgatgctactgtcctttttggaacgaattttgctactgtggattgtctgcactaaataaaatgtttgaacctgagaaggaacttggatgccgtttggttcacgaaatgtaacgtaaatggtaatggtaatgattgacactcgaatatcgacagtaacaaatttgaataagacgatatccatttatagtgtggtatcgattacggttggacttaaacaaacacgattttatataacga

SEQ ID NO: 30958 - DNA, 1191 bp, Zea Mays
gggataacctgcctgcagtccacttctctgggttaatctcatcatggacacactcggtgctcttgctttggctactgaaccaccaacagatcaacttatgaggcggccaccagttggacggagagaacctcttgtgactaatatcatgtggagaaacttgtttattcaggctgtctttcaagttgctgttcttctgactctcaactttaggggtcgggatcttttgcatttgactcatgacacactaggacactctagtaaagtgaaaaatacacttatattcaacacatttgtattgtgccaggtgtttaatgaggtcaattctcgtaaaccagaagaactgaacatcttttccggagtttcaagaaatcatcttttcttggcagtagtgagcataactgttgtgatgcaggtgataattattgagttcctcgggaaatttacatcaacagtgagactcaactggaagctttggcttgtttctgtagttattgcttttctaagttggcccttggcttttgttggaaaattcattccagttccgaggactgaattgaaggatctcattgtaaggtgttggcctaaacgtggcgagagtgcagcacaacagactcaggatgacagaatggaagtaccagtgtgaagctgttcttgagcaacttctcgaaattatcaggtgttagtgttggtgcacatagatggtgttggctaattttgggtgctgatttttctaaccatcctaccttgttgcctggctatgaattctatggctgtagtcagcaatcggggaggtaaacctctgctgactcgtgatctagaatttgaacactgtaaacaaaatatgtttattgtagcctaacgaaggtcaggacctccagtggtttattgcacaagttgtgcagtcggtcccagaatcatttggggaaggcgctataaacagtttttcttggcaggagtggagtgtagctccttttcgctaatatcatttttacttttagatgcaatcaagaacattttgtcaaacactctaatagtaattggctgattttgttagagttgcctttgctatgccataattgtatttcagaaattgactggtggtatgtattgcgagtgtaaatccactattattggcggtatgtgataacaaaaatatttatggtgccctaagataagcaaattctgatggtg

SEQ ID NO: 30959 - DNA, 1797 bp, Zea Mays
tctacttttcctcccaacttccccaccgcggccaggccaccaataaaaacaagcctcagctgcagccgacgaccgccccggccctatcgctcccagccacgaccgggcaggcaggtggacaagcataaacttacatcgtcgctggtttggtagctagtgagcgatcgagcatatgcatggcgtcttccgctggcggcggcctgcgttcaccggctgctacggcggcgccacgggtggtgatggacagcctgatcgaggtgcgcgagggcgcgaccaggctccagaccatgctgctggaggagtcgcccacgccttcgatcgctgcggcggcggcggcggcgggggccaccagtgaggtcagacagacgcttgacgggatgatgagcagcctgtcaagcgccatgtcggctctggacaccaccggcggcggcggcggcggtcagggacagcagggccggaggaggaagcgaggcggcgcggcggcggccaggtctgggccgctgcggcggagcagcaacaggagaagatcgcacagcccgttcgtgaacacggtcactgctagcacgctcgacgatggcaactcatggcgaaaatacgggcaaaaacgtatccaagagtcccctaatccgaggtatgtgttggcctctactctaataatgtcaatcaaaggcgcggcgctgctccgtctaccatgcatacgtacactcgtcgtgtatatatatatatagtgatgaccaaatcactgaatccttttccccctaccttaaaaaagagaaatgaaactaaagacatgcataccaaacactcttgcaactggttatacatccagctaagcataaagcgttatatagaagcaagttgccttgggccagtctcatatgcatgtacacattaattattcatggacaaatataatatggtactatatactatgtacacattaagcagtggcactagttgagatcacatgatgacctttttttaagaagaaaaaaacaaatgaatcactcgatctaccacacacagctagctagaacgagagctttagaccagttctacatatatatctgcgtctgcatgacttcatgcatgtacatgtgtgcacacatcaggagctactacaggtgcacgcacagggcagaccaagggtgcagggcgacaaggcaggtccaggcctccgatgccaacccgtcgtcggagttcatcatcagctacttcggccagcacacctgccgggacccctccaccatcccgctcgtcatcccggacgacaccgctccgccgccgccggactgcgcaaacctcatcagcttcggaggatccaccgtcgtcggcggaggcgcatccccgagcgcaaacactactacaactgttccgacgacgatgttgtctcgcttcggctacagctcctctctgccgacgcagacgcaggcgcaggcgcagctcgccgcagccgtggtgggacctccggggacgacgatgactgcctcgtgggctacggtggggtccgcgccggcggagtactggccgggagggacgaccagcgacatggcttgtggccctgctggcacggccagcttcccgtcgtctcctagcagcctcggattcatgaccggctcgccgtttggaaacgccggcgatgacgacctgtttctgtttggcttcgatccctgacaaaggcttgctgatgcatgcatatccagccaatgccacgtttgcagtttgcatgcatgcactaccatgcaagtagtactagtagtagccacgtatgactatagtttgatgatcaagtgtccg

SEQ ID NO: 30960 - DNA, 1157 bp, Zea Mays
tccagagcatccaatctagatccaacggtttcatatgaaaggggttaaaagtaaaataggtactatgtttcaggtggaaggggttaaatgtaaaataacagtcatcattagatctagattagatgcaccaaatcgtttgattgcaaacttgcaccaatataagtgattgcataagatatttccccgccttcttcgtccacgcgaacgtggttgttttcaacagacgctcaattgcccaccataacaccgtttcgctttctcgctccaactcccacagaaacggccgccagcgccgcaggcccgcagcgttgatggccgccgcacctggcgcaccagaggagcgactcggcgtcctcactcctcaatgcctccgggagaagaccggaatctccgagcccaggtcggaggtgcacagggacggaaactaccaccgagcggtgaacgtgtggatctacagcgagagcaccggggagctgctgctgcagcgccgagctgattgcgaggaattgtggcctgggcagtgagacatcattagcgccggccacatctccgccggcgattcctcgcactctcggcagagggaccttctggaagatccaggcatcaaccatttcagtcgatgctttcgagctcatgtgtgtgtttcttcaggaacggtaaaattgacaaatattgtggaatagtgaatgctactagtgagagctagtgatgaagtcctaagaagaatatacctggttgaagtcaccagtatgataaagcactactgcaagaaggctgtatgctcctgccgtcattctatgataaggaccacaaacagcaacaagttttgcaagagcctgcacaatcatgtgcagattagaatgatggaaaccgaaagaagcaccagttcaagaattcttcacatatggatgcaatagtaatataacgaatcgtacttttgtgccgtagctaacagcatcctcaagtttccctttatccaggaaagtcttggatgactccagcagggtgcggccatcagctgatgagcatgcaacatgctgcaagtaggcaaaataaaggttgatgtccatgaattctctaagaatttcttattcagctatttcttttagaaatgaaaagattaccttgtagataggaacaacactgataatatccga

SEQ ID NO: 30961 - DNA, 4709 bp, Zea Mays
gccgcccgatcctccggcgccacatctgcaccgtccatctatcatcctccgtgggcgcgtgggggcaccctccgcctcctccggttagccggaaagcggttttccaatcggatagaagaggggccctccgctccgccgccggcactcaccccagctgcactcccgtgggccgtgccgccgtggcacgccggcgcggcggatgcagtcgccacgaatcaggacaagcagcaggcgccaaaacccaaaccaattccctcccttccgttcctactacgatacccacctcgacgcgccgtctcgccggcgacgtcactggcaagtaccaaactgcccctacctcctcccgcttagttctataaatacgggggggtcgtcttcctccacaagattctgccaaaagatcctctcggatgcccccgcccccgcccacccatttcgccagtcgccatcgagctctcgcttccgccgcccgctgccgctctatcaccccggtgctgagccctaggatgtgactggcggacgtctctatggccgagccgtaggtggaggcggcacctcggcgccgtgggagatggaggacgatgacaccgagggtgtaggcgagagcacctgtccccccgccgccgaccgaggaggctcctcctcggccggcggcggcggcggcgactcgcacagttacactgacatagagaaggaggtcttcgaccgtctcatggagaagagaatcccggaggtcgtcgcggacccggtggccttccgcgaagagctccgccgccacttcgagcgcctgccgctgagctacgccgtcgatgtgaacgtcgacaaggcggaggacgtgctgctgcaccggaggattctcaacgagtgcgctcaccctgaaaatcgccccatcttccatgtgggcttcctgaactgcatcccgccctcggtggatccacagtataacactcagtccatctctacgagcgaaaacggtaattgtgggggttctcaggattccactttgagaaaatttgagccatgcgaagggatcgaggacctcagtttaactggacaaaaagttgtggttgactctgtggccagttcttcgaggggagatgaagaaatcctccatgttcatgaaattattttttctaccattgacaaaccaaagctcctcgctcagctatctgctttgttgtctgaagttggactgaacatccgtgaagctcatgtcttctcaacgactgatggcttttgtttggatgtatttgttgttgatggctgggatacaaaggagacagatactttgctacagattctcaaggagacagcggcacgaaatcatgcctcattatcaaacccaaccaattctgcagcctcagaaagagtactggaactacaagagaagattggtgattcaaatattgacaggaattttctgcagattggggagaagattgcatctggatcttccggggacttgcatcgaggaacttatcaaggtatggatgttgcagtaaagttcctcagaaccgaacatgttaatgactcgtcaaaggtggagtttttacaagaaataattattctaaagagtgttaatcatgataatgttgttcgattctacggggcatgcacaaagcagagaaaatatgtcatcgtgacagagtatatgcctggaggcaatctgtatgattttcttcacacgctaaaaaatactttggatctcccaacggttctcaggattgctatcggcatctccaaggggatggattatttgcaccaaaataacatcatccatcgggacttgaagactgccaatttgcttatgggctctgattatgttgtgaagattgcagactttggagtctcaaggaatccatctcaaggtggagacatgactgctgaaactggtacctacagatggatggcacctgaggtaataaaccataagccgtacgatcacagggcagatatcttcagctttgctgtggttctgtgggagctggtcacttcaaagataccatacagaaatctgacacccttgcaagctgcactgggagtaaggcagggaatgcggttggagatcccgtcatgggtcaatccacaactgtctaaactgattcagcgttgctgggacgaaaatcctaacctgcgcccctctttctcagagatcactgcagagctggaaggcatgttaagggatcatcaggcctccaagggaagcaacaaacattcgaaggcaaaggcacacaaaaaatcgcagagagaggcagaataacgaggttgtcagttaccaccttgtgaaaagcttagtggagcttggctatcatcgtccaagattctgaggctactacaaagatgctgctagtgtacaattgtcaaatattgtatatgattggtgtgtgtgtgtgtttctattactcccaaaaacactatatacgggagaagcgtcgacaatacagcgggacaagcaaagacacggaatccttgtacaaaatggcttgcaagcagcataaaatgccctctagtttttgtatacaaaacatgaaaaatatatgtgcatgagccgtgcgtgcttcctgtgattctgtatctccatgaatcctgttctttgattctacatctcctgccaaagttacatttcttcttgaatctgaaagtagctctgacgttttctttctgtttcatgagccattgcattcttgggcctggtctgtttgctctataagggcagtaggagaaagggcccacataacgatcatgggccgttatcgtatttacttacgtgatttgccgtgctctcccgtcttctcgcgatggggagcaccggcgacacgacgatggccgaggcggaggcgccggcgccggtgggtgactacgagctgctggagcgcctgggggggcgtcccccgtacacgtccgtgtggcgagcggtctcccggtccaccggcacgcccgtggctgtgaagcaggtgcggctcaccggcctccccgcgcgcctccgcgacagcctcgactgcgaggtccgcttcctcgccgccgtcagccaccccaacatcatccgcctcatcgacgtcgtccagacccagagctgcctttacctcgtcctggagctctgcgagggcggggacctggcggccttcatccggcgcaatgggagcgtagacgagcgcgtggccagaaattttatgaaacagatcggagctggcttacaagtgctgcaccggcaccatgtcgtccaccgggacttgaaacctcaggtttcttggacccggggagtacgcagacacatcttgtggttcttgtttgtacatggccccagaagtgatgctgtttcaaaagtacaatgacaaggtagacatgtggagcatcggcgcgatcctatttgagctcttgaatggctacccgccattctatggcagaagcaacgtgcaggtggctgcccctcttgtctatctggaattctgaattcaacaacactgatggccgtctcccttcagctgcttcagtacatcaacagaagcacgtctctcccgttctcggaaccactggcgtctaccttaggccccgattgtgtcgatatatgcaccaggctactatgcactaatccagtgaagcgtctgtccttccaagagttcttggaccaccgcttcttcagagtatgagtgcccaagccatggggaccaccgggcagcgacatgatctgaagaacatcaagaagtttcttgtccttggagtgctgactgactctgttataaagcgttcagaaattgatgcccagtgctcgtcgtcttggttttctgttcgcgtccatttccttctccaaagagccatgtggccaacgtttcaatctgttgtgatctggtctgtactgtttcaatctgctaacagtaggagttttaaagatatttagtccaaaacagaactccatcttttattcaaagcggcataaactatcccattttattgagcaaacatatgcctatcctttccttgtaccaaagaaaaaactacagggagacaaacaaaccacagaaatgcgaagtggctatcggttcagccactaaactttcaattcaacatcaacaataacccagacaccatgctctcttacgctcggctcgacttctaataaaatgcaatgaatcaagtaccagcatgcatcagttcacagcagccacttccttcagtgactccactgtcttcaagacttcctcccccatccgcttgcatccaaccagtgtctgccaattgataacatgagccactcagaacgagatgaatcaaaattcaaatacaattcatgacttcgcaaactagccactattttcttccacgagactacgaaagagttaatatacttgaggcactatgaaccagagccaacaaagatactatattacactacctgaatgtttgactaatgaggatcttcataccttgtctaggtgaggaccaagtacttgacattaaacatgtagagtataaagctaaaacgctttagccttttttttaatagaggtgggaatagaacttcattaagagaactaaacaatgcaaaagcatgaatgttggattcactccaccaaaattcatgggatggactcatgatggaccatcacaatctcaactaaggatggggtgattcctcaaaccagacacactcgtaatccattgataatggttctgcaagaaaatctatcttactgttccaggagaatatatgt

SEQ ID NO: 30962 - DNA, 2363 bp, Zea Mays
ccacctgtcatctgctacccctgcctccttgaacagaccgggtcgccaccttctcttcgcgctcactgacaagggagggagggaggccacgcccacgctcgactctcttgcctccgtgtacctcctcgcggcgcgtgccgaggtggaggaggagcaggggaaggggagctacctgccgttgcgtgccagctactacaccttccagctcccggatcgaagcacgggtcggttaaagcacggggccccgagcggcacggccgacttggcagcagccagcaggtgaggcggagggagagggatgagcagcctcgctatagtggagaagaagccgccgccgttccccggcggcggctgcacgggcggcgtgctcttccacctcctggactggcaccgccgcctcgcctgcaagcgcaggctcttctccccgcgtcgcctcctcccttcgtccctccgctcctcgtccccacgcaggctcccgtgcccgcctcctgctgcctcgccgccaccgccgacgctgccacatccggccgatggggccgccccgggcgttgtcgcgcgcctcatgggcctggagtcctggcccgccaccgccaccgccgcgccgccgagaccgcagaagcagaggaaggtggaggcgtcgcgcgcggacggcgctgactcggcggtcgtgctcgtgctgcctacgacccggagccgtcgacctcccgcgtccgcgcccgtgccgacggcgaggagccaccacggggccgacctgccagcgcggagcccgaggcggacccgtctcgtgcacgcggccgcggcgaagctgctgcatccgggcgcgcgcgccggctcacgcgcaagcgccaggctggccctcgcgtacgcttgctcttcgccgcagcaccgcaaggatgaccacgccggcaccttgtttcaaggctccggaatgaccgacgacttcctatctcgctctgagagcttgcccttggagcgttctgcactgctacaggtacagcctcctggtcttcctgcggagacagattgtgacaccgctgttgtatcgcgtaggcacgaccattgttccactaataacgtcgatgcagcgatcagtgccagtacggtagtgttgcctagaatgggttttggtgatggaaacaggagtaaacggagctctgatgtggatgctaagcacaaggggagtggaattagaaatgacgtaacgcgcacttgtgccagggctagatcgagcggtgctgccgttcaaactggagatgagaggttgttgcgcaaacgagcaacacctactcggccggaggtttctgggatgccagagtctggggacttggctggttcgacgcgcctagctgggggtgctcgtgacttggtatctgctactaggaagtttgcacacggtggttctggtccaagaagagagttcgcgggatcgatcagtggacaagggagcacgacccacagggatttgaacagccaaaatgggttagcatccacaagtaggatttcaagcaatggatctgggcataaaaggggatcagggagaaaggtggggcatgatagagcaataagtaacagagatgacagaaatgcaattgcatttacttctagatcatctacaaagccagtggccagagcttcgtcacagagcaatctattgaagagtggatccccaaatagactagcacctgatacaactcgcacacgagttctggctcctgaaaaaagatacattgaagcttcaccttcttttatgtctacttccgagaaaggtgaatttagcaggctgttgaaagcaaaaatcaatgagcttggcatgtcggacaggattgagtgtacaccagatgattcaccttcaggaaaactgactgtacctgtgttgcaagagctcatttctgcccttacaaacgacatgagcactccaatctcccaatgtagcaactactctgctgcatcagcacccttaagttgcaatggaaatgttgactgcatcaatgaaccacattgtatattctccaatgatcaatcacctgatttccagaaatgctttaagggtgaacaagatgttgattcttctgccgcatcattaaacaatgagcccaatcagccaagtccaacgtcagtccttgaagcatccttctcaaatgatacttctttaggaagtccagttgaaaaaaatgggcgagatgcttacttattgtcagccagattgtcaattggcctacaattcggcatttcttgcaaaaaaaaggtgcttgtaagtggctgctctgattagagtttatagcgcttagttcagaattatcatgagtggtagaatggaatgagcctgtaaattttgggcatgcactatataagttttggtcatg

SEQ ID NO: 30963 - DNA, 526 bp, Zea Mays
actgacaggatatcgccacatgattctactggggttaaaattcttatattattatctctgtttcattcagggtctaaatatttttaggtttgcaaacagaataccacttctctttgaacaaggtgctgatgtcatcacaagaactgctgcaaaaaggatctcttggagcagctacaaaatcaatcaacagcaagataagattggtgtctttgtgagcattgtaagtacaaagatacctttcaaaggaaccggaaaggagtacattggggatgacataactgaaatatcatctgctgttaagtcagccctgaagcagtgctgtcttcaactgaagtctaagattgtgaagaaacttcaggctcgtgagcggcaggacaggaaaaggaacctgaacaggggatgataccttctaacacactttggcatggaacagacatgaagattttttaacgtatgtctgaaaattcacttccactaggagtggaacccaggcccttaggctaaactaccgggactaaaactggct

SEQ ID NO: 30964 - DNA, 3192 bp, Zea Mays
cactttcccttctgtctggctccgcatcccagtcccagacccggcaagcgccggccatcgccatttcggatccgggcccgctcagcgcgcgggttcccgaacccggccggccggccgcgctcctcgccaccgccgccgccggccatgaagcgcgcgcgcagctccgaggtattcatcggcgtaggccggctgcgcgcacgcaggggcctggcgccgcttctcgcagcggcggctttcgcctacctactgttcgtgtccgtcaagctcacttacctcggcagcgctgggcccgcgcctgccgtcggccgcctggccaccaccggcgcgggcgagccagctgcgcgcgcgcgctcgagcggcggcggggccgtgtccgggtacggccgcatcaccggcgagatcctccggcggcacgaagccttcgaggagcggcggaagcggtgggggcagctggggaacttcacggagctcgagcgcgtggcggccgaagcgtgggcgctcggggccgccgcgtgggaggaggcctctgcgttcgacggcgacgtcgactacatcgcctcccgcgacgtcgccggggagggcacggccaagtgcccaggctcgctcgcgctcggcgccggggagaccacggcgttcctgccgtgcgggctggccgccgggtcggcagttaccgtggttgggacagcgcggacggcgcggccggagtacgtcgaggcgctggagcggagcggcacgggcaacgggacggtgctggtggcgcagttcgcggtggagctgcgcggcctgcgcgctaccgacggcgaggagccgcctaggatactgcacctcaacccgcgcctgcgcggcgactggagcagccgccccgtgctagagatgaacacctgcttccgaatgcagtggggcagggcacagcgctgcgacagtaccccttccggagacgatgacctggtcgatggactaagaaaatgtgagaaatgggactggcaggacgtagttgaatcgaaagaaacaaagacaagctcatggttcaacagattcatcgggcgagcaaagaaaccagaaatgagatggccattcccattttcagaggggaagatgtttgttctcactatccaagctggagtcgaaggataccatatcaatgtgggaggccgccacgttgcctcatttcctcataggatgggattcgccctcgaagacgcaacaggtttagccgtgacagggggcatagatgttcactctgtgtacgcaacagcgcttccaaaggcacatcctagcttttctctccagcaagtcttggaaatgtctgaaaggtggaaggctcgccctgtgccagaggaaccaatccatcttttcatcggcatcctctccgccacaaaccatttcgccgagcgcatggctattaggaaaacttggatgcagtttccggctatccaatcggggaatgcggttgctcggttctttgttgcgctgagccacagaaaggagataaatgcagcactgaagaaggaagcagagtattttggagacatagtcattctgccgttcatcgaccggtatgagctagtggttctgaaaacggttgcgatatgtcaatacggggtgcacaatgtcactgcagattacatcatgaagtgcgacgatgacacctttgtgcggctggatatagtactgcaccaaatcagtacctacaacaaaacctcacctctgtatctgggcaacctgaatctcttgcacaggcctctaagaaggggcaaatgggccgtcacctacgaggaatggccagaagcggtgtatcccccgtacgccaatggacctgggtacgttatctcggccggcattgcgagagacgtagcatcccggcatacaaaccactccctacgggtgaagatgctctttgcatagctcaagctccaaactgatggattctgatgacaagaagtttggaaatgggccaagggagcttactggtgctgttgatttgattaaccactacaaactgctgccacaccatgatttcttttgcaagaaacctttgccactggcaatatcagatacacattatcttcacaatattgtgggagacactgaaattcgaaaaggagaaggaatggagttagatcaacttgttcagaatgcatatatgagggataaacctgcttatattcagcccttcgatatggaaacactggggcaagcgttccaacttcgagaaacagctcctgtggttttgccctctactgaaaagggtataccgactatttcgggtaaaccaaaaagcgagtccaaggacaaagagaagaagcataaaaagcacaaagacagagagagggacaaagacaaggaacataagaagcacaaacatcggcataaggatcggagtaaggacaaagataaagacaaagacaaggataagaaaaaagataagagtggtcatcatgattctgattcaaagaaacatcatgaaaagaagaggaagcacgagggaactgaagattcagcagatgtgcataagcacaagaagagtaagcacaagagttccaaaaccgatgagatggggaatggacttattagttaacacttcctagttctagcttcaatccttgtaatttgctgttaaaaggagactgatggtctctgccatcaaaaccctgtgcagaatagtgatgacaacataagttggagatcttgataagaacgcgataaagaagtatttttgcagagtccattccgaggaaaattaaattacttaatacaggactaatccttcgaactgtgcaaccttctgttcctccctgacgaattggttgtaggagcggttgaaaggatatgccatgagattgtttcgattgcagggccagcgcacttattgatactaggcttcttatttaactcctaatttcggatgtagcgtgcatgagtatcctgttgagtagctgtggatggttttacagttggtctagagatgtagttgagggcagggaattggaaagaatttcgtgttcccgtcgtactgaccttggttgatagagagtttaaccagtagctaaaattaaatgttgctagtcagttccaagttttattctgcgtggaatgaattggagtcaaattagcacactgcttatttaaccatgataaagatcttgttattacaaagtataattattggttcgtggtcggaccttttgcgtg

SEQ ID NO: 30965 - DNA, 2377 bp, Zea Mays
gcacgctgccccgtgattattgcgcttgggagtaccggtagacagtgagcgttactgctggtagcgctagcgcggcgcggcggcggcggcgtaggaggaggggtcggcggcggagatgaggatgaagacgctggcgtgctgccggcggcggcctcaagacttcagcatcgatatggaccaagagcccgacagggtggtgacatataatggcctcgagacctgcattatcaacagttccacctatgacgatgacagtggcatcagtgcaacaacaggcggagatggctgtatcaccactgattcccttgatgatgaagtctctagttgctctagtaaagatgcttctggttcttccttcacttcacacagtcttagcaagcaggaggagcattcactagatgagttgggtacacccatggcaattcatctactccctttcaaagggaagaaaacaatcacatataccttgagtgcttcagatattgaaaacatgaaggaaaaatttgcaaaactattgcttggtgatgatacttcaggaggagctaggggcgtttgtgtggctctggccttgtctaatggcataatcaatctctctgcaactgtctttggagaactctggaagctggaaccactgtgcgaagataaaaagatcaggtggagaaaagaaatggactggttgctgtctcctacaacttatatggttgagctggttccaacaaagcaaagcggagcagatggatgtacatttgagaatcaaagttatgaagggcaggcctggtgtagcggtgagacctgtctcactgagtcggatttgaaatagtttctcagcatttgtggagggaaggcttgtctcgatttatctcgagacctcattcatgtgggagcctctggctctttattcagaatctaacttggttatttttcaactgaaccatgcagattatgactccaaaggcccgctcagatgtccatgtgaaccttcctgcccttcagaagcttgacatgatgctcattgaagtaatggactcaatgatagatacagaattctggtatgaggagagtggcagcagagctgatggtcgggggaaaattacaggtccaaggaagagtaaaaagtggtggctcccgtctcctcgtgtccctgagcaagggctatctcaattccagcggaaaaggcttgtttttcaggctaagcttgttcaccagatcctcaaagccgcaaaatccatcaacgaacaagtcctgtcccatatgcctattccggccgctgtcatggatgcccttccgaagtctgggagggctagcttgggtgaagatttgtatcaggctataaccacagattatattcctgtagaggaaatatttgtttcgctcagtttgaaaaccgagcatagtgtgctcgagactattaaccggttggagggcgccgtgtttgcatggaaccaaagaattctggaggaaagaagcaagaggtccccaggacgccattcctggagcttcatgaaggatagctcgtcggaagttgacaagatgtccgcatgcatcgaaagggttgacgctctcgtgcagcttctgaaatccagatatcccaacctgcccccgacttttatagatgttttaaaggtccaatacaacgtggacgtgggccatgcaatcgtggaggcctacgctagggttcttgttggggtagcgttcagcatattgtcgcgcgtggcggagatactgctggaggatgacctgatcaagaagccgaacacccccatgaccacgctgaagttcgacctctcctctgacgtgtacttggccggcatcaccgagacgccaccgggacacatccggcggtccctgatggaccagatcagcatggtggacgggcgctacgatgccgttgttggcaagaagaaagaagtgaagcagctgaggtggtgagggcagtcagcagctgttgtgtgaatcttttgccgatgtacagggtgatgcggggcccagtgtccgctccacaaggttacctttagcaaatagcgcgatgtaatgtatttttgcgacgagtttatagcgtactgtactgtaagatcagcattaggcgagtcctgcctgtcgaagtctccgggtgttgctgttgcgtctgaacgatctgacgatgctcttggtcagcctctgctgcttttcttgctggcaccttgatgatgatagcatgtcgatgacgagaccttgcttgagtgcttgacgggttcatgctgacgcgtcttccgttctcgaagcgcggtccgtgtttctggggcgtgtggccctgtggagttcgggcttcagagaatgaagggaccgtgcccattcaattcagagaagagaatgaatggaggggccgtgtcaactctga

SEQ ID NO: 30966 - DNA, 2924 bp, Zea Mays
tgaaaacagtcttcttttgcctacatgaaggaagtagctcaaagatcttgctgatcgtgcatgtaagtccaagtgcttcaaatttgtcaagaactttatccacactcagtttttctgcaagagcaagaaatgctgagctgagccttgggaatcgtgacacaataaagaaatggaaagacgtggcaaatgattcacgcaaacaattgcatgacaaagaaaaggaggttctagacctgcggcaagaagttattgggttaaaacattctctaaaagaggctaacgaccagtgcatacttctgttcaatgaagttcaaaaagcctggagagtttcatcttcactccaagctgatctcaagtctgaaaatttaatgcttgccgagaagcacaagactgagaaagagcagaataaccagctaagggatcagatttctcatcttttgaaagttgaacaagagcaaaacctaaagatgcaggaacgggatttaacaattcagtcactacagactaaactcaagtccattgagtctcagcttaatgaagccctcaatgctagcgatgctagatcaactattgggtctgaatctgcttcagtaatttcttccccaaagataacagaatcaactgctgactcatcttcagtgacgaaaaggcttgaggaggaattggcaaaaagggatgcccttattgagaaattacatgaagagaatgagaagctttttgacagacttacagagaagtcaggattaggaagtgctccacaggcttcaagcccttcagcaaacaagccagctaatggtcaaggaagggagataggcaggagtgacagcagcaaaagtcgatcaccagatgtgtttgcatcaccagtgtctcaggataaaactggaaacagtggagctattgtaaaatcaagcaatgagctagcaaaaactacacctgctggggagtaccttacgtctgcactaatggattttgatcctgaccagtttgagggatttgcagcaatagctgatggtgctaataagcttttgatgctggtcttggctgcagttatcaaagctggtgcagctagggagcatgagatacttgccgagatccgtgatgctgtgttttcattcattcgaaagatggaaccgaaaaaagttatggatactatgttagtttcaagagtcaagatattatacatcagatctttgcttgctaaatcacctgaactacagtccatcaaggtctctccagttgagcgtttcttggagaaatcaaatactggtcgaagtagaagttctagtaggggaagtagtcctggcagatctcctgttcaccaccatggtcatggttcccgaactgcgcttgttgatgaacatgtgcatggtttcaaggtgaacattaaacaggaaaagaaatcaaaattctcctcaattgttctgaagcttcgtggtatcgaggaggagacatggagacagcatgttactggagggaagctccgggaaattactgaggaagctaaggccttttcaattggaaacaaggctttagctgctctctttgttcacacgccagctggtgaattacagcgccaaattcgtgcatggcttgctgaaaactttgagtttctatctgtaactggtgcggatgctgctggaggagccgcaggacagcttgaactgctgtcaaccgctattatggatggctggatggctggtcttggtacagcgcagccccctaccactgatgctttaggccagcttttatcagaatacacaaagcgtgtttacacatctcaactacaacacttgaaggacatagctggcacattggcaacggaggaggctgatgatcctgcacatgtcagtaaactccgctctgctctggagtctgtggatcacaaaaggagaaagatcatgcaacaaatgcgaactgacactgccttgttaacaaaagaagaaggtggctcaccaattcgcaatcctcttactgctgcggaggatgcacgattagcatctctcatatctctagataacatcttgaagcaagtcaaggaagtaattagacaaagctctacaggacctatgagaaaatcaaagaggaaagctttgctagagttattggatgacctcttgacacagatgccctctcttcttgatatagatcatccatgtgctcagaagcagatcatggaggcacggaaagttgtcgagtcactgcaagaagaccctgatgatcctgccccacagtctaatgcattgggagagggcgaggtttcacagtggaatgtactgcagttcaacacgggaacgactgcgcctttcatcataaagtgcggagcaaattccagtggtgaactggtgattaaggctgatctgcgagtccaggagcctaaaggtggcgaggtgatccgtgttgttccaagaccaacagttcttgcggacttgagttttgaggaaataaaaggtgtgtttgagcaattgccagaggcagttagcttgcttgccttggcacgaacagcagatggtacaagggccaggtattcaagattgtacagaaccttagccagcaaagtgacggccttgaaagagactgttgcagagatggagagaggtggtgttttcaaagatgtacgataaatgctgtgttattgtagagttatttatgatattgatgttgtatatggatgccatttgtcggcatcccttgtaactgtatttgtttttactatgtggaaacctatgttgtaacactattctttggcaagagatgagccttgcctgccccaacccgtaatactatggttgtgcaaggcattaatgtaaattgtagctgcagctgataaatgtctgcagtgctgcaagtctgaactttccaggttatggaactattcaatgtttatttgtattaagcttttaagatgttaaaattgtgctagtttt

SEQ ID NO: 30967 - DNA, 1816 bp, Zea Mays
ccccttctgccttctctcaccgccacggccactggcattggccgcgctcgccgcccaccgcccaccgcccccgcgccgctgtaggagcgcgcgcttgctttagcgtaggccatggcccactactagcgggtgattagccttgattagcgggcaccactccactgttacgggaggcgcgttgttttaatcgcgggcgcgcgacgcccgtcgcctgtctcgaatatctgctgccgccgccaaaagtgcggattcctcctcctccccgtcgggcggcctcgccccccctggtgcctactgggcgctggcggagtgggagtggatcgacgtgttgcggccgcggagtggaggcaataaagggaaagctgggcggagtgctcgggtaccgtagccggattagttattaatgcccgcgagcagctagtcgtaggcgtaactattttaaggcagctgtcgccgctggggacttgcgaaagcttcgcctcttttgagaagctctgcaccacgcctggctccgccccgctccccctccacctccaggcttccttcacagtctcgctgttgctagtgctgccttgctgctagtgataggggtcccggggccctcaagttctgggtgggcggcaaacatatggtgggcaccgggcgggggaataaggaggaagagaaagaggaggaggagcggcagtagatttgggccgcacaggcagggatggggggcaagtaccgcgcggcgaggacgaagaggtggtggagggggctggcagcggccgggtgggtgctaaccgcggtggtctgctccgcggtgatgcactggaccctgcgccgggacagcatggaccgcgccgaggagcgcctcgtcagcatgtgcgaggagagggccaggatgctgcaggagcagttcggggtcaccgtcaaccacgtccacgccatcgccattctcatctccaccttcaacttcgagaagtcccctccagccatcgaccaggacacctttgcaaaatacacggcaaggacatcatttgagcgaccactgctcaatggggtggcattcgcacagcgtgtattccatcatgagagggaaatgtttgaaagccagcagggatgggttatgaatacgatgcagcgggagcctgcacctccgcaggttgaatacgccccagtgattttctctcaggatacggtttcctaccttgcacgcattgacatgatgtctggggaggaggaccgagaaaacattttccgggccaggactactggcaaagctgtgttaacaaacccattccggttgcttggatcaaaccacttgggagtagttctcacgtttgctgtgtaccgccctgatctccctgctgatgcatcagttgagcaacgtgtggaagcaactattggatatcttggtggagcctttgatgtggagtcacttgtggagaatttgttgagcaaacttgctggcaatcaggatattgtggtaaatgtctatgatgtcacaaatgcttcagatgctatggttttgtatggaccttcaagtttggacgagcaagtgcctttcttgcatgttagcatgttggattttggagatccatttaggaagcatgaaatgagatgcaggtatagacaaaaacttcctatgccgtggtctgccatcaccaatcctttgggcacatttgtcatatggatgcttctagggtatagcattgctgctgcatattctcgatatgacaaagttactgaagattgcagaaagatggaagagctaaaaacacaggcagaagctgctgatgttgcaaaatctcaggtagaggaagatcattggtag

SEQ ID NO: 30968 - DNA, 1676 bp, Zea Mays
gacggcccgctggccttagatgtattgggcccactggcctcacaggtcatatccggcccatgtggtaagactcgaaagctcgaagcgaagcctccctgactacagagaaccggaggactgaggaggaggaggagacgtcacgcctgcgcggctgcgcccaccatggacgaggaggagttccggcgcatgctcgacctcttcccggtcgtccgctcccgagactactgctgcgtaaacctcctcctcctcctcctcctccagccctcgtacccctctcctttttccgtctgcctgtgccgctaagtcccgggctctgatttggggacctcccgaagttccatggagccgcgatctgtggcttggaagcgtagaactcgattgggaattcggggtagcatagaacaatctgcctttctaccggttccagtgatcggatctcctgttgccacacacatttgctggtatagtgcagctccgggtttcgaaatcaacttgatgtttgtttgcagaagtggttgcggtagaggcccatgtagcctttgggggatatataaaaagatgatggcacattagcatcctttgacggaatttacgttactccttttgaaggatgcagtactacaaacaacgaagaaagaaaaacatatccatgttccctgaacagactagtttttctccccttcttttgggtaaaggggactgcccattttctccctttattaacgaagaaaggccctgtagaatgggaaggatacatatcctaatagaccttcccgacaattgctgggaatgcttctaaaacggggttccaggtttagtctattgctcccagcccctcaaaataagcaggctaatattagtcttatactgagcaggctgctgttggcctcttaaagtggggcaaatattagtgacaaactttcaggtagagcgtgacaaagtcgtcgtcatctctgtattgacctacacatagtcctgcaatgtcatgaatgtctgtttctatttgagtccaaggtttgtggttgcgagagtattaaatgggggcatggccgaaggggacagtggctgcgcatttatctaaatagaaaagcgggttgaaccagaacaaagagcaatgtgtttgatatggaatcataaggaatcgtattagatgtccctttgcagaagtaaccgaataaacatgtccgatcttggaacatccagcagaggaaccagacagcgatcacgagttcaggaggcaactaagggcgataataaggactcgtccggtggacgagatatgtttatgcagaaattgaagatggctgcggagaataagattggagcgacaaaggcagagttcttctgcaagacattcgaagaagttcatgagaaacttgttcacagagagctgaatttggatgctgctaagaagttcctgagcgcatatgagagctgatgatgaacaataggtagatgctgttgagcgcatactgataccgcctgattggttcaccgatcgcccgtagccagctcgtatgcagccaggctgtccagagactgttatttgggccgtagaagtggatgcactcaaaataaatgttgcgtttactcgtgcagcctcacgtcttttacgtgcatgcaattaaacatatgctcaataaaatcaatgcatgtgatggtttagaataagaata

SEQ ID NO: 30969 - DNA, 2207 bp, Zea Mays
cgaccgtggggcgctactgtttccatcctcctgctctgacttctctgcttcgtccgatcccctctcccccacctgccagactccccgccgtccaccgctcgccgcccccggccgccatccagccgccggtacagggctcatcctcccggtcgcagccgtgtccacttccttcacgaagagaggcgcgtagactggggagctggagcgaggacaaggagacgagggaaaggatgcagcagctgcaaccgaagcagatgcactgggtgagggccgactcctccgacttcgggggcgaccgtcccgccccccgcagcgggcacactgcggttatcattggcaagtccaaggtggtcgtcttcggaggattcgccgacaagcgcttcctcgctgatgtttccgtctacgacgtcgtttaggtgatttctggatgctagacactgacttatggcaatggtcggagatgactggctttggtgatttaccgtcaccacgagagtttgctgctgcttcagccataggaaacagaaagattgttatgtatggtggatgggatggcaaaaaatggctttcagatgtatacatcatggacacaatgtcactggagtggacagaattagctgttactggatctgtgccacctccaagatgtgggcattcggcaaccatgattgagaagagactccttatatttggaggcagaggtggagcaggaccaataatgggtgatttatgggctttaaagggtattactgaagaagacaatgaggcgccaggttggacacagttgaaacttccagggcaatctccctcaccacgatgcggtcattcagtaacatctggtggaccttatctcttgctgtttggaggacatggaactggtggttggctaagtagatatgatgtgtactataatgaatgcattattttagacagggtatctgttcaatggaagcgcttaccaacaagcaatgaaccacctcctcctcgggcatatcattccataacttccatagggtctcgatttcttttatttggtggctttgatggaaagaatacatttggtgatttgtggtggcttgttcctgaagacgatcctattgcgaaacgagacttagttcctagcatcgattcaaacagcaaacctagcactgtgactgatgataaccagctattgaacctaaaggagtcacaagctctagaaaatccaataacagaattggccaaacgtctggggattgcactttctgaagaagtttcagcaagttttgttgacgaagccaatgataaagaacttgtggaattgtcatctagacttgctggtcaatcgcttccagctagtgaccaggttgcatcaattcaggtacttcgtgatcattggaaaagttctccagcaagctcactacaactacaggaactaggacctttgctgagggactatcaacgcctcatcttgcgacactatacgggaaattcattgccagcttttcgtgaaatggaagctctccgttttttccatctaaaaagtgcttcacagttgcgcatggatgacattcccgtcctgttgagcgagtatggaaggctgctttcaacatgagatggtgtcttgcaagctgtgccctcctgcttggtcctaacagaacttctgctccatgtaatttgcggagaactttctgcctgacaaaagcacacccgtggagccattccttgccatcagttggtctgttagtgcaagtcatagtcgtagcagcgatagcgcactgagctgaattcctttttcttttgaggactggacgcagacgcacacatatttcgtgcagcctggctgggcgctggaatggggtcatggtcatgggctcatggccatccacacgtggttaggcctagcttaggcgaggagctgggcggcgtggcaaacttggcaggccgcccatggtcgcgtggaattccaagaaaacggggttttgtgtgatgtgaggctggaaacctggggggtcagcagcacatgtttccagtctattgcactccctctgaccgaaagggcgctgcactgcaattttattttactacctttgttcaaaaataatgggcgtctccttttcagatgtcaatcagtttcaactttgattagatttagtaaaaaaatctaacatttgttggatcgtattaaatattagtacttttatgtgtatatttgatcacgtttaaga

SEQ ID NO: 30970 - DNA, 4858 bp, Zea Mays
ttatgattctaccagatatgtctttttgattccgtcgaaaatcgattttacggtataggcgcttatgacctcccctctatgccttgcggtaatgattcctctggcattacggcctttaccacaacggtgccgtccatggaccaatttatttcgtggattggatttcacttgcctgtctatggtttccttgcgtgtgctcaggataggtgttttgtataaatgtttcgccgtattattaagtattctcctttagttcgtttctctatctagaagtagaatagaataacccggttgaagggtaatgatcatacgtctgtaatacattgtatgtcccaaaataagtctcattcttctaccctttccgggtagtcgatggcagctaccttaacaccaaagaagagttcgactagttgaactcgaaagctcgaggcccaggcgacgcgacgcggccacgcccacgtccttccatggcgaccgctctccccgcctccgcctccgccgcttgccttctccagctctcccggcgcggtctccctggaacatcttctgtgctctccccgcttcgcaccgccactttccgctggcacggtgcctgtaacgtggcctgttcatgctctcccggcccccggccggcggttcccgcggagcgaagggacggcgtcgctggccatgccacttctccagagggaactgtacgaatcgtcgccgtggttggagaaggtagcatcagcccgattaaggacgcgccctgggaagaggtcatgcgccacacggctgataggctgaagtgggtcgatgaaggatttgaaatgcttgtcttcacggataatttggttggtcatgataacctcaggaaagagttactatcacactgtgatatgctagtcaatgttgcaataacaaatcaggatgctgttcagtggcttataaacaacagcaaacacatttctaatgtaatttgctttcagtcatctccgtctttagtaaacaaactaggtggcacatatgttcagtacactggagagcaggacatgtttgggaagctaacaagtattggaaaaccaagtggcatagaggaatcaactgaagttatgaagaccatatctaatgcttgggaaagacacaattcagatgacattagattttgcttgcttgttgttgtaaatgcatacataagaccggttgctatgctgaaaaatctaagggcaaaaggcctttctaccctaacttgcatgataaagaactgtggtcctcagatactcaattgtctgtttgaccctaactgtaggaaggcccttcagtgtttgaattcctgttctccaactgatcaagtctgcaactatcgttgcattgcatcatatgaaagtccatatctggaggctttttccctctgtgttttgcagaagaacaattgccttgacctcaatgctgagatacccagtaaaccgaatgtaatgccactaaccatgttcagagaacaaaaactaagccatgaaatagcggaagatctttttgttggttggttggacagcatggaatggagttggcgagtggcagctggacaaaatccagcatatgatcaattcccatgtcagtaccagttattttacagagggaaagctaaaggttcattttggtatgagccggtttttcaggtcaaaaccctggaaggggagctggtttggaggcgcaggaggtatcgtgtgagaagggctagcactcctggtacattttacttcagtgtgttggataatggtgtcatttccaaagaatattggacaattgttgacgttgcggaggatttcagctggggtctgttccattatcatggcgcagcacaagctgctgggctatcatacactggagcagtgcttgttactccagatgggtcttatcctgacctggaagacccaagattggcctctgctttagagaactgtgctataaagaaatgggagctctatacagtcgataactgctcctgcatgggtgcaccactgggaactcctgagggttcaaagctgcaccatcaaatttctccaggaaaagaaagtagtgttttgcagagaagatgataatctgtaatatgttaaagtgactcccaaatgattatgtcgtacgtacaaagatgtacagccaagtggacatgtattgctgaagagagctcatatgtaacctgcaggccttatttatatttacagcaacagatcacactggttgcagcaatgcagcctgcactggtgagcagatgtcttcaattctgcatcacctgtgtagagctgcattactgtttgcaagatcagagccgatttcctgccatgttgtgccagtattaaatccctcataacagaacccaggagttctgaacggctgcctgggttgcggctgcggctgcagcccaacagccaaattattatcagcccctctgatttttcttgtactaaattgccttgggatttagtaatctttgattgagtacttgtattagaaattacatctaatgtagtgatgtatttatggtcatcgatgagaccaagagttgactactcgttgtacatctggaataaagatgaagttgtcttgtagatgattcagtattttatacgcactcgtacttttttagcatcttcggtgttcccatcggtacctgtcgaagcatcttgtagtgttcagacagttcagttggctatcagtgcgaaggagacacattggtcaagcagaactgcagaggaggtgtacctgggcagacaagttagagttagcaactgacccacttcactttgattttacgttattgagttgctctgcgatgtacaggtttggatctccttatgttgacccaagttctatatcctacaggtttgttttaaatttggtatactttcataaatgcaattctcacttttcgagaagtaggacaatttaaagtctgactaaaattattttaaaaaggtattaatattgaggatacagaataaatatcattatattgattataaaatatattttggtagtaaacttagttgaagacataaatgttaatgttcctctatagttttagttaaattgaatctagtttgatttgcacacatcccgtagtttggacggaagagtaagctcttgtttttccctgaattgctctgaacaacctgttcctgctttcctgaatcctggtaccatgagaaaaaacatctcatgttgtatatggtttctgctgctgcacaagattccccatgaccccatgtgatgttgcagtttgagtcaacatatgtgattcgtcagtggataatgcaaagttctttttgaacgggatcatatgactagtttgacttggctatgactctgaccgcttttgttttgtggctataaattccatccaacatcagaccctgcaatccgcacttgacagctgataggcaggcgataccgtaccgagagagttgaagctgagaaagaatggcggggctctacgagaagcagtcggagacgtacgccaagaagcgtccgcagtaccccaaggagtggttctccatgctggccagcctcaccgcggggcaccagcgcgcctgggacgccgggtgtggcaccggccaggccgccatcagcatggcggagcactacgagagcgtggtggcgacggacgtgagcgaggggcagctccggcacgccaccgcgcacccgaaggtgcggtacctccacaccccggagcacctctcggaggacgagctggtgtcgctggtcggcggcgagggctccctggacctggtcgtggtggccacctccatccactggttcgacgtcccgctcttctacgccgtcgtgagccgcgccctgcggaagcccggcggcatgctcgccgtgtggggctacaactacgagatccacccgttcgaggacgcgctgcacggccagctctacccggccctgcggccgtacctggacccgcgggcgggactggccatggagcggtacaggtccctgccgttcccgttcgagcccgtcggggtgggcgccgagggcgcgcccgccgacgtggacatcgaggtggagatgacgctggaggacctggtcgggttcctgaacaccggctctgtcgtgaccacggcgagggccaagggcgtggacctggaggcggtcacgagggccgcgctgaagcgtgtggaggagcagtggggcggcgcgcccaccgtgccgaggaagctcgtgttcaaggcgttcatgctcgccgggaggcccaagtgctgaagtgataatgccgaataagtgtttgcttgtcagtcagcgtgagattgagatgagatcacagactacaatacatcatatagccagccactggattatgtctggcgatctaatgacatctgaagccactacatccaacccaggtagaggtagcaaactgcgtattcctttcatgctgtatgcagaatgaagaagaaatacctatttccattgcctagtgaattcccattagtatttcttctttcactggattatgttgtatgcagaatgaagaagaaatacctattttcattgcctagtgaattcccattagtatttcttctttcactggattatgttgtatgcagaatgaagaagaaatacctattttcattgcctagtgaattcccattagtatttcttctttcactggattatgttgtatgcagaatgaagaagaaatacctattttcattgcctagtgaattcccattagtatttcttctttcactggattatgttgtatgagaaaaataattgttgctcgctcatatttcacgtctaagacataagataggcttgacgtgagagaagtgttggaatataatataagagtgtttggtttgaggaatgaaat

SEQ ID NO: 30971 - DNA, 1055 bp, Zea Mays
atgggcaatgtgagcggtcgagcggaagacctcgtggacgccgacattgatgacggcaacaacatgcgacgtgcctcttcctcctctgcgggctacgtccggggcggtgggtcatcatcatccccgccggcgagcccgccgaggccgcattcaccgcggatgttcgtgccccagagtcctgtaactccattgcaaagagctacagaagtgtctcctccggtgttcaaccagatattgatgaatcaacagcaggaggattctgatggcccgcctcaaaagaaaattcccacgttgctcacgtgcactcttggagggaggaatatctacgtagaaggatcatgggacaactggacatcagaaactagttgagaaatccggaaaagatcacaccattctattgatgctttcatctggagttcaccgttatagattcattgtagatggagaaagaagatttatacctgaccttccctgcgaaactgataatgtgggtcagattttgaacctagtagatgtccatgacttcgttcctgacagcgtggaaagtgtatctgagctcatggcccctccctccccggactccagctacggtttccatgttcccggcgaaaaggagttctccaaggagcctcctcagctgccggcccagctctacctcggcgtgctgaattctcggagcactgaagaaggctgcgcgaggccgaggcacgtcgtcctagaccatctctacatcgagaagggctggggcgcacatccgttggtggccctcagctacacccacaggttccgctccaagtacgtgacctgcgtcctgtacaaggccatcgagcggtagcctgaccattgctgtgttgtgggccggcaactatagctagatgtggtggacttagcatttcattcaggtttagaagtctctcctgcataattcgttcatctgctaaactaaagaggtgggtgcaaatccatgtgaatcttgttttttagctgctagagcttacatattgttattattattcgattgttttcttgggagataattgtaaactagtgactaa

SEQ ID NO: 30972 - DNA, 2212 bp, Zea Mays
ctgccacaggcagtggtggatccaggaatggatcaaaggaggggctgctaaaagaagaaccttgataggattaagtgtaggttgttggaaggaacaaatgcccaagatgtacgggcacttgtgttggacatgcaagcaagattacttctggatatgctaggcaaaggaatcgagtctgcccttacaaatccatcaactctgctacctgagccctggcaagcttccagtgatatgttatccagcatcgatgctgacaaaatgactgttgagccagctctgcttccaaacatccagggttacgttgatgctgttcttgatttagcatcacatttcataactcgcttgcggcgttatgcgagtttctgtcgaactctggcgagccatgtggggccatcttctaccacaggcacttctagaaatatggttacaagtccaacaaacagttctccttcgccatcaaataatcaaggtaatcaagggggatcaacatctgcaacagggaactcacaaatgcaggagtgggtccaaggtgcaattgctaagattagtaacaattctgatggtgctgccactgcaacacagaatccaatgagcacgaggacatcatttatgcccatcagcattaatacgggcactttccctggcacacctgctgtgagacttattggggattgccattttcttcatagattatgtcaattactgctattttgtctgcttttccgaagaaggcaatcaccaaggttacttgccagttcgcaaaaaaatcaagattctgccatgcagaaaatacaacacatgatgaatgctaagacagaagataacagttcgacagtaagatctggtctaggggctgccaaagtagaagaaggtcactctgcgcgtggtggacaatttgttcttggtggtgcaaagggtcctgaagaaaatccaattggcaaatctgttagaataggttctggcaacgctgggcaaggttatacttcagatgaggtcaaggtcctttttcttatactggttgacctatgtcgaaggacatctaccttgccgcatccattgcctgcctctcaggttggttccagtagcattatcataaggctgcactacattgacggcaactacacagtgctccctgaggtagtggaagcgtctcttggtccccatatgcagaatatgcctcgtccacgaggagctgatgctgctggacttctacttcgagaattagaactgcaacctcctgcggaagaatggcatagacgcaacatgtttggtggaccctggtcagaaccagatgattttggtccattggacaatatgcctcgtctaaaaattagtggttccatcaactctcatttgtctgacatggaagtggatgctgtcagttccattgggattgatctttggccaagaaagcgtaggttatctgaaagagatgctgcatttggtctgaaaacatctgtaggtcttggaggttatctaggtgtcatgggatctcgaagagatgttgtcacggctgtgtggagaacaggtctcgatggtgattggtacaagtgcatacgttgtttgcggcaaacttgtgcatttgcgcatcctggtgccccaaatcagacaaatgaacgtgaggcttggtggatcagtcggtggagccatgcttgcccaatgtgtgggggttcatgggtgaaagttgtttgagcgctgtatttggcaacaacttcgctgctaattgctttcctgacaaacatgtatggagttccatagttatgcatctaacgctaggctactaggatcaggttcagccgttcatgccagatggttggtctacaggcacatgcacgtggcacgaccactgtggaagtctggtagaattaggagctattctgggggtctgaatatgtaactgacatttgcattatgctgtctagtgtattattaaccagtgactttccttgctaaaaaggtgtagcatcgttacttgttcagcgctggacgtacttttcatgttttgtcaaaggtttagtagcgcatggtgtgtgttggtaaggttctactcctttttctttttaagacaatgatacacagcttccagcgtgttccagaaaaaaaaacaaaagatcaagtattacttcttgggatcgtgttccattaaaaaagagatcaagtattgttccttgggacacgttccagaaaaaaagaaagtattgcctcttggcac

SEQ ID NO: 30973 - DNA, 6514 bp, Zea Mays
atcagagccatcgatcttcggaggagagcaccacggcgccatccaccaagccgtcggtgcaaacgcggctgattctggaagccatggcgggagctgagcagaaaggagaagagcgatgggagcgcatgttgacagcggtggagcgcctgacgggcaagatggaggcgatggaggtcggtcagaggaaggctgaggaggatcgggcgctcatggctcgtcaactgcaggagaccgagcagactgtctcgcgtcttcgactcgagctgctggcgaaggatttggaaggtaacgaatccaactctgagcgagaacaccgtgtccatcgcggggatgagaggggcggaggattcggcagggaaggaggtagagaacggagggagcaatggggtgaaggaagggagttcaggcccagttctctaccgaagtggtcgtttcctaagttccatgggaatgatccaggaatctggtttgataggtgtgtggaatatttcacagtttatcaggtgcccgaatggatctgggcaagcactgcctcgacgcacatggagggaaatgcgtcgaagtggctgcaggtgtataaactgaaacatggtttgggagactgggagcagttcacccatgcggtgagggagaagtttggggtggaagagtaccctcatgccatgagagcgctggtcaatgtgaaacaacagcatggggtagaagaatattcccaggctttcaatgatatcagatatgcagctactttgcataatccggagttggatgagactttgtttgtgacccactatgtgaggggtttgaagcctgagattcagtcccaagtgatggcccggacgcccaagacagtggataaggccatgagattagcccaattatatcaggaaattgccgagaagaataggatgagaagtcagaagggagttatgggaatcaagactcaagcaatagggagtagaagtggaattctgaatcctgaattgaataaggaaaggcagttaagagattatagaagggccaatgggctatgttacatatgtggagacaaatttgaacctgggcatcaagccaaatgtcccaagcgagtagtgactcaaatacatcagttgacagtggaggatatgagcacagttctaactgacgaagtgttgctgaagctggaacaggaggaggagcatatagtggaaggattacatcagctgtcctggaatgccataaaggggacagagtgtgatggttgtatgagggtgctatctctgattcaagatcaggtgctggttatgctgattgactccgggagttccacaacttttattagtcagaggatggtgactaaactggggttgagcacagaagattgtcctcctgtgaaggtgaaggtagctaatggagagatcatggtgtgtgaaaaaaatgtcagagaggtgaagtggaaggctggggggcatgtttatagaactgccatgagggtgttggcgttggaggcttatgatgtgatattagggtatgactggttgaaacagcatagcccaatgcattgtgactggatcaacaaggtgctaaccttctgtgatcaaggggtggaggttaaacttcaaggggaagcagacctaaagagagaggtgcaacaggtgtctgttttgcagttagaaaagtgggtgaagggagatgaagtatgggtgtttgtgatgctggaggaggttaaaggagaggaagatgaggctggaaatgagacactaacaggaattctggaagagtttgcggatgtgtttgcggtgcccacccagttgcctcccactagaccatatgaccatcatatcccactcttgccaggttctataccagtgaattccagaccctacaggtattcaccacatcacaaaactgagattgaaaagcaagtgtcggaactattggctgcgggattgatagttcctagtgtgagtccttttgcctctcctgtgttattggtgcaaaagaaggatggaagttggaggttttgtgtggattacagaaaattgaatgacatgacaattaagaacagatttccaatgcctttggtggaggagatattggatgaattagctggaactaaatttttcacaagtctcgacatgacctcagggtatcaccagatccgaatgggggctgaggatgagttcaaaactgcttttaagacacaccatggtcattatcagttcagggtgatgccatttgggctcaccaatgctccagctagctttcagtgtgccatgaattcaatattgcagagtttcctcagaaaatttgtgatggtttttctagatgacatactcatttacagttccagtttggaggctcacttgcaacatattagactggttttggataagttgagagaacatcagtttatttgaaaatgaagaaatgtacatttatgaaatctgaattgaagtatctggggcatgtgatttcaagagaaggggtatcaactgaccctagtaaaactgaagtaatgttgaactggccccagcccaggaatgtcactgagcttaggggatttcttggccttacaggttactatagaagatttgtgaagaactatgggttgttggctaaacctctcacaaggctgttgcaaaaacagcaagggtttgcatggtcagaagaagctcagatagcttttgaaaacttgaaacaagctatggcctctactccagttctggctttaccaagatttgacttgccatttacggtagaaactgatgcttcagatataggattgggggctgttctgatgcaacaaggcaggcccatagccttcatcagcaaggcattgggtgagaagaacaaacacctttcaatttatgagaaggagtttttggctctgatcctagcagtggacaggtggagacaatatttgcagaggggtgcctttgtgattaaaacagatcacaaatctctgacttatcttggagatcagcagttacagtctgatctgcagaagaaagccatgaccaagcttatgggcttgcagtttcaggtggtgtataaaaagggcacagagaatgtagtggcggatgcattatcaagggtggagcatatgatggggttgtctgttctctctgaaattcagcctatatggattcaagaagtagtgaactcgtatgccacagatgaggatgcacagcaattgatcactcaactgttaattcagagcccggatgaacaggggttttctttgcagcaaggtattatcagaaaagcaaaccggatctggattgggtgcaactcagctctgcgcactaaactaattgcagcactgcatgatagtgcagttggagggcactctggaattcaagcaacatatcagagggtaaagaaggtgttctggtggaagggtttaaaaaatgatgtgacacagtatgtgcagcaatgtgcaatctgtcaaaaggccaaggctgagagggtgcaccccgcagggctgctacagcctttaccagttccgcaaggtatttgggaagatgtgactatggatttcatagaagggttaccaaagtctgaggggtttgataccattctggtagtggtggatagattctcgaaatacagtcatttccttcctctaaagcacccctttactgctaaaggagttgcccaagtatttctcgagaatgtggtgaagttgcatggggttcccagatctatagtgtctgacagagacaaggttttcaccagtgccttttggaaaaatctattccaacttatgggagtgaagttgctgatgtccactgcatatcaccctcaaacggatggtcagagtgagcgagtgaatcagtgcttggaaatgtatctcaggtgtgctgtacatgaccaacctaacaagtggaagagctggctcgctttagctgagtactggtataatactacatatcattcggtgctgggatgtacgcccttcaaggtgttgtatggctatgaagcaccattgcttgttgcaccaaaaacgctgggcatggaagatagggagatagctgactggtttgctgaaaggaatgcattttcagtcatgctaaaggagcagttagcacgagctcagcttcgcatgaagcagtatgctgacaagggcagaactcccagggaatttcaagtgggcgatctggttttgctgaagttacaaccttatgcacaaaagactgtggtgaaccgatcctgtcctaaattggcatttaagtactttggtcctttcaaggtgatatcaaggattggggaggtggcatacaagctcgaattacctggggatgcacaagtacatccggtttttcatgtgtcacaactgaagccattcctgccctgttattctccagttttctcagagctacctcctgcggtggatttgtctcaagggggtatagagccagagcaggtccttgatcgaaggatggtgagaaagggcaatcgagctattgttcaagtgctggtgaaatggagtggggtacctaaggaagctgcaacatgggaggattatgcagtggccagggcacggtttccagaggcaaacgcttggggacaagcgttatctgaggcccggggagatgtcatgactgaagacgcggactgaagtggatctgcgggagatggagtggcgcgaagactggtggaccgagagaaatggtgcattccgattttgggaggcggagtgcttcaagattgatccaacaaacaaaaaagtccactgcagatcagatgttgggacaaacattaatggaaacggtgaatttgtggtggattatgattacctgattgtcagtgttggggctagacctaatactttcaacacgcctggtgttactgagaattgccatttcctaaaggaagtagaggatgctcaaaagatcaggaagagtgtcatgaaatgttttgaaagagctgcccttccaaatctttctgaggaagaacgaaagaagaaccttcattttgttattattggtggtggcccaacaggggtagaatttgctgcagagttgcacgactttgtgaatgaagacttggcaaagttgtatcctgatgttaagaagcacgtaaacatttcagtaattgaagcaggaggtcatatccttacaatgtttgacaaaagaatcacccaatttgctgaagagaagttcaagagggatggcatagatttgaagacaaattttaaagtcgtgaaggtgtctaataaggatattctcatgaccaatcctgctacaggagaggtcgccgttccttatgggatggcagtttggtcaactggaattggaacccgtcccatcattatggattttatgaagcaagttggtcaggagaaccggcgtgtgctagctactgatgagtggcttagggttcaagggtgtgaggatgtatatgctcttggtgattgcgcaacgattgctcaaagaaaagttatggaagatgttgctgccatattccgagtagcagacaaggataactctggcactttaactgtgaagaaaataaaagatgttcttggagacatctatgagagatacccacaagtggaattgtatcttaaatccaaccaaatgaagggcttccatgatctacttaaagactcagatggtagctccaaggagttcaaagaactggacatcgaacagttcaaaagggcccttgctcaagtggactctcaagtcaagatgctcccagcaacagctcaggttgctgcacaagagggaagttacctagcggattgcttcaacagaatgaagatgtgtgaagaatatcctgaggggcctataaggatcagaggtgcagggcgccatcggttcaaacctttcaggtacaagcatcttgggcaattcgctccactgggtggagagcaaactgcttaccaattgccaggtgactgggtacatgttggacacagcacccaatggctgtggtattctgtctatgcaagcaaacaattcagttggcgcacaaggatgctagtcgtatcagattgggggaggcgattcatctttggaagggactccagtagcatataaattgaaatctcccaaatctgtatccacctacgttatatagatgcatgctaccagtactacttgcatcagttttgctgtcccactattttcgaacgtagcctagcaaggtttctgataccaaattttgaccttgccaattcttttgttattcgtattactttggatatatgtttttttatgtagggcactgtgatttctagctatatatgttttgattgtcagtttgagttctgttgccatgggcgatcgagtatttatttttcctaggtttcttatcacatctgctgcctgattggaatctgcaagtttttccttatcactttagttgtataaaaatgtaaccgtgagtgtgaattgacctgttaggatgctgcacatgcaccagaggaaaaaacataaacaaggcataaataattcgagacacatgtcacagagaacctgtcaaccagtaccgtacacatagaggctggagctccaatgctcgagtt

SEQ ID NO: 30974 - DNA, 1326 bp, Zea Mays
aacgaaaataaacacgctctttggttgatgcttgcttgttcgtcctctaaaccacaccgcccggtgaaggcactaggcgcccaattctctcccgctctcccctctgctgcaagtctgcaaccgcagcagcacgtccatttcacgtgccctttcctccctccctttcccctgcccccacgccacctccgttcgccgccgcccgccgcgccggcgatggcgatgaccgaagggcttgtgcctattacgcggacctacctcgcgcgctactacgacaagtacccgctgcccccgctgcccgacgccactacggacctcgccgcccggctccgtgctctctccgccgacctcgctgccgttgctcccatcgccccagatgaggagctcttggaacaagaagcagctggcatacctgcccacaaaattgatgagaatttgtggaagaaccgagaacaaatggaagaaattcttttcttgattaacacatcccatcgtcctgtggctcttcaacagaagtccaccccagaagatgctgagatagtttgtacacttgatgatatagaagctaaattgaaggatatgttgaagaacttagaacaatttcagttgaaaaatgctgacaatgttttcaatacagttatgacatacatgccccaagattttcggggtactctaatcaggcaacagcgagaacgctcagagagaaataagcaagcagaggtagatgctctggttagtgctggtggaagcattcatgatcgatatgcattgttatggaaacagcaaatggaaaggagggtgcaattagcacagcttggttctgcaacaggtgtatataagactcttgttaggtatttggtcggtgttccacaggttttattggattttattcgacaaataaatgacgataatgggcctatggaagaacaaagagaacgttatggtccagccctttacacccttacaaaactggtgcttgcaattcggttgtatttgcatgtctctttggcacgatatggacaaaggaaaatagagaaggatgacgctgctgtgttgcagcaagctgtggttatctacaccaaggagtttttgaagttcactgaattcattggtgaggtctttgtgaatgcaccattctttatatctgctgaggatgcaggtgccgtggatgcaaggaaaagtgatgagtacaaagaaactattattccagctggaaagacacatgaggtcattttgagtgttgaagctgtaaactcatacatcgcatgggacttttccttgcaacaaggggccctcaacatggtattgctcttgaaatgcattagttaa

SEQ ID NO: 30975 - DNA, 1050 bp, Zea Mays
gtggacgtaaaccaacgccagattctggtcgccacgcttggcagttggcaagcagcgagtggggggagacagccaactctctatcctcttcccccctcgtccatccccatcccaccgccttgctctcccctctccacttccagctgtccatggctgcagcagcgtgctcctctgcctcgccgctcctcctcccctcagggccgagacatgcgtcggcctccagggcgtggtttctcggcggcaggagcagggcgctgagatcagaggcgccgtgctgctgcaaggccgccgccgcccgtggaagcgctccgcaatgcgggacggtcggtggtggcagcagcagcacccggagggggctgctaggcgtggccctgggagcctctgccttggggctggccgcgtttgacgccgtcgccgccgggttgccgccggaggagaagcccaagctctgcgacgccgcctgcgaaggcgagctcgaaaatgtgcctatggtaactacagaatccggactgcagtacaaggatatcaaagtgggcgaagggcctagcccacccgttggtttccaggttgcagcaaattatgttgctatggtgccaactgggcagatattcgacaggtgggattcggatagctgatgcctgacgtccagctagagatctgggattttatctctacttcgtttgcaaaacacaactcaactaattattgtcttcacaatcagcttgcagacttagaatctgttcctgtagaattttgttgtttattaggccttgggggatggaagccattctagttcttactgttcttcgctgctctgtgatgcagttcgctggagaaaggtcagccctacatattccgtgttggatcagggcaggtgatcaaggggcttgatgagggaattttgtcgatgaaggttggaggactacgtcggctgtacatacctgggccattagcgttcccctaagggtctttactttctgctcctgggaaggccaagagtacccccaaccagccctgtcgttgtcgacgtcaatttactgtacataccag

SEQ ID NO: 30976 - DNA, 569 bp, Zea Mays
agcatcctcatagtgtgggaacatgaagtcgatggcaacacaacctatcaagtctgtgatggcagcggtgaagacccaaactgttgcaggtggggggcgggcgcctgtttcgattcggcactggagtgtgtttgcgctgttctggagcgcttctgaccatttgacctacatgggagttgagatagcggccgacgactggagcacctgcaggatcgtccttgggcgaggcgtcgagcagctcaaagggagtcttcccaacaacattgttacgtccggacgctccgtcgacgttgtcatcgcagacgatgatacacttcagattgattgacgcagttcagggtagtcgttggtagtcatgcatatagctagaagataagctgttggctgttggtgcatgcttcagagcaaatcaaagggctttcttcctttaatcctttttttttgcttcgtgtggttctttcagccatatgtactatgcagcttgtgaatgtaaagctgtacggaaggtgacatgtttctagcttcgtatatagttggagctcaatacagccaacctggtactcactccg

SEQ ID NO: 30977 - DNA, 162 bp, Zea Mays
cctcagcaagcttcggcaccctggccgtttcaatgtacctaggccggtgcgtcaaaaccttgatctttttccccttcggtgtagcagagatggccgaagtagcaacttttcttttctttccctgctttcgcgagggatagcaatagtcgggatatacaaaac

SEQ ID NO: 30978 - DNA, 2364 bp, Zea Mays
gatttgtgttgtcagctatcccggtttatcttcttattgcattgaacgtgcctaaatgggtgatcaagaagattgataaaatcagaagagctttcttgtggacaggaagaaaagagacaaacagggttacaggggcatttgtttggtagcttggggaggtgaccagacctatcaatctgggcgggcttggtactccaaaccttcaggttgctggatgggctctccaaatacgatggctttggctgaaaaaaaatagatgggtgcaaccttgggccggaattgagatccctgtccatcctaattcacgtgcattgttctccatctctttgatcagccaagtgggctatagcttgaatacattcttttggacagatcgctgggtgcatggatgcgctttagctgatctcatgcctgcagttgttgcttgtgtacctaaaaggttacagagtagacggacagtggctgaggctatggtcgacaggagttgggtgagagatattattagggccctatctatggatggcctgttgcagtatttacagatctgggatgtggtagaaagcagtatcctatctcaagaacctgaccatcacctctgaaagcttgatgcaagcggatattattcatccaaatcctgctacaaagccctctttttggggccatatcttttgagccttggaaacgactttggaaatcttgggctacgtccaaatgcaaaagtttcctttggttggctatccggaacaagtgttggacagcagatcgtctagctttgagaggccaccctaactcaaacagcacctgcgccggaaggcttccagagagatccctgtcaaaaaagtgctgtttgagtttttgttggtctgggatttactccaagaggtgcagctgcatcctaaattcctaatgttgaggaccagcatcggtggatgccatcttcctcggggctgtattcggccagttctgcttatatgcgcttccatggtggtgcaacaacctttgagcctgctaaaagaatctagaagacttggggcccccgcgttgcaagtatttcatttggcttgcatctctcaaccgatgttggacggctgatcgactagcgcgtcatggcatggatcacccagatagttgtcccttgtgtgaccagcaggacgagacagtgcatcacatgctggtggcttgtgtctttacgagggaagtatgatttagaatgctaagcaggctgggactacaacatcttgctcccacgtctgatgctacagggtttcaggaatggtggagtgaggcagaaagatttgtgtctaagcataagaaaaaaagtttcaactctattgtaattttagtagcttggcagatttggaagcatagaaatgcgtgtgtgtttgacaatgcttccccaaacatccacgcaattttgctgtccatccatgatgaggctttgttatggggccttggtggggccgctgctcttaggcaggtttggctgtagtttgatttttgttttttcccttgggtgctttcttggcacctttgtacggggtcttttctagactttttttttcttgtcttcttaatatattgatacgtggttctcccacgtgttcgagttaaaagactgttttttgatgagttgatctgttgggagaaggctggtgctaaatatcttgaaaatcttggactcgcagctgctttaaatagggtcttggctaacactagtgctgcagtctagtctagtcaggcctgcctgcacccatgcttccgtttcttctcttgtgttgctgtagaggaggcaggggtgctagtttagtattgccttggtccagttgttttcaccctatgggttttgtactctggtccattttggacatttttttcctatcttaatataatgatgcgcagctctcctgcgcgttcgagagaaaaaaacattctcacgacctgcgtttttacaaggcaattttggcaccatttgttgccccactggggttgggtggtatttctcctagacagaacgaggtctgtttcgcggaatggtggaggaaatcaagccggcgagtgaagaaagatagaagggaaggttttcattctttcgttatttttggtgcttggaccctttggaataagagaaatatttatgtttttgagggtgcctctccttccctttcggtagcccaaaacttcagcagagaagaagttagattgtggtgtttggctggagctgctaagctccaggttttagtgagtgggtgggtgatttttggtcatggagggatggcttaactctctcctttctagaggtccctcttgtttgtgtcaggcgcggattcgtctttgttttttctcaactcctttcctcccaagttg

SEQ ID NO: 30979 - DNA, 6442 bp, Zea Mays
cattgaaacatacgaacgcgcgcgcgtgcacaggccacagccagccgcgagatacaacatacaacgcgcgcgcacgaaatccacaccacaccaatccaagaacagatccacatcaccgctcccccttcctttctttccttggttgctgacctccgcatcgagggaaaaaaggactactgccagggcaggcagcgcagcgggacggaagagcatcaaacgccatcaccagcagaagcagcagcagcaagtcaataataaaagtcggaggcatcaaatccaaaaggtttttattagcatggaagcgatccaaacccctgaccaattcgggacgagcagcaggcggagggggagttgcatctgtgccctctcctgttgctcctcctcgcggtcgcgcgcgcccgggtcctgttgttccgcgctggggtgcgcccgccgatcctgttctacttcgcgtctgggctgcgacgttacctactgccgccgtcacccattggtggaattcgtggcgcggatcgagccgcgggcttgcttccggctcggtgcctgtgtatttattcgcggaaatcgccctagcgtgtgattaggtttgttgttcttctgtgtggcctagtcttcgcgtgttgtggtttgttgtccgctggaggcgaatctagggttacggtcgtccgggatggagtcctccgacgacgggggctccgggccgctgctgctggcggcggggatggggagtcccggccattcgttggtccccgcggccgtcggcggtgcgagtagcgcacctggcgcctccggatccggggggaagccgccggtgaagcgcgtcatgaagacgccctaccagctggaggttctggagaggacgtatgcagaggattcgtacccaaacgagacgaagcgggcggagctatcggtgcagttaaacctcacggacaggcagctgcagatgtggttctgccaccgccggctcaaggaccggaaaccgctggccaagaggcaactgagggacgacgaggttagcgccccagtcatagcgccatcacctgtgcttccgcctccatcgccgcccagcgagatgatagcggggactgttggaacctatcgtgagcagctgccaccctattccaggagagggcctgaccggccatccgtgcctaggctatctgtgcccgagattgggaggagatactacgaacctccacaagttatgctgcctcacatggcaccagtgcaccttacacaagcggagcatcgggtgatcaattctgtagaagcacttataggggagcctttgagggatgatgggccagtgcttggtattgaatttgatccacttcctcctggtgcatttggcacacctatagttcctgagccaccaaggcagcccttccgatcatatgataccaagatgttttttgggcatgattccaaacccatgaaggctttggcatttttgcctgccacagaccctttacttccaaatagagggaaacagaagtccttggttgggtcttctcatcttggctcacaggcagtacatgaatatcaatttcttcctgagcagccaagtgacacatatgagagggcaagccagtcacacttctataatgctccagcagaggcatcaaacttgagggtagctcctctgtctacaggttcacgctttctacatggacttgagcaggcacctagctatacgtttcacagtcaatcatctggttctagccattcggctcatcgtggcagatcgccgattgcattggcattgacagatcatgagggggctttgtcaaatattaatgttagcccaactccaatccatggcaaatttagcatccctcaagttgctggatttgaaagctccctcgcatcctctgaaagaatgggatatcatgatgatgatacatatcgtgtggacagaaagcgcaagcataatgaggaagctaagactgttagggaggttgaggctcatgaaaagagaatcagaaaggagcttgagaagcaagatctgctgaatagaaagagagaagaacaaatgcagagggaaacagagagacttggtcgtgagagacgaaaggaagaggagaggttgatgcgtgaaaggcagagggaagaagagaaattccaaagggaacaaagacgtgcacacaagcgtatggaaaagtttatgcagaaacaatctataagagctgaaaaactaagacaaaaagaggagcttcgacgagagaaagaagcagcgaagcagaaggctgctaatgagagggctacagcacgtagaatcgcgcgggagagtatggaactgatggaagatgagcgcttagaattattagaactggcctctcgtagtaaagggctcctctcaatggtttctcttgatagtgacacattacagcagcttgattcatttagaggaatgctgggaaagtttcctcctgaaactgtgagactgaaggtgcctttttcaataaaaccatgggcagattccgaggatattattggaaaccttttgatggtttggaagttctttgttacctttggtgatgttcttgggcttccatcattcacattggatgagttcgtgcaggctcttcatgattatgattcaaggctcttaggtgaattgcatattgctctgttgaaatctatcattaaagatattgaggatgttgcccggactccttcagttgctttaggtgtaaatcagagcagttctgccaatcctggaggtggtcacccacaaattgttgaaggggcgtatgcttggggcatcaacatacttaactggcagcaccacttgaactttcttacatggccagaaatattgcgccaatttggtttatgtgctggttttgggcctcagttaaagaaaagcaatgctgaaattgtccatcaccgtgacaataacgaggtctcgacaccgtctgacacctggaacagtaaagtttgctgctttctatgtactgtcacttgaagggagcagaggtctcacgatattggaagttgcagaaaagatccagaaatctggactgagagaccttacaacaagtaagacaccagaggcatctgtatctgcggcattgtcgagagacactaagctttttgaaagaacagcaccttcgacatattgtgttaaaactccttacagaaaggacccagatgactctgaggctgtgttgtcagcagcacgtgaaaaaatcagggtttttcagaatacactttcagagtgtgaagaagtggagaaggatgtggatgaggctgagagggatgaggattctgaatgtgatgatgctactgatgacgctgatggtgacgacgtgaatattgagggcaaggatgccaagtctcctctagttggagctcaatatgacacacaaattacagtagttggtgatgtaaagaaagaatcaaacagtgtgatgaacatatcagtgccaccaagcattcaaattaaatctagtgcaagtgtaccgttgcatactttagacagtaaagcaagtagttcaactgacccacaagttggagatgatgataaagacactgagatagatgaaagtaaccaaggggagtcctgggtacaggggttagctgagggtgactattgtgatcttagtgtggacgaacggctcaatgctttcgttgcgcttattggtgttgccacagaaggaaattctatccgtgcaattctggagactttacaggaacgcctagaagcagcaagtgctttgaaaaaacaaatgtgggctgaggcacaacttgataagaggcgttcaagggatgactttactagtaaggtgcagtatgattcttgtgtgggtataaaggttgatacagatcaaaaaaataatgctgctgaaagtacacttgtgccagtggataaccctattagaaacaacaacggaaattccagtttgacgaacaacgatttacttgttgataagcagaaccagcttattactggtgatgtatttcaacaatggaatggtgtaagccaagaattgagtactaaccccgaaagcttgtctgttcagcaatatgcttcatctgagaaaactagatctcagttgaaatctttcataggtcacaaggcagaacagctatacgtgtacagatcgctaccccttggacaagatcggagacggaaccggtattggcagttttctgcatcttcatcatcctatgaccctggttcgggaagagtcttttttgaatctagagatggatattggagggtcattgattcatctgaggcgtttgaagctttggtatcttcccttgatactcgtggcatccgtgagtcacatctacactcaatgttgcaaagtatcgagccaacttttagggaagctgttgagaggaagaagtgtgttagtttagaacacacaactgggtggactgacaatggaagtaatgaaagtccaaactgcaacaatgagtttggaagtccatgcagtaccctttctggtgttgcttctgataatcttatggcatattcagatactttcaagatagaaattgggcacaacgaagctgagaaaagttctatctcgaaaagggcttctgtgtttctgaaatggatgtggagagagtgctactgtcaccaatccacgtacaccatgaaatatggaaagaagcggtgccctgagttgattcaatcttgtgaccattgctaccagatatacttagctgaagaacaacactgttcttcttgtcacaagtcattcaaacccattcacaatttcttggagcacttatcacaatgcgaagataatcagagaacaaatcctagttggaagacacaaattgtgggcctttctgtacccgtaggattgagattgctgaggttgctcttagctaccattgaggcttcagtaccggcagaagctctcctacctttttggacggatttgtatcgaaaatcttggggtgtgaagttgtattctgcatcatctgctgaagaagtcttgcagatgcttagtgtgctggaaagtgcaataaagcgagattacttatcatctaattttgaaacgacaactgagttgcttaattcaaacacacaagatgctacccagaattcagttggaggttctggatctgccactatacttccatgggttcctgacaccaccgctgctgtcgccttaagattgttagacttggatacttccatctcatacaaacttcattcaaagttggtttcaaataaggagcaagaagctggagatttcatgaagcttccactgagatacccttctattaataagaacaaacaagaaatagaacagttcatacctattggttttgatcaacaggatggaacattgctaactaacagcaatggccgtagaggtcgtggacggggaggtagaggtggaaggggaagtagaggaggtagcaggggaggtagttctcgtggtggtggtggtagggttcccaggggtattggtagctcatccaggattcagttcagggatgacaatagtgtgccctatgggagagcccctcgaaagaatgtacgtggtgggcgtacccgtggccgcggccgcggccgtggacttcgaactgtcagacctcggcaaccatctgaattcagtgccacatcaattccaaagttaaacctattgggcagctttagcatgttaagtaaggcaaatcacactggcaatatgcattctccagagagcttgggtgcagaagagtgggtcttggagagaagggaatatgtcaaggatgatgatgacaatttggtctctcgatatgatgagtcagaggaggaaaatggtgagcctatgaatgaggaatatgatgagcagatctcaggctatccaagggacaattctgagttcagccccatacagatgatgggtgatgtgagccacgatgaggatgctgaaggggatgagggcgaggaggatggagaggactatgaaactgaagatcctgctggtgatgaggatgatgacgttgagatggattgggatgatgacattcgggacaacgatgatggtaatggagcagccaacgcagatgaggatgaaggtggtacatcatcatattcttcagagtatagtgagtgatgagagtggattgaagttgtgcaggtttgtggtttgccaactatgtaagaggctgccagttctaaactgtgctgtggctatggccctatttctattcatttttaactaaaatttatttagggtcttatcattttgttaagaatcatttggatggtgacccattaccatctctagttgtggctcgttattgcatagaagctagccgacagtggaagatcggctttgtacagggatgttcgaaacttcgaatcaggttatttgtggtgtatatataatgccaaattaccaatcacaagaagtaaaaaaaaagtcattcactgtctgtttttttgttcttcagctacatttttcattgctatatatagggagag

SEQ ID NO: 30980 - DNA, 1774 bp, Zea Mays
ctatagaggagaacattctcaagaaagcaaatcagaaacgagctcttgatgatttagtgatacaacgaggtagctacaatacggaattcttcaagaaacttgatcctatggaattcttttccgggcacacatctcttcatgcagaagatcaggagaagaattgctctacaacctcaggagtttcaaatgatgttgatctggctctgtcaattgcagatgttgaagcagctattagacaagcagaagatgaagctgactatatggctctcaagaagctggaggaggaagaagccgtggacaatcaagaattcagtgaggaggctgcgggcagacaagaggaggatgaattggttaatgaggagaatggaaaacccgatgagcacattaacgaagaacaaaaatataactcttctgatgtagagaaggagaagcacattactctgtctaccaatcgattaaataaggaaaaggctcttacattggctgttggtgatgaagatactgacatgcttgctgatgtgaaacagatggcagctgcagcagctgcagcaggacaagcgagttcatcatttgagaaccagctccggccaattgatagatatgcaatgcgctttatggaactctgggatccagtaattgacaaagctgctttaaatcatcaagtaaatgttgaggaggaagaatgggagcttgatcgtattgaaaaattcaaagaggatttagaagcagaaattgatgaggaccaagaaccactttcttatgaatcatgggatgttgattttgctacgacagcctatcggcaacatgttgaggctttaactcaaaagcagttgttagaagaacaggaaaggcaagctcaggaagcaacaaaagagttggaggagaagaatgataatatgagtcaccacagaaagtcaaaaaagaacaaaaagaagacaggcaaactcaagcccctgaaaagagtgcgtctgtcgcctgaatcagaagtcatactggaggaaacctctgtagataatgcaccctcacctgagcttacaagtgatgaatcgccacaccattattgtaacaagcgtaagaagattacggttgccactgaggaaaatagtaacagcagaagtttaaagaagctcaagaaaactactaaatcaagttttatttctgaagccttgtcacctaggctgaaggaggaccttaatgattcagattcaaaatcagtgggtagaactaaaagtgatggcagatttttcatcccttgcatgccagtgaaacgtgttattgtaataaagcctgagagattgaaaaggaagggaatatggtctcgagattgtgcttcagactcatggtcatctgaggaagatgcagttctttgtggaactgttcatgagtatggtccactttgggaattggcaagtgattttcttcattttttgccaggcggttccttgtataggggaagatatcatcatcctgtgcattgctgtgagagatacagagaactgttctgcaaacatggaatgtcagcaacagataattctaacagtgaaaaggttccttctgggactggaaaggctatacttagagtgtctgaggcagtgcatgttttgcttgttggcgtctacattgacgactaggttatcgtcgggtaaatcggttcaagacgagatcaatcggttgaaggacaagatgaaggcacaatttctgatgaccggccttgggctcctttcgtacttggggattgaggtacaccaaggctcgaatggtattatcttgaata

SEQ ID NO: 30981 - DNA, 6636 bp, Zea Mays
  misc_feature (6635)..(6636): n is a, c, g, or t
gcccgcttgatgctgaacctggttgagcccatatatcaaaaaggtgttgaccagcaaagcatggacgaagcacgagttttattggggcgcatattggatgcattcgttgggaagtttaggaccctgaagcgaacaatccctcagttgcttgaagaaggtgaggaagggaaggaacaaccgaatctgagaatgaagcttgaagtcccattacagactgtgctgaatttgcagcaacctttggagtatactaaggaaatcaacgattacaaaagtctgataaagactcttgctgtcggaatgaagacaataatatggagcataacccatgctcactggccacgcccccagcaacaaaatcaacagtcttccaatttgtcacttcaacacttcagggggctgagggaggatgaggtgcggaagacatctggtgttctgaagtctggcgttcactgtctggctctttttaaggaaaaagacgatgatagggaaattctgcaatcattttcgcagatgctggctataatggaagctcgtgatattatggatatgttctccttttgcatgtctgacctctttgattctatgataaccaacaaccagctattgcacatattttcaacccttttgcaagctcccaaggttctgcggcctttcacagatgtattaattaatttccttgttagctcaaagcttgaagccctgaagcagccagattcacctgctgcaaagcttgttttgcaacttttccggttcttgttcattgctgcagctaaagctccagaaagctgtgaacgcacacttcagccacacgtgccggttataatggaagtctgcatgaggagtgccactgaagttgagaaacccctaggttacatgcaccttcttcgaaacatgtttcgtgcattgaacagtgctaaatttgattcattgatgcgtgatcttataccatctctgcaaccctgcctcaatatgttactctccatgcttgatgaagtcattcttgctttatggtctcatttaaggcctcctccatacacatggggcacaaagtctttggaacttttagggaagctggggggacgaaataggcgatttttgcgggagcctcttgcacttgaatccaaggaaaatccggagcatggattacgtttagttctgacttttgagcctgcgacaccttttttggttcctctggacagatgcatacaccaagctgttggtgcagttatgcaaggcaatggcttggaagcattctacaggaagaaggctcttcaattcattcgggtgtgcctcgattctttgttaaatctgagggaaaatgtacctggcgagggtgtgagccctggtgttctcggtacattgctaatctctaacctggatccctcaagacgtcggaatgatgcttcagatatgaagggagatttaggtgtgaagacaaaaacacaactactggctgaaaaatctgttttcaagactcttcttgtagctatcattgcagctaatgctgacaccagtcttcatgatgagaaggatgattatgttgtcgatatatgccggcattttgctatgcttttccatgttgactcaccatcctccagccaatctggatttatgcatcctattggttcttcactcccatctatcatcatgggatcaagatcaagatgcaacacttcatctaatctccgggagctggaccctttaatatttttggatgctttagttgaagtgctatccagcgaaaatcgtcaacatgcaaaagctgccctatctgctttgaatatttttgccgagacattaatctttcttgcacggatgaaacacactggtatgctaaggggaggtcctagcacccccatgctagtctctagtccatctttaaatccagtatattcacctcccccaagtgtgcgggttgctgtatttgaggaattgttacctcggttattgcattgttgctacagtagcacatggcaagctcagatgggtggtgtaatgggtctcggggcattggtcggtaaagtgtctgtggataccctatgcatttttcaggtcagagtcgtgcgtggtcttctttttgttcttaagaggttaccagtgcatgcaaacaaagagcaggaggagacaaatcatgtcctaacacaagtacttagagtagtaaacaacgcagatgaagcaaacagtgaacctcgacggcaaagttttcagggagttgttgaattccttgcacaggagttgtttaacccaaacgcttcaatggttgtgagaaagaacgtgcaggcttgcttatcactgcttgcaagcagaactggcagtgaggtttctgaattgcttgagcctctctatttgccattgcttcagcctctgatttcacgacctcttcgttcgaagaatattgagcaacaggtgggcaccgttactgctttgaacttctgtcttgcactcagaccaccccttctaaaactatctcctgaacttgtcaattttttgcaagaagcactacaaattgccgaggctgatgaaactatatgggtcactaggatgatgaatgcgaaagtagttctcacatggaacaaactcagaaccgcatgcattgaactactctgtactgcaatggcatggggagatctaaaagctcaaaatcatactgaattgcgagcaaagattatttcaatgtttttcaaatctctaacatgcagaacaacagagattgtcaatgttgctaaggagggacttcgtcaggtggttcaacagcaaaggatgccaaaggatcttctacagagcagcttaaggcccattctagtaaacttagcaaacacaaagagccttagcatgccattgctacaaggattggctcgcctgcttgaattactgtcaaattggtttaatgtcactttgggtgccaagctattggatcacttgaaaaaatggctggagccagaaaagcttgtccagactcaaaaatcttggaaggctggagatgaaccaaaaatagcagcagctatgatcgagctgtttcaccttcttcccccggcagcaagcaaattcttggatgaccttgttaccttggtaattgatctggaaagggcacttcctgaagatcagttttacagtgagatcaacagtccataccgtgctccactggcaaaatttttgaatcgttatgttctggaggctgttgactattttcttgctcgattaagccatccaaagtatttcaggaggtttatgtacataatctgctcggatactggggacctaagggatgcacttgcaaggtcacctcagaaaatacttgcaagtgccttttctcagttttactctcaaagtgaagcatctgctgctcaattatcttctgtaaaggatgaagcccttactggggctgtatctgagagtattactgtacaatcttcatcaaacatggttactacttctgagagttactttaatggattagagcttgtctcagcccttgtgaaattgatgccagagtggctccgtaacaaccgggttgtctttgacaccttgctacttgcttggaaatcacctgcaagacttgcgaggttgcagaacgagcaggatttgagtttaccccaggtgatggaaagcaagaggctgatcaaatgcttcctgaattacttaagacacgatcgaactgaagttggtgcactctttgatatgttatcagtattcttgtaccgcagtcgtatagattatagctttcttaaggaattttatgtcatagaggttgctgaaggatactccccgaatttgaagaaaactatccttaatcattttctgaacattttccagtcaaaacaatatggacaagatcatttagttgttaccatgcagattcttatacttccaatgctagctcattcatttcaaaatggacaaagttgggaagttgttgatcctactataattaaaactattgttgagaagcttcttgatcctccagaagaggtcagcgctgaatacgacgaaccattgaggatagaacttcttcagctagctacattacttttgaagtatctacagactgatcttgttcaccatcgaaaggaactcataaagtttggttggaatcatctcaagcgtgaagataactcgagcaaacagtgggcctttgtgaatgtttgtcatttcttagaggcctatcaagctcctgaaaagattattttacagctgaagcttattgttcgccatgcggacctcttctatagttgcagagcccactttgttcctcagatggtcaactctcttagtcgccttggattaccatacaacacaacagcggaaaatagaaggcttgcaattgaacttgctgggttggtagtggcatgggaaagacagagacaaagtgagatgaaagtggcgcaggaaagtgagagccagaatcaattaggtgacatgcttaatccttctgttattggtggtgatccaaaacgctcctctgatgttccgtcgtttgctgatgatttgagtctacctgatgaggagtataaacctaatgcagcaatggaggagatgatcattaccttcctaattagggtatcacttgtgattgagcctaaggataaggaatctagctcaatgtacaagcaagctcttgatctactgactcaagctctggaagtctggccaaatgccaatgttaaattcaattatctggagaaattacttgggaatctgtcacccactcctcagtccaaggaccctgcatcagccctcgcacaaggacttgatgttatgaacaaagtcttggagaaacaaccccgtctcttcatccgaaataacatcaatcatatttctcaaatactggaaccttgctttggcaacaaaatgctggatgctggaaagtcactttgttccttgctcaagatggtgttcagtgcttttcctcttgaagcagcaacaacgccacaagatataaagttgttgcatcaaagggttcaagaactcattcacaagaatcttgctgctgttacaactcagcagatagcacttgagctcaacaatgctcactcaatcattagcttttcattgtttgtcctcaatgcacttgcagaagtacagaagaatttcattgacccgttcattggcttgcttttccgtgttctgcaacgtcttgcacgtgacatggggtcttctgctggcagccatatccgacaaggacagaggcctgaactggattcatcagttaactcacggtctaccatagattctactgtcatatctaacatgaagactgtcttaaaacttataagtgagagggtgatgtcctcttctgaccacagaaaatctatgggccaaatacttcaagctcttctttcagagaaaggcactgattccagcattcttctgtgcatgctagacatgataaaaacttggattgaggaagattgtaggcttgcttcatcaactggttctgttagttcacttaacccaaaggaaataataacttatcttcataagttatcattagttgacagaaaaagctttcctccagctgcacaagaagaatgggatgcaaaatacttgcagcttctttattcactgtgtgcagattcaaccaagtatccgttgtcttttcggcaagaatttttccataagattgagagacagtatatgcttggacttagagctaaagatccagaaatgaggaagcgattcttcaagctttaccatgatacagtgggaaaaacattattttctagattgcaatttataatacagttacaggactgggaagctgtgagtgatgttttctggttgaagcaaggtcttgatctcgttttggcaatattagtagaaaatgaaccaattacacttgcagcaaattctgctcgagtaccaacgcttatgatagctgggcctgttccagatcgcatcaccatgccacagcaggttcctgatgctcaggaaagcatggatggtacaacactatcgtttgactctcttgctgcaaggcatgctcagttcttaaatgacgcgaacaagcttgtggtggcagatatcatggctccattgaaggaacttgcatttgctgatcccaatgttgcatatcatttgtgggtgcttgttttcccaattgtttgggtcaccttacataaagaggaacaagttgccctagctaagccaataatcgcgcttctatcgaaagattaccacaagaggcagcagggctgcagacctaacgttgctcaggcacttcttgagggtcttcatttgagccatccccaaccacgcatgcctagtgagcttatcaaatatattggaaaaacttgcaatgtgtggtatattgcaattgcattactcgagagtcatatagtgcatatgaatgaggccaagtgctccgagtcattggctgagttatacagacttcttaatgaagacgacatgaggtgtggattatggaagagaaaatcaatcactgcagaaacaagggctggtctttcacttgcccagcatggttactggcaacaagcacaaaatctattttaccaggctatgattaaagctactcagggaacatacaataataccgtcccaaaggctgaaatgtgcctttgggaggaacagtggttgtcctgtgcgtctcatttaggtcagtgggaagtcttagctgnn

SEQ ID NO: 30982 - DNA, 3320 bp, Zea Mays
ccgcaattcaacacgcgaagctaaaaaagaaaaaaacaattcgaaacccccgacctacgcgaggacaaaacagcaaaaccaaagcgctcagccgctcgcgaggagcgaaaggcgagcgcgcagccgggcgcccgtggcggaggcgaaacccccgccgccgcatcgccctgagaccctccggttcggcccgggccgagctcgagcccgcgcaatctcgccgccggcgggcttgatctgatccaaggccaccgcgcgccggcgcgggcggcgaggaatggggagcgtggacggccgcggggtcgaggggatccacgaagctaatcggcgcgcgcagttgattggatggatgaatgccttactcccggaattcagtttgcctccggattcatcgagtgaagagctgcgagagctgctcagtgacggcgtggtcctgtgccgtcttgtgaacacactcatcccgggggttcttgagggatcctgggagggttatgcaccgtcagatcagaggttaggcaacgtgaagaaattcctctcggtggtctctgatatggggctgccaggcttcagtttgaaagatcttgatgagggattaatgtcttctgtagtggaatgtctcttggttttgaggggcagtgtggatcctagattaggtgatgatattccaccagatgttaccagaactcctttgagaaaacaatggggagttcaggaaatggacaagcctcaagttcccgctgcagcactagggaaaagatcccctgcagaggacatgagaaacggcgttgcagattccaaaacccatcagaaaacttctgtcttttctggacaaaaggttcgtgaagttttccaattaaaacgcggatcatattcagatcttactgctgccaagatttcagagatgatgcactctaatagcttagataatgcaccgacacagtcgcttattagtgttgttaatggtattttggatgaaagcatagaaaggaaaaagggagaaataccacatcgtgtagtttacttactgcggaaagtcgttcaagagattgagcaccgtctctgtattcaagcagagcacataagaagtcaaaatgttaccatcaagacaagagaacaaaagtactgttcaaaaattaaagcacttgaaatgttggtaaatggcacaaatgaagaaaaccagatggcaataaacaggcttcagatagtcaagaatgagaagtcacaaatcgaagagaaaaaagaactctgtgagaaagatgttcaacgattaatgaaagagaaagaatattccaaaagcatcataatgaacctaacaaaagatatggaagccatgaatagattgcatgagcagcaacttgagcaaattggaagaaaggcaaaggaaatggaggaacaattaaccaccagggtaaaagaagtagagtatctcttgctacaatcgaataagaaagttgaagaacttgagattgcttctaggctaaaatcacagttatgggatcagaaagagaacatttttcagagttacatggataatcaacaattagttatcaaggtaatataagagtatattgtcgtgttaggccatttctttccggtcaagataaaaagtccaccacaattgactacatgggggaaaatggtgagcttcttatatcaaatccatttaagcaagggaaggacggacatagaatgttcaagtttaataaagtgtttactccatttgcttcccaagctgaggttttttctgacatacaaccactgatccgatcagttctggatggattcaacgtttgtatttttgcatatggccagactggttctggcaaaacttacactatggagaaatgccttctcatatgaggtgggggtacaaatggttgagatatacaatgaacaagtccgtgatctgctatcaaatgatattgcacaaagaagacttgggatttggaacacttctcaacccaatgggcttgttgttccagatgcaagcttgcactcagttaagtcgacatctgatgtattagacttgatggagattggacaagcaaatagagcagttggttcaacagcgctaaatgaacgaagtagtcggtcacacagtattctaactgtacatgttcgagggatggatttgaagaatggatcaacctctaggggttgtttgcatcttattgatcttgctggtagtgagagggtagagaagtctgaagtaaccggcgatagattaaaagaagctcaatacattaacaaatcactctctgcgttaggtgatgttatttttgctttgtcacagaaaagtgcccatgtgccttatagaaacagcaagttaacacaagttcttcaaagttctttaggtggacaagcaaaaactctaatgtttgttcagataaatcctgatgttgagtcatattcagaaactataagtactttaaagtttgctgaaagggtgtctggagtagagttaggtgctgctagaagtaacaaggagggaaaagatataaaagagctattggaacaggttgcgtctttgaaagacacaattttgcgcaaagatatggaaatagagcagatccaggtcatcaaagacaaagtaaaatccccaaatttgttgttagatagaaatgtgcctggcttgacgaagactacagcaaaccaacctagccaactattatcaggcgaacgaatgcttaagtctagtgacagagttctatcggatcgtcagagttacggcgaggtgaatgtagatcctaaccaccatgtgatggatactgcaccagtgagcatagatgaagcaggatatgagaacaatgcatcggatgatggtttatcgggtgaaaccgagaatgataattcagctgctgagatgacagcggaacggctgcatagatttccatcaagaataagcaggttcactctcacaaagaacgggcagccatctatgtctagatcgaacccaaaggatgctaagactccaagcaatacgaaagctccatcgagccggttgacaggaggctcttcagccaggtctaaaagacggcagtagagcacgatcatgttgctcgttttgatgtgcattgtagttgaaatgtgaatttgatgggtagttgtaggaccgttttatgattgtaactttagaaaatgtcagacactgatggcagaatatttgaggcatttgtttgatcatttgcttatgccgagcaaaacagcaaacaatgctcgattgtatgtgaaacactctgacctgtgaccatttgaatgtcggtgcgcctccggaagtccggagttgtgtatataccaccaaattgccggcctaaaatttccag

SEQ ID NO: 30983 - DNA, 3855 bp, Zea Mays
cgccacgtcatcagttcttcttcttcgtttttttttcgaattttaaacgataattctggtcttgatctcgtcctcgaggcaaatctctttgggaatcgcctgggaagtatcagtagaacgggggagagcttgaggagtagccgagtagggttggagaggcgtaggggcgcgtgtgggcgctcgagctgttgttgctgggcctcgccggctccgttttcttccacctccgcgcgcagcggcagcgcggcagccagcgggggtgggcgtcaagtcaaggcagcgccgtcgtttcatgtccgcggtcaggtttggtgtctaatgcaggtgtggtactggagtactggactactggtcctgtagagcagttcgggggcgagggagatggactggccctggcccctggtcgctgtgccgctccgaactggggcgagggcgagggcgaggtgttcgtgggtaagggtcgcgggcgatgtgcggctgggaggcgggctaccgaggcgtaagaaataaagcagtagtagacgagagagccgcgatttataaagcgggtttgtgtggctcgctgctcgcctccgctccactcctctcacctggtgactgctcctcccacctcgctgtttcttctacgggatcaggttgctgcttgctgcggttcagatccttatccccttctgctttagatgggcctcgcggagcagtgcatggaggtggaggaggtgcgggactcggcgaatcggaggtgatcccggtcatggggtagagtggagtggagggggttgagcgtgtggtatggagccgtcccgtggcggtgttggcggcggcgggcggcggtggggggaggcggagggtgatgcggcggaggaagggagacgaggggaggacgggggcgaggtgagcctgcgggagtggctggaccggccgggccgagcggtggaggcggcagagtgcgtgcacgtgttcaggcaggtggcggaggcggtggcagtcgcgcacgcgcagggggtggccgtgggcagcgcgcggccgtcgtgcttcgtcgtgtcgccgcccttcgcgcgcgtcgccttcatcgagtccgcctccggctccgacgcctcgggctcgtgctcgggctctgacgcctccgaggacgccgacggcgacccggacccggacccggacccggacgcctcgcctccgctgcggcgacgcgacagcgccgtccccggcgaggagcgcgcggggaggtcgttcccgctcaagagcgtgctggccatggagctcagctggtacaccagccctgaggatgcggacgacagcgccgctaccttcgcctctgacgtctacagactgggtgtgctcttgttcgagctgttctatacgttcgaaacgatggaggacaagatgcgggcaatggcgaatctgcggcaccgggtgttgccaccgcagttgctgttcaaatggcccaaggaagcatccttctgccagttgctaatgcaccctgtgccagaaaccagaccgaagatgagtgaggtgctgcagagtgagttccttaatcagtcaaggaatagcctggaagagcatgaagcggcacttaggttacgcgaagagatagaagaacaagaattattgctggattttcttcagcagttgcagaaaagaaagcaagatatagccgacagtttgcagggcactattgctttcctctcttctgacatcaatgaggtaccccaccagcaatctacaattggccactgtgagaacttcttatccgatggggataaagaggtgtgctctggaactgttgaagagcagagtgattgtggatccaggaagcgttttagacctgagctgcaaggtgttgatatggaggaaaataatcgtagtgttgaagaatgttccagaacagtaccatcctctgagttaatccaggaaagtgttctgtctaaaagctccaggttgatgaagaacttcaaaaaacttgaaacagcctattttctaacaaggtccaagttgatgaagcaagttggcagccaaataagtagctgtgatcgagttgttaagaacactactggttcagctgttgggactgagggaagttcactagatgatttttctttggaaaggcaatatggtacaaggcaaagaggttgggtaaactcttttcttgaaggattgtgcaagtatttgtcattcagtaagttgaaagttcgggcagaactgaagcattgtgatttgctgaactcgtcaaacttagtatgctccgtagggtttgaccgagatagagagttttttgcaactgcaggtgtaaataagaagataaaagtgtttgagtataatatgattgtaaatgaacaccgtgatattcactatcctgtagtagagatgtctaatagatcaaagttgagttgtatttgctggaacagttatatgaagagccatattgcatctagtgattttgagggtatagtacaggtttgggatgttactaggagtcaagtttttgttgggatgagggagcatgagcgacgcgtgtggtcggtggacttctcaattgtggacccaacaaaattggtcagtgggagtgatgatggatctgtgaaactgtgggatatgaatcaggctgggagtattggcactattagaacaagagcaaatgtgtgttctgtacaatttcaacctgatactgctcgctccattgccatcggctctgcagaccacaaaatttactgctatgatctacgtaacatacgagctccttattgtacactagttggccacacaaagactgtaagctatgttaagtatctggatgcatcaacaatactatccgcatctactgacaactcattgaagctttgggacttatcgatgaatccaggaaggataattgacagtccagttcaaacatttacagggcatacaaatacaaagaacttcgttggtctttccatatctgatggttacattgctactggctctgaaacaaatgaggtttttgtctaccacaaagaatttcccatgccagtgttggcttataagttcagcgtgacggaccctatatcgggacaggagattgatgatcagtcacagttcatttcatgcgtctgctggagagggcagtcttcaactctactttctgcaaattccagcggcaacattaagatcttagaaatggactgaggagtttgcatctgtttgagtctcagctataaatagaccgacttcttaggccgtgctcaacaaatcatgcatatagccgtggtagatgtcactgtctagggagttgagtttaaaatgagagattggatgagtaatgctgctagagatagcttaccaagttgtgcgcgtgcgtggcttcaaaatttgtggcgattaaatccagagttgccaacggtgcagcttaatccgagttgcagagttgggaaaggtagtagctgtagcagatttagcgtggttttataggattacagattagcgtggtagcaaaagtagcataaataggaaacagaattggggcgtgggatagtaccacggggaaaggttttgtacatcattggtttgaggtatacttgtacaggcaatcaatccagtttctacctaccagtaccagcatcagacttgctcttgtcatagtgttacttgaaaggtgaaaggtataaatcgctgtacatctgttgaatcagacatcagcatttgcatcattatctcccttttttattttccatataatattgatgaatgtgttaggtcgcagacatcataagacttgttggcattcgtctgcagacgtgaggcgaggagctgtgcataagttaaaagaatcttcagtatttgtctaatgctccgtttgtattgtcgatattggagcacaaa

SEQ ID NO: 30984 - DNA, 1400 bp, Zea Mays
cttgtttctgtaattttaatgtgcaaggatccaagaacagtctgagaattgaccataaatttcttggtagctcatatcacagcagtatcatatctgggctttctttagttgcatcttctctgagtgctgctgcttcatctggagaaaaagtcagcatcaccgttgtaggccttggtgctggttgtttcccaatgtttctccgtggatgtctgcctttcgtagatattgaggtcgttgagttggaccccttggtggctgagctagcaaagaaatattttggcttttcaatggatgagcaattgaaggtccatttgggagatggcatcaagttcattgaagacagtgttgctgcaaatcagtcagtaaatggcagtaccagaaatgcattcaaaatacttatcctcgatgttgattcatctgatctaagctctgggctgtcttgcccaccagaaaactttgtcgaagatcctttccttctaatagcaaaggagttccttttggagggcggcctttttgtcatcaatttagtctcgcggtcaacctcagtgagggaaacggttgtttcaagactgaaagcggtcttcgaacacctgtactcactgcaacttgaagaagacataaatgaggttctgtttgcatcaccgagcggaagatacctagaaatcaatgacattagtgcaggagcctccaaactgcaggacttgctcaaaattccggtggatgtagaatcagatatacagaagttgcagaaactccagtaacaatctcacctgacgcggagcaccatccatttgcatccacttgatttaggtgctgttcagttctcaccccagcagggcacaccaaaatgtcctttgttttgctcgtggaagccaaattaggaccagctgttttgtacaccagaattttgtctaactgcgctatagaaaaattttggcctgccagaatgtcttttacaaccaaagaggtgaaaaatctggcttgacctgattgggcctagaacaggctagagcgcatttcaaacttttaaacgtccacaaattggccgtgttttcccatatgtttgcctcgccaactctgcatgggtaaaacagtgcagctgtacagatttagaggatgtgtggaggaaacagaatgtgcatcatgcttggtctctgatggtttacaaatttcagcgaatatattgatcagaattcaggctgtgttatgatagctgtagcgtgtttggcaatgtgagtgtcgggtaggctctcgggaccctcgtaagcattcacacctcccgtcctagcagagtagcagcttcatgtactatgactatgggtgtactcggatacgaatgataagatttgtatgaatatgacatcttaaatactcaactttaagaatatgaatacggataa

SEQ ID NO: 30985 - DNA, 1542 bp, Zea Mays
ccgcgaagccacagccgccattcccgccgccccgccgcgcattccatcctcagcccgcggcagagtcctctgttcccagcagcgcctcgccccgccccgcatcactcccggccgcgcatcactcccgcagcgccccgccccgccggcgcatcactcccggccgccaagcccgcttcccgaggccgccaaggtttccatcccgccgctcgctcaagggttccatcccgcggccgcatccagcgcattccatcgcgcaatcaccgctcgctcaagggttccatcccgcggccgcatccagcgcattccatcgctcaagggtttccatcccgccaagcccgcatccagcgcattccatcccgaggccgcaagggtttccatcgcgcaatcaccgctcgcgcattccatcgcgcaatcaccgctaccgcatccatggcttcaatcggttgcccccgcgatccccttccatccatggcgaggtcgctggttatttttaacagtccaccgacagcactcgctcgcactaaatcctttcgctctcagatcctgcccctcgctcgccgcccaatcaatagctcagacgttgcctcggttgtcctgcaagtttgtggaccccgacaacgtcgtttcctccgctctagtggcgcgtcgcgtgcggtcagacacgatgagttgcggcagcgatgtgtgccgggacagctgcagtagtagcggcagcgaggagttcaggcggtcgtggcccagcaaagtcaccgctgatgattcagtggcgcctgcccggagctcggatgtcgcagcgccggcatcgtggattgataggaagctgcttgttgatccaaagatgatgttcgtttgggacaagattggggagggagctcatggcaaggtctacaaggggaagtacggtgatcaaattgtagcgataaaggttcttaaccgtggcagtatccctgaagaaaaacaacacttgaaggctgtttcatccgaagtaaatatgatgtgtaaagtgaaacatgagaatcttgtcaagatacttccgggtcttaatgctagcttatgtgattcgtaaattgttagttcttttggacctcacaaccgtttatgcactcctgcagtttattggagcttgcaaagaaccattgatggtgatcgttagtgagctactgccaggaatgtcactgaaaagttacctgcatagcatccggtctagccaactaaatacacacactgcaataagctatgtagtggacatagctcatgcactggactatttacatgccaatggcataatacatagcgacctgaaacctggtaaggatgcttaagctaattgacttttggcattctacgctttgatcctttagcacgagcaccttaagtatgagtttacaatctgaacagttagtgtttacatgtattttatttttatgcaatatttatacttgttttgtatgtgtttattccgataaacatccgagggacgcaatatcttgtcgtttgatcaaattgtagcgataaatgttttcctcacggttccgttgcaac

SEQ ID NO: 30986 - DNA, 4908 bp, Zea Mays
  misc_feature (4907)..(4908): n is a, c, g, or t
tcctgggttaggcaggcgcctaggctaggctggtcccgccggacagcctcagtactactcgggtacgttcaagagagagagagagagagaagcgaggaagaaatcatcgcgcgcccgcgcccgtcgccgtcggccggcccccaacccccacgcacagacaagacgagctgctggggcgcacacacacatcaccgccgcggcgcgccagccatatccagcccagaaaactcgccagaaacaaatccgtttccctttttctgtgttcctaccccgcccaccaagaaccctgcgcgtgcgaacaagccgacgattcatcaatcgccgtcgccacctcccgctgcccctcggcctccgatcccgagacccgttgccgccgctgagctgccgcatttgctttgggggtggagggtctgagatggcgccgtagcggtgggacggggagcagcagcagctggatctcttctgggttgcagctgccgccgccgccgccgccgccgccctccctgcaagcaacccttcgcgctctcgccttgctcgtgctcgtggtaatttgactgctgttagattgtgatttcttcttgctgctttcgcccttcactgttgctggaattacagaagatcaggctctttctttgtcagaagttaggaacattgcttctctttggcttctggtaatatggcagcgacgtcgccaaacaacataaggcgcaagtactcgtggtggtgggacagtcatatctgcccaaaaaactcgaaatggttgcaagaaaatctttcagatatggatagtaaaattaagctgatgatcaagatcattgaagaagatgctgaatcatttgcaaaaagagctgaaatgtactaccgacggcggcctgagctgatgaccttacttgaggagctgtaccgtgcataccgagctttagcagaaagatatgaccatgcggcaggagaactccgtcaagcacatcgaaaaatagcagaagcatttcctgatcaggttctaatggacttggatgatgaccttccagcagaaactgcttccattgaaactgacatggacaatccagacatggctccatatttcctctctttcatcaacgctagtgatttgaaaaggaatgctaaagatgaccaagattttgagagactgcagaaagaactagcaagcttgtcacaggaaaaccaagacctcaaggacaggatctcgtccatgttagagcaaggcaacaaggctgagtgcgagatccttcgcctcaaggagtcccttgctcaacaagaagcagaaaaggagtctgcagtttcactatgccagcaatcaactgctagactacaaaacctgaagtctgaaattatgcatacccaggagaaattcaacaggctgaaagaagagatgcaaactgaactacaacctttgaggaaaggagatgaacatttatttttacttgaaagagctaatcaggacttgcacttggagctagataacctgaaacttctgttgaaacagaagcatggcgaagtaaatgaaaagcaagatgagttggaaaagcttcatatctctacagaagaagagcatctcaagcgtatgcaagcagaaatggcacagctttctttggaaaaacagttatcactggcacaagacaaactgaggcatttgactcttgagaagcaggttgaagcacacaagataaaggaggtcgaaacgagcaaagttgtgattcagaaagaactggagaagattcttgaagagaaccaaaggttgaatgaccaaagtcactcttcttcagcagtgataattcgtctgcaggatgagataatttccatgaaaaatgtgcaacgaagattagaggaagagatttttcagcatgtggaggaaaagaagacacttcaacatgagctttcttatcttaaagaggataggagtgacttggagaggaaacactctacaatcaaggaacagataggatctatgaacttgaatttggaatctctacaagcactagcacaagagctgagggatggcaatgttgagctgaaagagattgtcaagaaccatgagagcattgaacttgtgcatatcgataacctaagaaagttggagaggatgtcagagacaaatgcacatttagagaagtctttgtcagctgcaacaactgagcttgagggactgagggagagcaaggtggcattagaagaatcatgcatgcacttcagatccacgattaacactcatcagtctgagcgagctgtgcttgtagcgcagattgaggtaatttctcagaccatggaggagctactggagaagaatgttttcttggagaattccttatctgacgctaatgctgaacttgagagtttaagaatgaagttcaaagaactaaaagaatcttcagaagcactccaaaatcagaattctgtacttcaatctgataagagaactcttgtccaccaggttgagggcatcactgtaactctgctgaatttggaaaggcaatacaaagaactcggaaggcggcactcagatctgcagaaggagaaggacttggtgcttgatgaagtgatcaagatacaggaacagataaggcttgagaggaaggagcatgaagattgtacacagtcaagcaacattagatttgatgctctacagaagaagattagtctattgctagaagagggcaggagtagagaggtgcagcttggtgaggaggagctcaagattgtcaaagctgagatagagatatttgtcttgcagcagtgtttgaatgacatgacagaagtaaattctgaaatcgcagaacaactgcgaaagaataaagaaatatgcaaggtccaggagggaaaaatctacagcttatcacagcataatcagaaactaactgaagggattgattcagtagtgagagtattgcatctggatcataagtatgaatccttaggccaaatgaagcttgaaatcattgtgcagctcatcttaaatgagatcagctgcctgctgaataacatatctgatgcccaggatgtgaagcagaaggagcttgttgagaaatcacttgtagttacacttctggagcatttcgggcaagaggtggctgacttgaggtcagagcggaatgtcttgaggcaagatcagcagataaagattgaggaactgctccagctgcagagagaaaaggaggaacttatgaagataagtgatgaattcttggaagaggtggaggctcgtaatcacaaagtggatgagctaaaggctgaggcgaagttcttggttgtaaggttctccgaactgcaagagtctaggaggtcattgcaaagcgagatcaccaagctattacaatcgaactcttttctatcaaatgaactaaatgattccattgaaaaacagaagaggtttgaacatgatttcagcaatcttgttagtgaagcagttagtaaagatatcctcagtgtgatctttagaagccttcatgaagagaggacattgcagctgaagtctttgcataataactttggctgtcttcaaacagcaggcggtgagctttatcaggagatcaagatgatgaacaagaggcttggagacatagaaatggagaacaagtaccttggcaaagaactaagtagaactatgagtgtttatggtggatctattgtgcaaacagcaacaggaaaaggaaatccagggcgaagagatgccaaccttctgaattcaaacaggaaaatccaacaagattgtcatgtaaatctggaggtggaacaagaggaagtttgcaatgctgattttcaggagtcaaatgaaacactacaggatgaggtccgtaagttaaggagcgaagtggaaatgcttaggagcaaggagaaggctgtgttcaacatcaaatcctgtgatgaagagatcatgaaattgctggctaacatgcaaatggctatcatgaatgcagctctgttcaaagagaaggttcttgagctcatcataacatgcgagagttttgagataagtgccatggtacagaaggaggttctgaaggaagaaatcatacaaagaaattcatatgtagatgagctgaaggacaaactaaatgctgttgagattgaaaacagaagactgaaggtcgacctaaatggtgatttcacaatgttagggtcattgcagactgaagtcagtgccctggaggagcaaaccttatctctcgctaacgaccacttgcatacaaataagctcaggatggaggaaaatgcattatctccacaccttgtgaagaccacaacaagatccagtggcgaagaaaatgcattgaggatggtgaaggggatggagctgcaaaaattgcatggaacaatcaaagcccttcagaaggtggtcacagatactggtgtcctccttgaacaagagaggcttgatttcaatgccaatttaaaagaagcaaagaagcagatcgaggtgctaaagctcaaggagatcttggatgatgatataattgaaatgaactacgagcaaatgttaaaagacatacagcttgacctcattcaaacttcttcaggccagaaaaccagtccgtttggtcaggaaaagaaaaatgtagcacaagtagatgacaagatggtaaactcacgcggttctattgggccgagccatggacatgtggctgacgacctaagaccgccgcaaagtgagtcatttgggagagagaacaatttaatggtcgtgaaagagctcagcattgacaagcaagagttaccgaggtcgcttgctatggagccacacgaggagtggagaaacaaggtcgtagaaaggttggcttctgatgcccagcgactcagtgccctccagtccagcatccaagaacttaaaacgaacgccgaaacatccgaagaggtagagctcgggagtgtcaggtaccaaataacagaagctnn

SEQ ID NO: 30987 - DNA, 3749 bp, Zea Mays
aaaaaaaaagagaagtccctcccattcgtcgctaatcacaatcccgatctccaagcaaacccacctcccgtcagttccctactcgccgatccagatctcctacagctttccactccgccactccaaccggacgcctccgccgtcgccggcggcggtcgagccacgcgcgcacgccgctgaggaacccggagagggcggcggcaatggagcagctgcggacgttcgggcgggagctggcgatggggtcgcagggcgggtgggggcagtccaaggatttcctcgacctcgtcaagtctatcggcgaggcgcgctccaaggcggaggaggaccgcatcatcgcgcgcgagctcgagcacctcaagcgccgcctggccgaccccgacgtgccacgccgcaagatgaaggagcttctcctccgcctagtctacgccgagatgctcggccacgacgcttccttcggccacatccacgccgtcaagatgacccacgacgagtcgctaccgctcaagcgtaccggctacctcgccgtcgcactcttcctcgacgagcgccacgacctcgtcatcctcgtggtcaacaccatccagaaggacctcaggtcggacaactacctcgtcgtctgcgcagcactcaccgccgcgtgccgccttattggtgaggaggccatccccgccgtgctgccccaggtcgtagatctgctcgtgcaccccaaggaggctgtgaggaagaaggccgtcatggcattacaccggttctaccagcgatcctcctcctccgtttcccacctcgtctccaacttccgcaagaggctatgtgataatgatccaggggtaatgggtgcaactctatgccccctctatgacctgatttcggaggaaccaaattcgtacaaggatttggttgttagtttcgttaacatcctcaaacaagttgctgagaggaggcttccgacttcctacgattatcaccaaatgcctgcaccatttattcagtggtgataaacaagcaagtggacatatgtacactgtattgggcgacatattcaagaagggtgacactgcgagcaacattggcaatgctatactgtatgaatgcatatgctgcatttcatccattttcccaaaccctaagatgctagtggctgcagctgaaacaacatcaaagtttctgaagagtgatagtcataatcttaagtacatgggcattgatgctcttggcaggttaataaaaataaatccagatattgcagaagagcaccagctggctgtcattgattgcttagaggacccagatgacactttgaagcgcaagacatttgagcttctttataagatgacaaagtcaacaaatgttgaggtgattgttgataggatgattgagtacatgatcaacataactgatcatcattacaagacagaaattgcatcacgttgtgtcgaactcgcagagcaatttgcgcctagcaatcagtggttcatccagaccatgaacagagtttttgagcatgctggagatcttgtcaacatcagagtggcacacaatttgatgcggctaattgctgaaggctttggagatgaggacgaaggtgctgacagtcagctaagatcatcggctgtagattcttatgtccgcattgtcggagagccaaagcttccttcttctttccttcagataatatgctgggtgttgggggaatatggaacagcagatggaaaacattcggcttcttatattattgggaaattgtgtgatgtggcagaggcccacctcactgatgacactgtcaaggcgtatgcaatctcagcaattctgaagatatttgcgtttgaaatcgctcttggaaggaggattgatttgctgcctgagtgtcaaacattggtagatgaattgttagcttcacattcaacagacctgcagcaacgggcatacgagctacatgctttactaggcttgggcaaaaatgatgttgaaagtgttatgcctgcagatgcaagctgtgaagatattgaggtcgacagaaacctctcatttctagacagttatgtgcagcaagccttggaaaacggtgcatcaccttacattccagagagtgaacgctctggtcttacaagtgttggcagctacagaagccaagaacaacaggaaacatctgcccatactcttagattcgaggcctatgagatgcctaaaccttctttgccactagcaacttcacaaaccagcatgtccacaccaaatactgaccttgttccagtttcagagccaggctactataaggaagaccatcaaacatcaaggcctcaaccaccaagcgatgcggtttctggtgagtttggtgtcaaactccgccttgatggggttcaaaagaaatggggaaggtcaacatattcctcttccacaccctcaagctcgatgtccagtcaacaaacaacaaatggggcctctcattctgatgggggagggccaagttcacagccacgggagtcctcatacggttcgaagagacagcagggcacagaagtctcagcagaaaagcaacggctggctgcttcgctttttggttcggcagcagctagagctgacaggaaagcacaagcttctcgaaagacagggaaggacagtccctcaactgagaaagtagctaccactaatgtggctgcccagtctgttaaggagcaagtaatcccagctgctgcaccaccgcctgatctgctggatctgggtgacgagacagttccatcgagccgtccatcggctgaccctttctcacagttggtgggtcttcttggaccagcatctgctgctccggcgctttctgggactccggctaccactaccagtacttccaaagcaccagatcttatgtcaatcttctcagatgatgtaccaactggagtgactagtagtgggtccaccgatcccactccaggtgatgctatttcggtgagctcccacaaaggagcgacggcagtggcaccaaagaagggctcgagccttcaagatgccttgcaaaaggactcgactgcacggcaagtaggtgtgacaccgacagggaacaaccccaatcttttcaaggacttgctaggctaaaggggacagtaaggcacaccgtatgctccgcgtggcctctttgggtagatggagttcatctccgacatgtctcgatcactgaaacagcgatgatctcgctgtttgatcagcgtaggaaaagggttgcaacttgcaagggctatatttgttctcgagtcacaagacacgacctgtcctccttccagttgggaggggggttgcgctgttgagatctgtgaatggttgcgggtatttttcctttaacctcttgtgattttgtgctgagactattgtacatgtgtttacatgacgtgtaatctgtacatgagaccgtggtacagaagcgtgtgccggcgcatttttgttcagctgggctagatacactacaattgctgggcactggaaagtaaaacaatgaaagaattggtgtcattctctggctggaataaaaatataaaacggtaaatgtgtagtgttgtttattgttgatgaaaacagtcgcagatttgtttttgcaacttttaactgttgagaagtaatgcaattctttttttttcggttccattcaaacctacttgctgcgtagggccatggcccatggggcattcagtattttctctcataaaaaggtctactactattcttttctggttctatttagtcgagatcgttgtttttgt

SEQ ID NO: 30988 - DNA, 4177 bp, Zea Mays
gcaattctatactacttcaagggggcatctgcaaacctccctctgcgtcctcggaaacggaaggtggcctggccctggccgggagtggttaacctcggcgagccgctttgtcttctattccccactccatcctactccgccatggcggtgaaggggaagggtaagcaggtggccgccgaatcccctggccctggcgctggcgctggcggtgcctccgggtccggcgggaagcggcggatggcctctagtgacgcgggggcggggccctcgtcgtcatccgctgcgaagcgccgccgccgcgccggggtcctccagttcgtcgacgacgtagctggcgtcgacgacgattatgaggaggacgagctcgagtccgaggatgacaccgatgatggtttctttactggtggggaacatgcacaaaatctgagtcacaaaagaactgaaaggtcacaccctcttccatttcttgtgaaggaagaggagcttagtggcgatgaacttgaggaattcatcaagaaccgatacagtaatcgtgtgaaatacgctgctgatcggagctattctagagaagacgatgacattttctccatggattgtgcactcaaagagccgactatttggagagttaaatgcatggttgggcgtgagcgccaaatggccttctgcttcatgcaaaaatttgttgaccttcgaaaaattggtaccaaagtgccaattattacagcatttgcacttgatcacataagagggtttgtttttgttgaagcggagaaggcctgtgatgttacagaggcatgcaaagggttttgtagtgtgtacacaagcagaatcacttctgttcctgcagctgaagttcctagcttgttatccagccgtacgaaaccatttgaaatctctcgtggtacatggatccgcatgaagaatggaaactataaaggtgatctggcacaggttgttagcgtggatgatggacggaaaaaagtgatgataaaaattgtacccagagttgacctccatgctatttcaaaaaaatttggtggtgcagtttcactaaaaggagctgcagttcctgctccacggttgatcagctcccaagaactagagttcttcaggcctcatattgaaataaagcgcgaccgtcagactggtgaagtttttgaagtacttgatggtttgatgttcaaagatggatttctgtataagaaggttgcacttagttctttgatttattgggggatacaaccgacagaaacagagcttttgaagttctcttctagcccaagcaatagagcttctgctgatgacttggattggctctccggcatgtatggttctaagaaaaggaaccttccagaaaaacgagatatggaatcatcatcttctaaaataagatcctccaaagcatcagaccttaaagcgtcaacttctactgaaaattatgacgagaacgatgaattcaaccttcatgatcttgtactctatgggcgaaaagattttggtgtgattgttgctgttgagaaagatggttttaggatactaaagggtggtcctgaaggatctgcggtgaaagtgagaaagcaggatattaagaaaggctgcgtagataaaatgtttacagctgttgatcatcaaaagaagacaatatccattaacgacactgttaatgttgtggaagggccatttcagggtaagcaaggggtcgttaaacacttgtacttgggaatactgttcatttataatgaaagtgaaagtgagaactgtggatttttctgtgctcaaagcgggtcatgcgaaaagatacgaaagggtctgggaagctctactactgaaagttcggactttacaactcctatgtttcctgaacctgcttatgagcaaaatgggcatcgggacactgaaaggccttacaggagcaccagagaacaacttttctctattgggcagatgctgcgcattagaaagggtcctttgaagggctacctctgtcgagtagttcggatatttcggaatgatgtgactgttaagctagattctctactgaaaattgttacagtacaagctgatcttctctcagtcccagctaacaggggggataacttgtctggtgccccagctagtaaatttggaagtcaagatacatccttctttggttcagaagcaggcaaaacttcatgggacaatgggttgccatcgtttggaagtgactcatggcaacccttttcgagttcaacactatcagttcagaatgcaggtggagaatcagaagctgatccatggtctaagaaaacttctgccaaagatgattctgatccatggggtaagaaaactgatggtgattctgatcgatggggtaagaaaactgatggtgattctgatccatggggcaaggaagcggtatctgctgctgatggtgattccaatccatggggtaaggaaacagtaccttccgctgctggtgattctgatccatggggtaagaaagtggtgtcttctgctgatggtgattctgattcatggggtaagaaagcaacatcatcagctgttgacactgaaaaggaaggttctggtggtactgcatgggacaaacaagctggagttggtggatctgatgctgctggcagctcctgggacagagcggttgtcaatgagagtgaaaagagtgacaactggggagaggcttgcagggttatggacatgggaactggagctgaagctgacactgacccttggggaagcaaggtcaaagcagtagatatggaaggaccaaataactgggaaaaggctacagtgcctccaaacaataagctggaggatgtcagtcaaggatggggccaacctaagggcaactcaactgaagaccaagcaatagacaacgtttctaaagacgtggacaacaacagggcttgtgacagttctttgcctgtcactgaagatggtacctggggcaagtcaaaagacaacagttgtggtggagcaggtggtgcgggaggttgggatgtttctgttggcaactggaataaatcatctgttgtggctgatgcacaggatgaaggttggggcaaaggaaactggtcatctgctgagtctgaagaaacaaacaatcaaagcggaaattggaacaaaactggagcttcggaccaagctggttacaacaattgggataaaccgaaatcctttggtggtaatggttggaacaagggtgatgatcagaatagcagttggaacaggcctgaaaattttggaggtggacgtggctttgggcgtggacaagggagaggtaggggtcaacaatctggatatttcaatggcagaaatgatcaaggaagctggaagaagtcatggggtagtgacaatgctgaaagaccctcttggaggtctgataatcaggtagacaatgaggctggagagtctggtggatatagaggaagaggcagaggtcgttttgggcgaggtgaccgtaaccagggcaacaacttcgggtcaggagatggtggcagctggggctctggcaggggaaatggtggccgcggtggttacaggaactggaacgataacaatgagcgatccttcggtgaaggtggtggctggtcccagtcccagtcttccgattggaatgccaacaaaggaaatggcgaaggaaatcaagctttctcgaaaagcaagcccagctgggaagcacaaaacacctctggtagagatggtcaggcaggaaagggtgatgcaaacaactcctggagtaagaacagatcatctccatctagcgcttggggcgctcccagtggaggagctggcggccgaggttcttggggaaagagcaacgaggatggctggaactcagcgggaggatcagccaaagagaagcctgcatggggtggtgggtcagaagcgtctaccaagaaagaggacaaaggtggtgaggggaacgggagccaaggaggaggtggtgtcagttcctgggataaaggggcagatgatgcatggaacggcaacacgggtagtgatattgggagtggtggatggtaagatttccgccaaaataatatgaactctgtcggtgcgtgtgtctagttcgtatccgttacttcgccatgtgtactctacactaaaaagaacatggcttgtgaccatttaaacattaccttagtggtggcagtaactagtaaaaaagataaataaa

SEQ ID NO: 30989 - DNA, 2363 bp, Zea Mays
gagagctgacatattgttttgatagaagtaatttaagcttccattgctaccattacacctgtgcaggatcagctctaccacctgcgcatccacctgacgctcctgcatttagaaagcccaaggctttggcaccagcgcctagtcaatcgctgctacctccaccaacaaattcatactgcacggcaccctgctcagatcctctgaccaatagtcctccaggaatgacatgcctctgtgtgttgccaataaaagttgagcttcgctttggtatagcattgtacacgttctttacacttgttcctgaacttgcacaagatattgcatctggagtgttcatgaatcaaagtcaagttcgtgttatgggggcaaatgctgcacctgatgaccctgaaaagacaatcgtctttattgatcttgtgccactgggaccaaaatttgacaatgcgacagcatttttagtatttgaaaggttttgtaataagcaggtcatcataaaccctatggattttggaaagtatgacgtattgtatgttctttaccaaggtctccctccgtcaccaccagcagcaagcatgaacaatggtcttagcaatgttaatgatccaagtttacatccgcttgctgccgatgtggtcctggttctgcaatgttggggaacaggctagaaagcagacctatttcggcatcaccatccttcagctcaagtttggtggcatataaaggaactgccaaaacgtttaatctggttgagatggagagagccacactaggatttgatgagtccagaattattggggagggtggttttgggcgtgtctatgaaggtattcttgaggatggagagcgggttgctatcaaggttttaaaacgggacgatcagcaaggtacccgggagtttttggctgaggttgagatgcttagccgattgcatcacaggaacttggttaagctgataggtatatgcacagaggggcatagccgatgtttggtatatgagcttgttccaaatggcagtgtggaatctcacttgcatggatcagataagggagccgctcggtttgactgggacgctaggctcaaaatcgcactaggtgcagcacgtggacttgcatatttgcatgaagattcaagcccacgtgtcatacaccgcgatttcaagtccagcaacatcttactggaacatgacttcaccccaaaggtgtcggacttcggcttagcaaggacagctctgggtgagggaaacgagcatatttcaactcgtgttatgggaacttttgggtacgttgcacctgaatatgcaatgactggccatcttctggtaaagagtgatgtttacagctacggcgtagttctccttgagctccttacagggatgaaaccggtggatatgttaaggcctcctgggcaggagaacttggtggcatgggctggttcgcttctgacaagcagggatggtctggaatcgatcgtagatccttcactcgggagcagcattccgttcgacagcatcgcaagagtagcagccattgcttctatgtgtgtccagcctgaggtggaccagcgcccgttcatgggcgaagtagtccaagctctaaagctggtgtgcgacgaaggcagcgagttcaacggatccacgagctttagccaagatctgcgtatccaggatgttgaggctatgagtagagcgagtggggatgtagacttcgttgacccaacgctatctgccgagctgttcacctcatcagcgcgttatgatgctatggatgcctctggttctttccgaagatactcgagttcaggtcctctgagagtagggagagctggactggacaaagagagggggctgtcaacaggcagctcaagtgagcacgttgggctacaaaggtttagaattgattcagaatagtcagcctgcatcctgcaagcagcttatcatgattgggagtgcagaactagacttcttcggaagcttaaactagacttcgcacagattttttgtacagttctagagatgtgtagatgcctttaggaaaaagaggtgtacacaagcgagtttttcagctttaatcccccacggtccgtaataggttttgccgttgcagcacgttcaaggcgctcgtgcacgcactgtcaccattttttgagttcaatgggggaaaaaaccctatcctgattggccgcaacctttgcatttatccgttgctttgcccgtacactgtcgctgatctgggcttgttattcgttaatgtcgggcaacgaaagatggttctgtggtcactacgaaaggggcagctgaatagttttggtgtacaggcaaggcattgttacaaacgaaatgagctcacaacacaagcataaaaaaa

SEQ ID NO: 30990 - DNA, 1291 bp, Zea Mays
cagctttccagatttcctccggcgagagagaggaaccagtagtaaaacacaagatacatagatgctacgactgtgctagtgagctgtgagatcgagagaacacactctccagcagcacggcaacatgtcttgcataggttcctcttgcaccgcaaccaacaagggaaaggagactgtggtggaggtgcatggagcggtggcggaggagaagcagcaggtgaggaacggagaggagactgcagcggaggacgactccggtgggtcggatccggattcggactctgaatcggatttagattcggagtcggactgggactcgtattcggaagaggaagaggagcgacagcagcagagaaagaaaaaggagaaacccaaaaacaagaagaagaagaagaagcagcggcggcggcaacagcagcagcagccggcatggctgatcacactgctgagaaccaggttctgggagccatgcaaggagcacgtgtcgaagaacagggcggagcagtgcatgttctgcctcaagtgctgcaaggtgacctgcccccgctgcacccacgacctgcctggccaccgcctcctcaagatccgccgctacgtctaccgctccgtcgtccacgcttccgatatgcaggcgctcggcgtcgacgtctccaggatccaggcatatgttgtcaatgcaaagaaggtgctgcacctgaggcccatgagcaggtccaagcatttcaggcctcaggcagggacgccgcgctgcgtgacctgcagaacctggctccgtagcgcgcccaacctgttctgctctcttgcctgccagcgcaagacgacttctcggggcccgaagctgaggtccgctacaggagcctccaagtgcagatggctgaaccatcaggggctgcagccgatgagctgcctggccctgaagctgcgcacgaggtgcctgcgcaggttccgccgccgccgccgccggccgcaaatcagaacgcgtcgctccgcaggcggccgcgcaagcaggcggcgccggagagggcgccgttcttctgaagacgtgcctgctcgctgctggatgagagaggtgcgcatgcccccaataaaagatgtcgagcctgcatgcgtagaacctagctagaggtagccgtggagactggctggctaggtgcgatccgactcagtttcaataattgtcattctggttgttgtttggcataaaacttcatggctagactttttttaaaaaaaattcgcagacacctttcttttgaattcccaagtctactcttgctgtttgcaagtctag

SEQ ID NO: 30991 - DNA, 6318 bp, Zea Mays
ctagggcgcactcgcaccctccgccggtcctgaactcatcgatcgcagaagcgagagagagagagagaggaggccgtacccacgccgccgcttcgccgccgccgacctccgtctctcgcttccaccatctctctccttttcaccctctctcgcggccaccctcggtcccctccctgagccttacccttgactgagtggtttccaatttcagttccactccctcttccaccactattcacggggaggcgcggcgaatcctgcgagattcctcccggcccacgcgtgcgcacgttggcgatacagggctagagtttcgtctccggcgctttgcggagttaattaggagaaggaactggagaatgtgtaggtggtgggcgctgaaaccctagctgttcgggacgggcgtgcgtgcggggatggcaggggagctggggcagcagacggtggagctgggcgcggtggtgcggcgtgcggcggaggagtcttatctcgctctgcgggagctcgtggagaagtcgcaggcggaggccgaggggaagggcatcggcgccggagccaatggcagctggcagcggtccgacaccgagaagaagattgacttgctcaagttcatcacacgcacacgccagcgcatgcttcgtctccacgtccttgccaagtggtgtcagcaggttcctttggtccattattgtcaacagctcggatcaactctccacagccatgaaacatgcttcacccaaacagctgactcgctgttttatatgcacgagtgcttgcagcaggctcgggctcctatgttcgatgttccttctgctattgaagtcatgcttacagggggttatcagaggcttccaagatgcatagaagagataggaagtcaacataaactttccccagatgaagaaaagcgcgctctgcgaaaattagatgctagcgtgcggtacagagtacttgtgacaccaagacctaaagaagtatctaatgtttcagtaactgatgggatagctgttttccgtgtggatggagaatttaaaattcttcttacattaggttaccgtggtaatgtagacttatggaggatattgcatatggagttactggttggtgagaagaagggtcctattaaactggatgaaagtaggagatttgctcttggtgatgatatagaaagaagaatggcagcttctgagaatccctttgcagtgctatatgctatacttcatgaattctgcatctctcttgctatggacactattattaagcaagctaatgttcttcgacagggaaggtggaaagatgccataagatctgaactcatctctgacagtgccactgtacaaacgggaaatactcctctaatgcagcttgttcaagatgcggagttcgattcaagtggttttaagatacctggcctgaaagttaattactggctagatgagaaaagcactagcacagcagaacctgattcatctccatttattaaaattgaggcagggctggacatgcagataaagtgtcagcatagttcatttatacttgatccatttacagataaagaggcgagcctttctcttgatctaagttgcattgatgttgagcaacttattttgagagcagtttcttgcaataggcacacacgccttcttaatattcagagacaactgtgcaaaaatgtccaaatttttcagtccccaaaagatgttgtcttgacacgagatgttgcagcagcgaaggacccaatgatgaatgcggagaagggtttctcagattgttttgggaatgaagtgcttcaagtaagggcatgtggtcaggcatatgttagtcttggaataaatatcaggtttaccagcagtctcagggcactctgaagattcccaagaccttattacatggctcagatttgatggtcatggggtttccacattgtgcaaatgcctattatctgttgatgcaacttgataaggacttcaggcctgtttttcatttgcttgagacacagtgtgatgcaaatggtaatactaatgcaagtggagatgtgaaagaagctattagatataacaaaatcaatataggacagatgcaaatacttaaaaatgagatgaatgagaacccttttgatgtgaagctgcaggccctacaaagtttagtggactctgctgacatgatggagagtgatcttcctgtccaaaatgcaattgaacctcttccactacttcctgcttgttcaccatcattttcatctattgttgatgaggttttcgaatatgaacgtggttctactgctgcgcagaatcgttgtcttccagttgatattcaaggaataaatgctagggttgtctcaccaatgcatgatggatgcttatcttatacccaagctaataataacatgaatgttcatcctaatgtcagtttgaatagctatttcccaagtaactttagacatttacaaggtgcaaataaatcacttcagcttgtgccttcaagcaacgataacagcaatcaaatccctgctcaaagctcacattcagggaatcttgggaatgctacgcctggccatttgattggatcttcaactacaaccggaggattagggaagctcatcactgctggttctgatggtgcatctaggaaacactatctttcagatttcttatcaagtatcccttcattacgaggactgcaacctagtgagccaagaaagcggagaaaaaaaacagaatcagtgcagagtctcctgcctttgcaggcacactcttctaatttgcaatcaagaggcagtctcacctatggagatgttcttgctgaaagaaataattgtgttccggcaactatatatgcttctgtgctactacatgtcataagacactgttcattatgcatcaaacatgcccaactcactgctcagatggattcccttgcgattccatatgttgaagaagttggtctgcggagaccatcgtctaatctttggttgagattaccttttgcacaggatgattcttggaaccatatatgcttgcgccttggtaaggctggaagcatgtcttgggatgttaggataaatgatccacatttcagggaactttgggaacttaatggaggaagcaccaaaacacaatggggtgttggcattcgcattgcgaatagctcagaaatggattcacatatctcatttgattccagtggtgttgttttaacttacaacactgttgaggcagatagtgtccagaagcttgtgtcagatttacgccgactttcaaatgctcgttcttttgctcttggaatgaggagactgattggtgtgaaatttcaagacaagctagatgacaaccagttaaccatggaggtgaaatcacaatctgttaataaaggtaacagtgatgctgctgacaagctatctgagcaaatgagaaagacattcaggattgaagctgtcggtctaatgagcttatggtttagctacggcaccatgcctatggtacacatagttgttgaatgggagattgctaaggctggttgcacaatgcacgtttctccagatcagctttggccacacacaaagtttctggaggatttcgtgaatggtggagaggtagcatccttcttggattgcattcggcttacagcaggaccattacttgcccttggaggtgcaattcgtcctgcaaggatgcctgttgctgtctcatctggatatagctctatgccaaaacagccgaacatccccacacaagggcctttagtaaatggttcatcttcaactatacatcacgcacctggcccctcaaatgctgcatctgcccatttaggcagtcataaccttcatgctgctgccatgctttcagctgttggacgcggtggacctgggcttgttcccagttcattactgccttttgatgtttcggttgtacttcgtgggccatactggatacgcattatatatcgcaagaaattttctgttgacatgcgctgctttgctggggatcaggtttggctccagccagctactcctcctaaaggtggaccttcagttggtggatcgttgccatgcccacagttccggcctttcataatggaacatgttgctcagggtctaaatgctcttgaacccaacttcatgaatgctacacaggctagtggacacttaaataacaatgcaggagttccacaaactgctcctagtgcaaatcgtttaaatgctacccctggtgtttctatggtcaggccaacatctggtgttgctaaccatgtagcagccagtttgagtcgagcaggaaatgccatgttggcttcttcggctcttgcttctggtattagtggaacttctgtgcgacttactgctggagctggtctccctgttcacatgaaaggtgaactaaacacagctttcataggactgggggatgacggtggatatggtggtggctgggttcctttggcagctcttaaaaaggtgctgagagggatcctaaagtacctaggagttctatggttgtttgcacaattgcctgaacttttgaaagaaatactaggatcaatcttaaaggacaatgaaggtgctctcttgaatttggatcaagagcagcctgcactccggttctatgtcggaggatatgtatttgcagtaagtgtacatcgggttcaactgcttctacaagttttgagtgtgaaaagatttcaccaccagcaacagcagcagcaggctcaaagcaatgctcaggaagagctagcagcagttgaaatcaatgaaatatgtgactactttagcagacgtgttgcctccgaaccatatgatgcttctagagttgcttcttttatcactttgcttacattaccaattttggttctgcgcgagtttttaaagctgattacatggaagaaaggtctttccccggttcatggggacattgctactgcacagagggctcgcatcgagctttgtttggagaatcactcaggatcagcttcgtctgataacaccgagaacagcagtttagccaagagtaatattcatcatgatagagcccacagttcagtagaatttgccctgacatttgtacttgaccatgctcttattcctcacatgaatgtagctggaggagctgcctggcttccatattgtgtatctgtgaaacttcgctattcttttggggacaacaatcatatagctttccttgctatgaatgggagccatggtgggagagcctgctggttgcagtttgaggagtgggaaagatgtaagcagaaggtttcaagagctgtggaaactgtgaatgggtctggtgtagctggagaggtaggccaaggaaggctgcgaatggttgcagagatgatccaaaagcagcttcaactctgtctacaacagctaagagatgacccactttctgcaggctcgactgcatcatgaacttgcttggaatgagctctatcaaggccattgatgtctgtcatattcagcatggcctttggctttgttaacgtgtagatgtgaaggaatacacatttggtagcagtgacagtttcgcctgaggcttgctcagatgacaattttgtacagtataaatggtggcggttgactctgatggacctttagttagcccatttgaacgtggcctgtaacatagctagggtgggtaataatgtgccaaggtggaattgctcagggatgcaaaatgatcttcgggaattggttgtctgtatcatctactgtaatcgtgtcctttttctccctttctgatggatagttcatttttggattcgttatcatctttcttctgtctgtactatgttaatctagacattggtggatctggtatatgtgttgttgtacatgatatattggcactggacttgagactgacgcatttgacgtcttagtattagcaggacatctctagttgtgttcagagtgattggacacaaaaaatattgcttggagcttttctttagggctagtttgggaacttaaatctcgaccccatagattcctggagaagatttgagttcccaaactagttcttaatgtttcttttttttttctattgcatcttcttagtaaatgatgtttttgtaactgtaaaaaccgtgccggtcaagattgatacctggatggataagatgatgttgggtcagatttcttgctcatggttaggaaattgatgtgagcactctggccagtttgtttgaaactgatattcgtgagttgtgattggaagcgtatggataggctttttaatcgtgttaaccgtcatacgggtaggcctttttagttctcgtgcttctacgtttgggacacaggtgtcagtttttgtgctttaa

SEQ ID NO: 30992 - DNA, 1255 bp, Zea Mays
ggtaattgacctagtcatatgcaattggacgtcctcctgttctgctgctgtgtcccactctacaatttcagctccatatatacttacctgatggcttcacctaaaagttttgtagacagctttgttgataagacggagaagcgttataatcaaaacatgtctcctgccattccaaaggataaatggaggaaaggatctcagatggtagtaaccaagagcttgtttagacgaaggccaaatgctagacaactggggttcacctttcggagaaagcagatactgaaaggagtagctcaacaggagcatgattgtattccggatgaacattatgtgcagacattattttctatcaaaggacttgaagatgaactggagagaagaactttgacctatacctcgtggaaccaatcatcaaatccgaaagacaaaatgacttggcatcctatgaaatttgagtatgatacatctagccctgagcatatcaatgctatcaagagaattgatcatgtcaactatcaaatggagcacaggacagagtggtgccaatgcaatggtacctcggccccatgttttttatttgccaggaagttctcctatagtgcggccatgcatcttttggaacaaggagccattggcacaccgaaatctgctcagctgatgattaacttttaacaaaattgtttacacaagtctgcgctcacttttttgatgggtcattataccgttcacaatttcaccagcctcaatgggagctgtacattagcagcggtagctacagagacatggagtatcagagtattgacagcgaccagaatgcgcttagacagctaaggacttgaagagagttgatgcacaaactacagagcctcggttttgaagtttgtcagctctatcagtatgcgatttccaggggacagatggtagtgaaggacagagtacacacaacccttaccctaacaggacaggaaagttataacaatagcttgattttccttataaatattcttccccttgtatgattaaagaatagatagttttttttacttgcatacaggttatcagacatagcgaatagggaaacatgcaagaagatacatgtgtccataggacctactgtttagaacattggtcacattggcaagaagataagctgccttttcatgatctgcagctacaacatagcaatctgggctccaccaattttgaatcgacgtctatataaactgccttttcatgacctccagctaaaacaaaa

SEQ ID NO: 30993 - DNA, 780 bp, Zea Mays
gacgggtggacccacattgtcatcgtgctcctcgtgtaacaaacgccgggtatgtagcgggccgtgccggaatcaagtggtggagcttccccctatcctcgcaaccgccggcaccagcttgggcccaccggcttctcttccctgggtatatatccagagtcggacacctccttctccccttgttcgccaggattccctcgcgggcgtcgaaagaaagaggaagggtgagagggggttggagggggttgcgctcgtgctcggagaccgggctggtggagctgtggggcctctggtgctctacgcacagatcggagtcgtggctgtgggcaagacacgatcgaaatcgctcactgtcgcttgacatcgcctcggttccaccccacgctgtggacccgctccatcacaacaaatccacggaggagcaagtgattgaggaccccggtacccagcaagtgggaactactgaacaggagctcattgaaggagaagaacaggtggttcaggaggaaacctacaacgaggagtacgagcttatctaggtggcgtctcccagtcagcttgatggcatcaaggaataatacttagttcactttattgttcttatttatttttgtaagacttccgctatgtaataatgatatttgtgacatttatctctatacactttgtcatcatatgtgatgttcttctttggcgcatatatgagacgcacccggctttatcccttaatccgggtgtgacaggcagcctagggtttgcctgatgaggaggatgaacaca

SEQ ID NO: 30994 - DNA, 1694 bp, Zea Mays
tctgggccggtccatccgtttccgacacgctcacgcaattcgggcgaaaagaacagaaaagcatctgtctcggttacgtctctttttctctctctctctctatcggccgcgtccggcgtcccgtccaaaaagggaaagcgatgcgcgtggcgtggcggcacttcctcctccgcctgcctcgcccgccatggccgcgcgcgccaaggccgccgccgtcgacgaccacgaccccatgccgccaccgctgccgctcccatggccgcgcccagcgccgctcctcgtcatgctgtccctgctcgccacggcctcctacctggccctcacgcgctttcccgccgcgctcctcccgatcgcccctcgctctcgcccccacgacgcgcccgcgcacgcgcccggggacagctgcgcggggttctacgcgggcgcggggccggcgcgcgaggtgtgggcgtccgtcgaggagttcggggccgtgggcgacggggccacgctcaacaccgcggcgttccggcgcgccgtcgcggagctgggcgcgagggccgtcggtgggggaggggccaggctcgacgtgccccccgggaggtggctcacgggcagcttcaacctcaccagccgcttcaccctcttcctgcaccgcggcgcggtcatcctcggctcccaggtagcaacgggaccatagatgggcaaggtcatatgtggtgggagctatggcggaaccgaaccttgaaccacacgagaggccatctcatcgagcttgtgaactcaaccaacgtcctgatatccagtgtcacgctgagcaactcccctttctggacagtacacccggtctactgcagcaacgtggtgatgaaggatttgaccatactggctcccctggatgctccaaacacagatggcattgatccagactcgagctctgaagtttgcatcgaagactgctacatcgaaagcggagacgacctcgtggccgtcaagagtggctgggaccagtacgggatctcatttggcaagccgagcacgaacatcgtcatccagagggtttcgggcacgactccgacgtgctcgggcgtaggcttcggcagcgagatgtcaggaggcatatctaacgtgctcgtccgtgacctccacgtgtggaattcggcgcaggccgtgaggctcaagaccgacgtagggaggggtggctacatcaccaacatcaccatagccagtgtggccatggagaaggtcaaggtgccgataaggttcagccgaggcgcagatgaccatcctgacgacaggtatgacccggccgcgctgccgaggatcagcaacgtgctggtcagcgacgtcgtcggtgtacacctgcagcgagcaccgatgctggaggcagtgcctggcgcagtttatgaggggatctgcttcaggaacttcagcttcagagggataaggcggcagcaggacagcaggtggcattgcgagtctgtgtatggagaggcgcatgacgttttccctgcaccgtgtgaagagttcaggagagatggatcctcctcctggtgtggacttctttgaccaactactctatctagtagtagtacatactacagcgcccacaagttttgggagtggatgatataggttttttagattatacagacaaactcaattttttaaactttaattagtcttctgttttcgaatggggttagaaatatgtg

SEQ ID NO: 30995 - DNA, 499 bp, Zea Mays
tgatgagtcctgcagccccacaacacaagctgagagaggccatcgctatggtagacgaggtcgggccgccggagaagcctgcaatggagccagcaccggccgcgaagcagatcatggtgccggagaagccagaggagatgctgagagctcagcatatgttgaccactctggtggacgaggtccggccaccggagaagccagaggagacgccggagaacacctccgcaggtcagcctgccctgttgcggtatcgccccgtcagtctctgtcctccctcgactgaccgccgccgctcaggatgtccaactccatcctacccccgcccaagaatgttgatgtcgagcgctccgcctgttccgctcccgcgccgccaacgagcaccgccgagctcctccctggcgccacgtcccgacagacgtcggcgccgagcggctggctccaccgtgctgagtgtggttggaggccatggccaacagccagagagacctagcatcgtcca

SEQ ID NO: 30996 - DNA, 819 bp, Zea Mays
atgtcggaatcatgtgatcaagtgaaggccatcatcaactgtttcttcctctatctattcatcatcaataattttgttgagtggtgggttttggcaggctgttttcttggagctatgtatgagcagagttgcaattttgacaccactaaaccttcaggtataagagagggggaacctgtgcttcatgctcgtggagatggcacatgctcctattgtgacattgcaaaccataagtattcaccggctatcgatatgtggagcatcggttgcatttttgcggagattttgactgggaagcctttattccctggtaaaaatgtggttcaccagttggatttgatgactgatctcctgggtacaccatcaacagatactatttcacagattcggaatgagaaggcaaggaggtatctaagcagcatgaggaggaaacagccaatacccgtttctgacagatgtggttgtaactgttgcaatgttcatattaattggcttattctagatgcaacactacaggacaaaattggatggctctttgcacctttggtgctacttcagtttattctaacggggagcgttgagttagtgaacatgcacaaatacaatagttatgttctaaaaggctataatccagtctacaccttccggtatttgagacgaggtaattctgagatttggacatctcctagagtggtctcctagagtggtgatgcttagcatcacatgtcattggcaatttaactgctacttttgtatcaattgtatgatgaaatagagttatctatatgccttttctatcaacatttttaaatatttttg

SEQ ID NO: 30997 - DNA, 237 bp, Zea Mays
gtgcgtatggaggtgtgtgggctgtttatgggccgtgtgcgttggggtgtatttcgttgtgcgtatggaggtgtgtgggctgtttgtgggccgtccccatgtgggaataaatatgctgtaacagaacagaggaggttacgaaaaatctgagtagaaacacctaccaaatattctctcattgtctctcctggcgacggtgaataccctgctcacgtcccggcgatcgcgtcggcggcc

SEQ ID NO: 30998 - DNA, 3746 bp, Zea Mays
cagccgttctcctctcagccgtcgccgtcgctctcctctcctccacactgctctcctctctcctccgagccgcagctcttctctctccctctcccctgcgcgccgccactgcgggcatctacaccgctgccgctcctctcttctccgagccgcagctcttctctctccttctcccctgcgcgccgccgctgcgtggccctacacgccaccgctacgggtgccctacgcgccgccgtcactgctccagctctcctctgtttcccagccaatgccgccgctctaactccccaaggcatcgccccgacgacggctcaacgacgccccgtcgacgcctcgcggacgccctgcgccgcagcgggcgctttacgctccatggcaaggcgcgttagatgcctcaggttccacgcgcgccttagcccctaagcgacgctaaggcggcgcttcaaggacgccttgataagcatgattgggaggttatctatgcttatagcttttgctctggggttagtgttgttgaattggaatgaatatgtgtggtagtggtactgtggaccgtggaggatagctgagcatgcttttactatcttttagtttcaattttatcatatgccaaaagtgttggtttccttgttttatctttaatctttcattggcaattggaatctctgtctgtaacacccttttattcctggtaaaataactctaattttatgcttcttcatcaggtgaaaacatggattacgactttggtggcacctcacccgatccctatgggggtggaagcatccacctagtgtgtgatcattgcggtaccagtgacaactacaccactgacgacgctgatgatggccaattcacgtgccgtacatgctctgccgtgcacactacacaggcaactgctgctgatcctcatgacttccccgccactggcaacatctctgtccgtcgtgttgccacccagcccacccccaagcttggtgcccgcacacccgcgccttacctgaggacccctcaggctgctcccgtgcctgctactgccgcttttgatgacttcacagagctgagtgagccgcgggactttgtgtctggatctggcacgtgtggggagcctgaggatctggcagtgcaggtccgctggcgctatgtacggggtctccaggtgatcctgcagcggcagctggaggtgctggtggagcggcaccaggtaggcgcgtttgtgtgtgctgttgccggcattgtctgggtgcggtgggttgctgcatccagggtgtttgatggaatctgggcccgccaggtgcttgaggaccacaaggccgtggggagacagaagtgttatgatgacaagaaacctgatgagatgaagtatgaatgggatgatgatatgtcgctccaacgaaaagacaggcacaagctggagtttgcctttttgcgttcgttgaggatgatgctgccggtttactcaacattggctgtttgtttcttggcctgtcatattgcccgtgaagccatcttgccaagtgacatttacaggtgggcaatggaggggaatatcccatatgtggctgcttttactgaagtagacaggttccttgggagctctttccaagactgccctttggatgcaaggcagctgttcaggccggtgcgagttatcggagcatggcaactggaagctgcagctggatccatagcacaaagagtagccttgaggcttccttcagttaacttctatgcaattgctcaacgttgtttgaaggacttgttactgcctatagatagaatcctcccccacgcatgccaaatttatgagtgggcaatgcctgcagaattatggttgtctagtaatcctgctagagtcccaacacgggtttgtgtgatggctatcctaattgtggccctacgacttctttataacatcaacggtcaagggatatgggagaagatttgtgaggaaggaagaaacccaagtgaatctcactatgatgcaaattcatctacttccaggaagcttgaggctagtaacagtgaggagtttggcacaagagaactgttgtgtgctatttcagttgcctatgataaaatcaatacgtcacatgactactcgagtgatctccgctcttatctcaaatactgcaaggaagttgtttttgctggaattacatcttcagatgaacagactcatctaatagagatcttttgggatatgtacaaagccagggaggatgataatatagaagatcatgtaaaatcccagtcccattctatggcagacattccaattacaaatggagtgaggaaacactaccgagatggagcttttgttaaagcaagttccttttctgcatcttcaggtcatgatgcaatgcaaatgctcaagtcagagatgcaagatcatggatttcattatatgccacctaggaaaccaaggaaatcagatggttatcttcgttataggcggcggcggctaagtggtggctttatttttgttgcacatgctgattattacttgttgctacgtgcttttgcaaagcttgcagaaattgatattcgtatcatgcatattagtgtgttgaaacttgagaagagactcgcatgtattgaggagcgaattgaaagaagcttgaacaccttacataacttttctactggaacagtagatgagctaagatctgtatctgactgaagttcctagtgtagtctcatactctgctagcatggaataccccctccattccttctggaaaaaaacatgtggtgccattgcgtaactgtggttttgaagaatatacgtagcttgatacctcaggaattgagggcttctttctgtggcctcttggcattggtaagcaacctgagcacaaggacagggcaggatgtgggtctgtatttgctgaagcaatatgtaccaagaattatgccccccttctttagaacggacataattatatcagggtcctaatcagtactgtggtagattcagcaacagttccagtagtagacctcagtgcttggcagcaatggcactggggatctgcaatcatgaggcagtttcagtttgggaactggagtggcaagaggaaaaaggctggaacctgggctttttaaagaggctaatcagtactgtggtggattcagcaacagttccagtagtagacctcactgcgcggcagcaatggcactaagggatctgggttctgcaatcatgcggcagtttcagtttgggaactggagtggcaagaggaaaaagcatggaatttaggctttttaaagaaatgctatcagtattgtggtcgattcagcaacagttccagtagtggattcagcaacagttcaaggttagtacaattggtcttgtcaaagctgccgacagaactaaaaagatatccagcatagtgtaatgcatcttgatgtactgccgacatttatttcgttccagcttctgcagcaagagctgatcgtttcaaaggtgacgagaaattggtcgtactagagatgtactgtctattcgctgtatttgcaagtttaaaccaattattcgaactactgcagctgtaatccagagacaatataatatagaaaaaatagaagtcggtggttaaagccgtaacaaacatgctaacaaacatgctagtaggcttcaattgttaagggcttctttgtttcagcttttttgatgaacttttatgagaatctaactatggtgaaaatctgagtatcatgtgtattacatgcgtagaaagataaaa

SEQ ID NO: 30999 - DNA, 653 bp, Zea Mays
tcacaatgtctgaaaacaacatacaagaggtgcgtataatgagtgcgggtttcgacaagcagatattggctcagaagctttcgaagcttaatagctcacagcagaccatagagactttatcacattggtgtgtctttcatcatcgttgctgccaacaagttgtagaaacatgggattctgagttccatgcagctcctgtagagaggagggtatctttgctgtaccttgcgaatgatattatgcagaatagcagaaaagaaggtaatggatatatagctgaattcatgagggtcatccctgctgccttgaatggagtgttgactgtaagagatgattttgggcggaatgtcccaaaaagactgattgacatatgggaagaccgtaaaatatttgatacccaggcacaaagcctgaaagatgattttttcaggaggttaaaggacattagaaaccagttgaaaaatacaggcagtgagcagctggagaaggttgtctctagctacaaacatgtcctgaatgctcctatggatgaggatactctgatgcgaaaatgccaagcagctcttatcaattttgatgaactcaataaaacatatggaaataactccattttagctgcagggtttccataaaaccaacaaactaccatggcg

SEQ ID NO: 31000 - DNA, 3054 bp, Zea Mays
taccactgtctcctctccgtgacgcacgcccgagatcctctccgcgacacacgcctccctctcctctgccccaccctcctccccacgccatcggcgccgccatcatcggatccggcccaagatgcctccgccccacgcgcccgagtcgtcgaggcacactccttcccgcctccgtcgtccacgcatatctccgcctcacctcggcgcccgagtcgtcgcacgcgttcgcggtggtgtccatcccggcaccggcctcacgcaccgtctacagctcccaactctgctcctctcagttctccctccgcatttcgccttctctcccttcctctccaagcagcgtcctcctcgcctagatccgtacaagcggcaaataacctctccggcggcgagacagatggagtcgacctccggcgaggatgctccgaagcacaacccgattccgtccgcgctcgtctccaacctacagtccgtgctcaccgcccgccgcttgtccgcagccgaggtcagcaccgccgccacagctagcgaggttgaggccttggcttaggaagcagaggcgttcgctgcccccacgggagatgggacgctggcgaggcccatcgtgctactgacctatgccggggggatccggtcggcgggtctcgcggcgctcgtcgacgccctcgttgccgccgaccgctgcgacgtccacgtgtgtgcccccgaatcgtacgtgctgcgacttagaaaaccaaaccacagcgggaccagtgctcggatagggtccgacgacgatgcaagcaaggagtggcgcgcggccgacggggcgcagatcggctcctgcacgtgcagcgcagccgcgtgacagtgaagcagggaggccgcgataggtggcgcagggagggtgcgacggaggcaaagtgcaagcacctggggacttcaggtaagtagaaaaccaacactgaatttgtcggttctctgttttgtgattgaccgattggtttgttgatctcagaaaattgtttcaccgttaagcaccaatttttgggtaggtcagtgttttgggatgattctcctatgcatcaatagtaaccttgtgcttggcaaagttatttgccctgataatgttgtaggtttagtgaaaagaaatatactgacatatccacctatccatcgatgcccaatggagattgacctctatcaagatttagttatgtgtctcagtagggcaatatttctgtgagttgtatactgtggattcctcatctgcatcatgaattgatcgcactatttatgccctatttttcaaaccatggtttctgtaattctttgcaccatggtatttttctcaaatgattttatctttcacaacccggactgaactcactgaagcagaaagaaagagtacaagtctactactgcagaaagcaaggagaatgccaatagaagcagatttcatgtatggatcgggcgcccaacaatgaatgatgtggtgaaggaacttgagatcatcagatagaatgaaggggcacaattgttaaactcagcgtctttatcagttgaacaatttggaaacaaaaagagaagagatccttatgcatttgtctatggatgatggaagcaacaacaacacttttgactacaacagtgggagttcaattaagttgttcacccaagtagataattgtctccactctttcaacaagttattggagttattatatatgtctgctccatatgaatgccttttcattttagtatcacatctgaaattaccaaccttttatactggcagtgtgataagcattgaataaaagtttttttatatgttgaatattcaacaatatatgtataattttatatatacataaatataatattctcatacgcgtggttgctccgttggtatattgttgaaaggttgttttttacggtacatgtgctgaaatggccatgctttgatctgcctataggttgaaccatataagctttctctcagactcgattatgctgcttacatgatccatttagctgtctttggatttttggggtaactctccaatatctcacatgaggttctttgtgatagctgttacttaatctgtggtgatctatgtaaatgtggcaacacttgcagttcctcgagcccttgtgcatggatatatcgtttagttgtgtctaataatttgtaattagtggcaacatctttttgttattttggttttatctgatttttattgttataagatctcgattgcaaactggcagttagtacacctttaggttttcctttgtcgtatcaagctaataatgtgtgaagcagggttcccattctgatctttagttttttgtgattttaatagcaataacctttttcgcaaaaaagtaacaaactttatgcagtatgcggttcgtatagttcccagtatccttttggacttagatttagttcgatatatggttatgtttattgacagaatgcttttagctttgcagataaaatcttgagcaaaatgggagaaggtttgggttttctgcaatctgtcgtctcctcttctgctgggtatctccattattattctaatgaagagggctacgagttggattttcgtaggtacatttgagcgtgttttggaatgctgggatcgtgaaacacgtgaatatgttgccataaaagttgtacacagtatccacaagtactgtgatgctgcaatgattgagatagatgtgctcaatcgccttgtagaaaatgaaaaatatagatttctgtgagtatctcagagacctaattgcttaaagtataaccctattctgtttttgacttgacagttcctcttcaatttgtcagctgtgtttaaattcagagatggcttgactatcgtaatcatatatgcatggatgtgttactttatgtttgtttgtgtttaatatagaaggctcccttgccttcgttcgatcatgtggtatttgaaagtgatgtctctataaatgaagtaaggcagggcaatgcttatgttactgttgtcagttattagatttttaaaccaagcatatgtcaatgtgtcctgtttcaat

SEQ ID NO: 31001 - DNA, 1133 bp, Zea Mays
gaagccaccaacttgctggtggagtatctagagtcgttcgcattgactacttgatcatgtttgtttttgcgcttatccttataataggttagagtacttgtctttttctgtaaagtagtggccattggtcaacaaaatattacctttgccaaagaattaggagatgcaactgcatgttggtcacttctctctttttccttgaaaacctgaaagttcaatttacttagaaactagatgaaacacaagttgttatttatcctcaagtagattaattaccactaagataactaaaaaccatataggtattcaccaaatagtcactgtaagtcgataactctaaagtccaaaataaggcatgttgtagcaagcaatcattcaactgttttactgatattagttcagttctcactagctgatgggcagaggtttgatctatggtgtaaatagctattttttcttgtttatttgcgtagtcgtgatcttgttttatgcaatcatatgtacttaccattttgcatcgttggaggtgcagatcagtggagtgcactcaaaactgagaatttttccccaagaagattctttatttgttttaacaaactagattcatccatgttgtttgcatactgaatattacttctaaagaaacatgttacatccataatttttgttttgggctattacacaagagaccgttttcactgcactgttctatccagatttttatcgactacaattttgtactaaccaactctacctacagaaacaagacctgcctacagtgacgaacttgcttaatataaaacacacgagccctcttcatccaccaccgatggcggatggatggcatatatgattctctaggcacctgttatgtactaattgaattttaatttcagtatacactgtgtaatggtcaaaggagaaaacttgatgaatggagaatgtacaaagatcaaagtatggctaaatgaccttgctggaagtgaatggtcagcaaagacatatgcacagggagaaaggttgaaacaagcacagaacgtaaacagttcactttctacacttggtgatgtcatatgcactcttgtaacgaagacttcacatataccctttagagtacggagcatagagcttgg

SEQ ID NO: 31002 - DNA, 1187 bp, Zea Mays
tgtgaaaaaggttattctagatactattcagttgcctctgatgtacaagcacctgttttcttctaaattgcgcaagcgatcaggtgtcctgctatatggacctccaggaacagggaagtttttcactgtcaatctcaggctaggtctgcacgcccatgtgtcattttctttgatgagcttgattccctcgctcctgcacgaggatcctcagcagattctggcggtgtcatggacagggttgtttcccagttacttgtggagatcgatgggttgagtgacaacagccaggaccttttcattattggggctaccaataggcctgaccttcttgattctgcccttcttcgccctggtcggtttgacaagcttctttatgtcggtgtaaatactgaggcatcatacagggaaaggatccttaaagcacagacgcgcaagtataagctgcacaagaacgtttctctcttgtcagttgcgcagcgttgtccaccaaacttcactggtgctgatatttacgcgctgtgtgcggatgcatggtttcatgcagcaaagcgatcagttgaaacattcgaaaccgatccttcaagaagtaatgacgccagtgccgaagaagtcattgtcgagatcgacgattttatcacagtgttaggagatatcgcaccgtcgctctctctggacgagctacaaaactatgaacagttgaggcagaagatcgaaggaccttctagatgaatgccagcagcgatgcctccttgttcgtgctcggcaagtcggccggtgtgagcaaaatccgtacgtcatcgtctccagtggtgccattctccgtggctctgcacacggtcggggactcggcggccttgctggatcatttgtgccgccaaacggtaaggaaggaggcaggcgaggatgtcgcaccgtaaattcgagcacccgaggcacggttcccttggcttcctccccaggaagcgatcctctcccgccaccgcggaaaggtgaagtccttcccgagggatgacccaaagaagccctgtcacctcaccgccttccttggctacaaggctggaatgacacacattgtggtgaggtcgagaagcctggctccaagctccacaagaaggaaacttgtgaggctgtgactatcattgagactcctccccttgtcattgtcggacttgtggaatgtgaagacc

SEQ ID NO: 31003 - DNA, 1526 bp, Zea Mays
accacgcgacgcaaacaacagagctgccagcctgccactgaggagtgaggaaccctaagcggcgcactgtgcaggcgaaggcggcgcgctaccggcgacggccgacgggggatacggcgacatcgtccccctcgacccctcctccatccccgacgcggcggcgccagactgcaggtgttgaatgctgatttgttgtggcctgttgcgtcttcaccagttcatacattaaacttgaagaaccacgtggttgaagaaaagcccactgaaaatgagtaatacatcatcttcgtcaagtggtgagcgtgctatgcagtgacagagggctgtggagatcataagttcataacatcctatgttagcctttcacttgatcataagttcataacatccttatattcatgcagggatgtgatatatgctgatattccaaagctcattccatttattgatctgattcgtccgattgacaagaaggcagagtaccaaatccagaagctcaccgatgccgctgacaatgccactgttcgagagaaaccaggaaatgcacaggcgaaggggaaggacgggcattcggatgaggaagacctcctgaagtataggccaaacccagatatgatggacacaaagcctggtcctgatgggcaggatactgatggtgtttaccgtcctccgaaatttatgcctactagcatggatgatgaagagaaacgtcgtaaaaatgattcaaggagagataaagcgatagcccgagtggcaatagaaaacccttatattaaagagataattgatgatgctgcagacagacctgaagagtggaaggaaacagtgggcgatgaaagcagagaatttgggaggtacatgcgacagagagaagagcaagagaagcaggaagaggagttgttcactcgggctcctgtaaccaaacgtgataagcagatcgagaagcgcataaggagacaacttcatgggctaggaggcttaactgacggtttcgaccttgggatgaacatgctgttgggaggagacaaggaagatgatggcggttcaagcaagtcgcatggcaagagcggaaaccgaaagaagcacctgaagagcagcaagaagaggaagaggcattagccttggacccacactgctgtagcacttcaacataccgatacagcctagagacggttcaagcaatccacacggaaagttgaagctggagaaaatacaagaaaccaagtagagaaaaaaagctttggttcctgtaggcgtattatttctgaaacagaaaacttgatctgagcgactgatcctgagccaatggaacagtatgaattatatggcttgaacatggtaggtgtaccaagttttgttctgatagtcgaatgattgttgtattattgattaacaagaccaacaatatatagactaggctccaaccggttcatagaaacagtgcccggtagagatggacggtgatcacctgattagtaccttctaagtatagtcatgcactagagatggaaggtgatcaccttgcc

SEQ ID NO: 31004 - DNA, 4527 bp, Zea Mays
ggacaaacagacgacacaaggcgaaggcaccgcccgcacgccgacacgcgcggctacacctgccactcctcccgatctcgccggccggcgactggtgcctcccgccccagccctcctccgggggcgatggaggcggccttcgacgcctacttctgcgccgcggatctggaccgcgacggccggatcagcggccaggaggccgtcgccttcttcaagggctccggcctcccgcagcccgtcctagcgcagatttggacatatgctgataaaaatcggactggtttccttgggcgcgaagacttctgcaattcgcttaaacttgtcacagtagctcagagcggtcgagaattgacacctgatattgttaggtcagcattatttggtccagctgctgcaaagatacctgctcctcggataaatgtttctactgctggtcctcagacaaacagtgtagctagccccccgaatgccactcgagcactagggtctggtcaacagaatcctgctgtaagaggaccacaagtgcttcctggggcatcatcaaatccacaagtgaggccgccacaacctccaaatgcaaacactgtgccccctgttcagggagttgcatcaaggccacccgtgggaggtggtcctagtgggctaaaccataccagctcaaccacaacaaatctcgctacggattggtttagtggtaagaggagtgcaagttcgttgggtgcaacttcacaagctccaaccagaggtatttctccgcagggcaaccttactactgcaggaatttcagcacagaattcaactcctctgccagtctacaattctcatatgccgggtgctacaacacctgccaatgcaaattcaacaaacgtaaacatgatgccttcacaaccatcagttagtgactccaagacattggtacccttgggtaatggattgccatctaactcaacttttggtgttgaccctttttctgtgactctacaagcgaaacaagagtcagctttgacccccaatgttccaaataatcttcccagttctacagctcctgcctcagctgctggacctcatcaccctcctaagccaatgcaggccggtcctttgcagggtatatcgtcgcttccttctcatactagccagttgccacacagtcagccagctcctaggcaacaacaatttaatgctattccaagcactccaggaccagtgggtgcaaatattcctggtggacaaattccttcaaacccataccaatctcaggccccatggccaaaaatcactcaagtggatgtcaggaaatacatgattgtatttatcaaggtagacagagatcgtgatgggaagatcaccggcgaagaagcaaggaatctatttttaagttggaggctgccaagagatatcttaaggaaggtatgggatttgtctgatcaggataaggatgggatgctgtctttcaaggaattttgtgttgccgtgtatttaatggagagacaccgagagcatcgtcctcttcctgatgtactaccagatggtatttgggctgagggcacctcgctaccctctaccggccagtttgcaggaaaccctagtggaccgccttctcatgcaagtacaggattcgcaagtagaggaatgcaaggaccacatcatgggatgcttccctcatccatgaagccaacatctcgaaggcctcttcctttagatgctgacgatactgttaaggcagagcaacaaaagccaaagatccctgtattggaggaacatctagttggccagttgagcaaggaggaacaaggcacactggatgcaaagtttaaggaagcttcagatgctgataagaaaatgttccaatcatatttcttatggtaatttaaatggcagtggcgcttgatctctagataaattatttccgtccaagaattggaaaaggaaatccaggattctagagagaagaccgagttttatcgcaccaagatgcaggagcttattctttacaaaagtaggtgtgagaacaggcttaatgaagtctcagaaagtatgtctgccgataaacgtgaggttcaatcccttgcagcaaaatatgatgaaagatgcaagaaggttggagatgtggcatcaaaattaacaatggatgaggccagttttccgtgagatccaggagaagaaacttgaaatttataacgccatagttaagctgcaaaaaggggatgaaagtgatgaaaagcttcaggagcgggctaataagatacagtctgatcttgaggagcttgtgaaatcattgaatgaacaatgcaagagatatgggttgagagctaagccaactacattggtggaacttccttttggttggcaaactggaatacaagagacagcagctacatgggatgaagaatgggacagatttggagatgaaggattctccatcataaaggaactaacagttgaagtagagcctcccgttgtaccaaagagtcaacctactgttgaagatgtcaaagtgtctacaaatggggcatcaacagagaaagaagacaataagtttgctaaatctactgctgctgctgctgtggagcaggcagttgaacctgaagcaataccatccaatagcaaactagagtcaacaaaaagtcctccagttagtcctgtcaagaacagagacgatggttcgaccgatgagcttgatacaaagcaatctggaccaaatgacgtcttaccacgtgccactgagagcgtcagtaaccgtggaatggattcctctgcccatggagataaaacttatgatggacattcatgggccccatcatttgatcatggcactgacaatgactccctatggaactttggtcataaggatggtgagaatggtgattcagatctcttctttgggccacaaggtcttccaccgataaggactggaggcacaccagttcagaagtccgtcttcgattactccgtccctagtacaccgatgcaaaactcagtctttgattattccatcccaagcacaccgatgcaaaagcctctctttgattccgtccctggtacaccagtgcagaaatcagtatttgattctgttccgagtacaccgatgcagaaatcagtatttgattctgctccaagtacgccaacgcagaaaccattctttgactcttttccaagcaccccaatgcagagatccatgtttgattctggcccaagcagagcagaatctcctactgctggcagcgtgtacggcaaagagcaaaagggattctttgattcttcagttccgagtacaccaatgtacaactcaaacctcacgcccagatacagtgaagcaggagatgattcatttgacacaatgtctcaatacagctccttcggcatgcacgacaacaattcttttggacagatagacagcttctcaagatttgattccttccggagcaatgctgataatggcggtaatgacgcctttgcgagatttgattctttccgcagcacttcagatcaaggcgggggcaacagcttcatgaggtacgattccatgaacagcagcagtgaccatgacagaacggatacatttgcgaggtttgattccatgaagaacagtgacttcaacaaccagggctactcatttgatgatgacgacccctttggaactgggccgttcaaatcaacagagacatcgaacagcccgacgagacatgggacggatgcgtggagtgcattttgacaggtattgtattatagaggtcatgttcttgtgcaccttactgcagatatacatacacgtacaagggcaagacattattttttttgcatgggcctctgctccgcaccttttggacgggacggggcttgcttgtgtgtttaattttgtacctaggctgggaacatgtgtttggagggatggtgctgcttataaacattctttataccttgtattgtacaagtacacctacaagatgctagtcaacccgttgggttgaagaactctccgagtgttttcttccattgtgtagggttttttttctctctcagtttcttctgtttctgcaaaaagttctgagctctgtacatacattttggctaagtcaacctagttatgaggatattgtgagcaattaagtcggttcagcgagaagctagggatcagtttgttcgttgttttaacaaaccgtgagggttgccctccataggggtggtcattctaaggctgaaacttgaacccgaactaaactcgaatagaccgaattgtcggtctatttgggttttttggttcaggttcgattcttatatgtgctatattttggggtatgggttctgttgggggtctgctgctctgcttcgtcgtcgaaggttctttaaaaagaaataccttcgaaagatcagcgtataatcaagcacaatgtgaaggtatacacgaagctgctgtcttcgaaagatcagtgtataatcaagcacggtgcgaaggtatacacgaagctgctgtctgaggagcttcggcataatgatagcttgagatgaagggctgcaccgacttaaaaa

SEQ ID NO: 31005 - DNA, 2449 bp, Zea Mays
cacactcccggccggaatctgaaccgaatgaagtctagtgcagtggtggtggtggtagtgtagagagccctgcccttccgatccggtccggtccggctggattcctcactttagtttttttttcgcttcttctctgatcagatgcaatctcgccgttgccgtccgtagcaaccgcacgcttcctcgctcgccgcgaaccctagagagcaggtgtcggtgtcatggccttctggtggccgctgctggtgctcgccgccgcatacgcgctctgtcgcctgctcctcttcctcatcccgcccaccgtcccatccatcgacgtcgacgcctccgacgtgttggccaaggaggacagcttcatctacataccgagaaggggtaaatcaactcagactgacaaggtccaatgctatgaaccagcgaccatgaaatacttggggtacttcccagtggtgactcctgatgaggtcaaggaacatgttgcacaatccaggaaagctcaaaggatatgggcaaaaagcagcttcaagcaaaggcgccagtttcttcgaatccttctcaagtatatacttgaacatcaggatctcatatgcgaggtatcatctcgggacactggaaagactatggttgatgcttcattaggagagataatgaccacctgtgagaagattacctggcttttggatgagggcgagaagtggctgaaacctgaatacagatctactgggagatcaatgctgcataagagagcaaaagttgagttttaccctcttggagtgattggtgcgattgtatcttggaattatcccttccataatgtttttaatccagtgctagcagcagtattctccggtaatgcagcagttataaaggtctcagaacatgcgacttggtcgggctgcttttattttcgtattatacaagcagctctttcagctgttggtgcacctgagaatctggtgcacataataactggttttgcggaaacaggccaagctcttgtatcatcagtagacaaaataatatttgtgggatcaccaggtgttggaaaaatgatcatgaaaagggcgtcggagactctaatacctgtaactctggagcttggtggcaaagattcatttattgtgtgtgaagatgtagatttacccagtgttgttcaagttgctactagagctgctctgcaatctagtgggcagaattgcgctggtgctgaaagattttatgttcacgatgacatctattctgcctttgtttcacagatagtgaagacagtcaaatctataagtgttggccccccattatcaggcagatatgacatgggtgcaatctgtatgattgagcactctgagaaacttcagaatcttgttaatgatgctctagacaaaggtgccgaaattgccgtcagggggagttttggcaatcttggtgaagatgcagttgatcaatttttcccaccaactgtcctggtgaatgttgatcacacaatgaaaattatgcaagaagagacatttggacctattataccaatcatgaaattcagttctgatgaagaggctatcaaacttgcaaacgactcaaaatatggtcttggctgtgctgttttttctggcaaccagaagcgtgccatcagaatagcgtcccagttacacttgaaacacaggatcgaagcatggcgatgatgatagcagctataatctttttgcaattttcctccatctttgccattcggtggtgttaaagacagcggattcgggagatttgctggcgtagaaggcttgcgagcttgctgccttgtgaagtctgttgtagaagatagattgtggccatatattagaacagtgatcccgaagcctatccagtatcccgtctcagagcatggatttgagttccagcagttgcttgtggagactctgtatggctatagcgtgtgggacaggttgcggtcccttgtgaatcttataaagatggttaccgagcagaattttgccccgacttcaaatgcgaccacgaagaaaaggcgatgagacgaatgcccggggggttcattgaatctgtttatggtaagtctgatctctggacgctgtaaacctccccaagctgctgtgatcggccttgtttgctctctgaaacaatctcgagcctgggagcttgtgtattcaagcgctttagctttcatttcagaaccttcttttctctctctctcccttgcttattaacacccaaatgcgtgggcaatggaaatgaaattccactgtggatgtgctaggaactgtcaatgtgctgccgctgctgtgatttgtgaacatcatcggtattgagggtgaaggtgtggtgtaccatgcatgtgctgggattaaatgccctcgcgcatgtagcaaacagtacgctttcgcgcaattaattggcctgcagcctcctctttcgcgcatcccttgcttgagacaagaccgcc

SEQ ID NO: 31006 - DNA, 2452 bp, Zea Mays
cacggactgcagccagtccggcatcgccttcttcgtctccggatgtggcaaccgcctgctgctgctggctgctgccgtctccagatctcccaccgcctcgtcgtccttaccctgtccgttcccgcacgccactagcaaaagccacacccaacaaaaggtaaaccaccgcgtctccgcccgccgccgcccgcagatccatcccctcccggcctccctagcctttcccctcgagcacgtcagcgccctcgccctgctctgtcggccggccaagctcctcaccggcgccatgaacccgtatgatctccgcttcgctgacccctcatcctaccacgacaggcgcagcgacttgaccgtggctcctacgttcgctccgccggctcccgtggctgcggcgaacctgaacccttacgccgccgcctacccgctgcctgtgcccgttcccgtgcccgcggcccccgcgggcggcgactaccagcgctacgggcagggaggcagaggccgtggtggcggtggcagaggcggtggaggagggtacggaggtggcggcagaggaggaggtcgcgggagggacgggcttgactcgctcgccctccctaagccggactttcggagcctgataccgttcgagaaaaacttctacgtggagtgtccctccgtccaggcaatgtcggaggcggatgtggcgcagtaccgccgcctccgggatatcaccatcgagggccgggatgtgcccaagccggttagatacttccaggaagccaacttcccagattactgcatgcaagctattgccaaatctggatttgtggagccaacacctattcaatctcaaggttggcctatggctttgaagggtagggacctgattggtatcgctcaaacaggctcagggaaaacattatcttatctgttacctgggttggttcatgttggtgcccagcctcggctagaacaaggcgatggcccaattgtattaattctcgctcccacgagagaactggctgttcaaatacaggaagaatctacaaaatttggatcatattcaagaactagaagcacatgtgtctatggtggtgcacctaagggtccacaaatacgggaccttagaagaggagttgaaattgtcattgcaactcctggccggttgattgatatgctggaagctggtcacacaaacctacgtagagtgacataccttgtgttggatgaggcggaccggatgctagatatggggtttgagccccaaattcggaaaatagtagcacagacaggcaaaccttgtactggagtgccacatggcctagagaagttgaagccttagcaagacagtttctacaaaatccttacaaggtaatcataggctcacctgaacttaaagctaatcattccatacaacaaattgttgaagttatttcagatcatgagaagtatccaagactcagtaagctcttgtctgatctaatggatgggagccgtatcttgatattcttccaaacaaaaaaggattgcgataagatcacccggcagcttagaatggatgggtggccagcattatctatacatggtgataaagctcaagctgaacgggactatgttcttgcagagtttaagagcggcaagagccccataatggctgccacagatgtggcagcacgtggtcttgatgtgaaggacataaagtgtgtgataaattatgattttccaacaactcttgaagattatattcacaggataggtcgaactggccgtgctggtgctagcggaactgcatttacttttttcacacacgcaaatgcaaagttctcaaggaatctagtgaagattctgcgagaagctggccaagttgtgaatcctgccttagaatccatgtccaggtcttcgaactcaacgggaggaggcaattttcggtcgagaggcagaggtgggtttggtaaccggggccatatgtctggatcaaatacctttcctttaggaggaagaaggccatattgatgtgtgcaaaagaactgtgggagtatgggactatttgtatactactcggcattaagtgcattctttgggaaatttctgagaaatttcccctactaccaggattgataacaccatcgattttcgctacagtacctggagcttcttatatgaaagaacaacacatcaactatctagcaacagcatatgcattccattcagatatttcttttggaaggaccctgtcttgttttagtggagtccctgtgatcgtttaaagtcgtctgtatacttgtactgaacttcttgtggtgttactgttaggatttatggttgctctctattggtgtgcggtgttactgaacaaatttagttaagaagttaggcatttccatatttaatctgattctgaaataaactagcaaatttatgatgtacactttataatagtagctaatatatatatgcaaactctatatgcaaa

SEQ ID NO: 31007 - DNA, 1382 bp, Zea Mays
caacacgttctgtcgttctcgcttgaggcggcccgcggccttctcgaagccctccgctcgctccgtgctcgtggctcccgcacgatccccacattccttggccggctccgcgctcgtgctctcgttgggatcgttgtcagttcaggtacggtggcgatgaggtcgtccgtggcccgcctgattcgctcctcctctgcctcgccctcccgtctcaggtgagagctcccgcccctcgtatgatgcgcgtctgcagttgtctcggcggacatgttcctggaaggaaagggttaagtttccagcaagatttggcatcgcgatggccgatgggtggcttatagtgacaattaggcattaagggaatttattctacttagtgcaaatcgattggagaggaaactgccatttgataacagttccagccagggcgggtcctgatattttggaaatgcattcttcggcaatgccacacccagtgatcagaggcacattgagaagccttttaaagtgaaggaggcagaacctgtgaatgtgacaaaaccttcaccacacaagctgctggttctaggaggaagtggtttcgttggatcacacgtttgcaaagaggctttggacaaaggtttagttgtctctagtcttaatagatcgggaaagccatccttaaatgaaccttgggctgacaaagttatatggaaccaaggcaacctccttgaaccagcttcattgaaggatgctatggataatgtttctgcagtggtatcttgtgtcggaggttttggatcaaattcattcatgtataagattaatgggactgcaaacatcaatgccatcagggctgcagctgagaaaggtgtaaagagatttgtatatgtgtcagctgcagactttggattagtgaattatttattgcaaggctattacgagggcaagagggcttctgaagctgaattgttgtcaaagtttacatatggaggagtgatactgaggcctggttttattcatggaactcgtcgagtgggcagtgtaaagatacctcttggtcttgtcggttctcctatgcagatggtgctccaaaatataaaacctttgactaggttaccacttatcgggccgctattgactcctcccgtcagtgctgcctccgtggggaaggtcgctgtgagagcagcgacggatccggtgtttcctcctggcatcgttgatgtctacgggatcatgcgttacagcgagcaaaactaagctgcctcattcaccgggcagtatatacatgccgctgtacttttgttacagctgtttctttgtttgttttacatgtactggtatccttctttaactcacttgtttacgagacgataaacattcaataaatatgtattttagcgaca

SEQ ID NO: 31008 - DNA, 1247 bp, Zea Mays
aacaaatgaagtaaagatatattaagaccagatgatccgtaataaaccatagatataatattataatgtttcagtgatgattatgatagtacagagataataaaataaggacaggtttgtgattgaaatagtgatgatgtgttctcagaagttatagcagaaaatagaagtatatagtgttcagaccaaatcaagcaatcattgagaaaacacttaccgagagaatgactctggttttaaatgatcccaatgacagcatctcaatcccctgagaaagtgaagtgttaaggttctagtatttcaacgaggtcctaccttgaaaggaagaaggacagatcgatctctaacagtctgacgccacgtcaaccagcagagagaattcctcaaagatcgttaacaagtcaatccatcattggatcatgcagggctgcacccatcatttgctgcaagcaaccgagctggtttggtgtgctaaaaagcccctcccagatcgattgagcagcacgcccgaccgagggggatgcaacccgattatttggtgatataatttggtttgatattgacatcctagatgtagctccaaattgttaaaatcatgattttggctcagaacatcgttctcatgaacaggagactgattatgttttgctactcggctctcacgtgccgctcagccgtcaataccattaaatatgattgtgccgttgcaacgcacgggtattgaacataaggttcaattgcatagtgatctaccatccttatggcactacctcttatgcactaatcatcctcagaaacaaacattccagtgataaacccaatacaacactacacaagagaaagttgtacaaaggccttagagcacaaaaatatggaaatttactccattccaaactatgtcattttggattttctagataatgtttttttactatgtatctaggcatgacatatatctaagtgcatggctgcatctagaaaagctaaatgacttagagagggagtaacaggaatagaaaaacagtagcatgattatacttaactacattttcatctctatttaaacattacagtcagctgtaatagaaccctgaaatcaaatatattccatttaaaggggcttaggccataaaaccaaacccaaactaatagaaagtcccctgaggaatcaaatacaatggttcggtgtcgtttcaacgatcatatagccctaggaaattaccatatcaatgttttcatgtccactg

SEQ ID NO: 31009 - DNA, 2105 bp, Zea Mays
ctaactttgaatcttcaaaccaaacacatatcaaattaaaatgattctatctcatccctcttcatccatcctcgtccctgcatccaaacaccctataagcttacagccccacaccgccggccaccgccaccgcctcgctgccgatggcggccgccgccgccgcccggatcctccgcctggccccgcgccggattcaggttcccaagacctccccgctcgccgcactctcgttcccactccctcgaacggcgccgatcgccgctgcctcgggaaggcggcagcgcttctgcgccgtggcgcaggcccccgcccccgcagccgcggcgacaggggcggcgggagaggccgtgggggagttcaggaagcggctgcgggtggcggacgtgaagggcggggaggacgagggcgccgcgtgggtgggcaaggagctcgccgtgcgcgggtgggtgcgcacctgccgcgcccagaggaccataaccttcgtcgaggtcaatgatggctcttgcttatccaatatgcaatgtgtattgactcctgaaacagaaggctatgaccagattggtaagagtgaccccacatcttttcctatacagaagaaacgggcatcaagagaattccttaggaccgtagcccatctccgtcctcggacaaacacttttggtgcagttgcaagagtgagaaatactctggcatacgcaactcataaattctttcaagacaatggatttgtttgggtttcgagcccaattattacggcctcagattgtgaaggagctggggagcagttttacgtgactactttgctttcaaacagcgctgatggtggttctctactcaaagatattcctgctaccaaggatggaagggttgattggtcacaggatttcttctgcaaaccagcatttctgacagtgtctggacagcttaatggtgaaacatatgcttcagctctatctgatatttacacatttggtccaacgtttagggctgaaaattcaaacacttcaagacatctggctgaattttggatgattgaacctgagcttgcctttgcggatctgaacgatgacatggcttgtgcaactgcatatctccagtatgtagtaaagtatattctggagaactgcaaagaggatatggatttcttcaatacttggattgaaaaaggcatcatagatcggttaaatgatgtagtagagaagaacttcgttcacctgtcttacactgatgctgttgagctacttcttgggtccaagaaggaattcgagttcccggtaaagtggggtttggatcttcaaagcgagcatgagcgatatatcacagaagttgcctttggtgggcgccctgtaataattagagattacccaaaggagatcaaagctttctatatgagagaaaatgatgatgggaagacagttgctgcaatggatctgttggttcctcgggttggtgaacttattggaggaagccagagggaagagcgtcttgattaccttgaagcccggttggacgagcaaaatctgaataaggagagctactggtggtatttggacctacgacgatatggatcagttccacacgctggtttcggtctcggatttgagcggcttgtacagtttgctactggaatggacaacatcagagacaccatcccatttcctcgagttcctggctctgccgagttttagcgccctgaaagtgttgtcgtatacgtatactttagaaacattctttcctaggatgtaatgtgagaaaggcatacgttgtactgtactactgtttcatcattgtacagagttaagctgagacttgtgattaatcggaggcaagcagtgctgtggcaagctttgtcgtttgttgtaattgtcgtcaaagaatgtcactggtggatgatgcaattttttcacgggtaagactgagaccaacacgaagacttgcatcagacaacgcaaacgcaaaatgagttgcgcagagtactgtgcgtggtgggagcatgcaaagggcgcaggacgatctaaaaatagaatcctctcttctctacgcataactatatagtcattttattggctataagaacgttcaacgattattaagatccacctttg

SEQ ID NO: 31010 - DNA, 1588 bp, Zea Mays
ggaaaactcctcacttggggttctgctgatgacatgggccaaagttatgtgactgctgggaagcacgaggagactccagaggcttttccacttcctagaggcgtcgcaatagtgcgggcagatgctggatgggctcactgtgttgcaataacagatgaaggtgatgtttatacatggggttggaaagagtgtgttccaactggaagggttattggagaccaatcttcagttggaaccaaggagaaggatgaaagacaaatggcaatggccactgaccaaggtgtgagccccaggtcgcaggtgtctaggacaagcagcggggcagcatctggtccttctgaaagcagaggcactgatgatagcacaaagcgacgaaggttgtcttcagcaaaacatggccctgagagctcgacatccagtgacgaaagtctttccgcacccccttgtgttgtgacatttaatacaggagtgaaaatagtgtctgtagctgctggtggtcgtcatacattagcactgtcagatttaggtcaggtatggggttggggatatggaggagaagggcaactaggtctgggctctagaatccgaactgtttcttctccccatcctgtaccgtgcattgaatcagcactatacagcaaggatcgcccatcagctatgaaaggtaacaaggctgctgaaggacatgtcagtaaagtcttgggaaattgtgtgagggccattgcttgtggaggtcgtcacagtgctgcagtaacagattcaggagctcttcttacatttgggtgggggctgtatggacagtgtggacaagggaatacagatgatgttttaagtccaacgtgtgtatcgtctatcctgggatccaagatgcaagacgttgctgcgggtctgtggcacactgtatgtacatccgtagatggtgatgtttattcctttggaggaaaccagtttgggcagcttggcactggttctgatcaggctgagactgttccaaaattggtagatgctaccagcctagagaataagaatgccagatctgtttcttgtggagctcgccatagtgctattataacagatgaaggcgaggtattctgctggggatggaacaagtacggccagcttggccttggcgactcaatggacaggaacgtgccttgcagtgttcctgtggacgcttaccaccccctaaacgtgtcctgtggctggtggcacaccttggtgctcgcggactcgcctacttgaaacctgacaaagaaattaccttagattgacaattttgttaggaactcgtaggctcgtgcagatgcggtgatgctgcatttcatcgtgtacatacatggcagtgcatgcagatatgtgtattcattctttggcggtgcactcttcaacctgtgcaacgtagacaaagcttgtatcgcaccgcgtatacagttgagtaggattgcctcgacaaattgtgcatttcctccgttgctgctaatgtacaaaattccacaagctagacagggcaaccgatgcgttcctcgttgcagaagacagatctccaaaataattaatgtttgtgtatcgtgatggttgcgattccgat

SEQ ID NO: 31011 - DNA, 685 bp, Zea Mays
gccagcccccaggcgtccagcctacgcaagccacctccacgctccgaccttcgaccctgcgcctgtgtgagacctgcgtggcccacagcctcggccactgtcgcgcggagcccgcccccctatggtcaccggccgactcgtccaccatggtccgagtcagagcagtggcacggtggccgtctccacctgcctagcgccgcccaagtcgccgccccgcccccgccactccgccaggccacccatggcagcgcggctagtccctcgtcggctcgctcgcccctgcttgctcgtcccacggtcccagcttccctcccaggtagcagcagcgtgcggtgctctagcgtcgggtgcacaattgaggacttaggtgaagcttgtttcattgtctgcttgtgtaaggattcaactggatctggcatctagggattctggactggttgcgacaaagatatttaatccgatttatttgtcaatgtgtagatctattttggttcctattccaaacatcagtatacatagatggaaataaaaacaagtgaaagaagactgcccaaaaaagtatctctctttattatgcgcaactaggggtatgttcttatttcacacgtttaacagtttttacttcaatttaccactattaatttatttttttattttttagattttatttgctatatgacatttg

SEQ ID NO: 31012 - DNA, 4451 bp, Zea Mays
aagcccgccaagagaaaatagccagtttatccatcggattcgatccttccgtttgcagtatggatccccaccgccgctcaccggaatacaactccctcctcctcgccggcccgcgcctgggtcctctgaagcaagcccacgcgcgcctcgtcgtctccggccacggcgattccttgccgctcatcaccaagctagccacgctcgcggttgcggccggcgccgcctcctacgcccgcctcctcgccgcctcccacccggcacccgactcctttctcttctgctccctcacgcgcgccaccgcgcgccgcgggctccccgccgccgccctcgccttctaccgctgcctactcgccgccgccctccccttctccagcttcgcattcacctccgtcgccaaggcctgcgcggacctgtccgcgatccgcgctggtatgggcatccacgcccacgccgtcctcctcgggctcggctccaaccggttcgtgcagacgtcgctcgtcgtgctgtattccaagtgcggccagctggatgttgcgcgcaagctgttcgacgcgattcgtgacaagagcgtagtcgcttggaacgcgatgatttcagggtacgagcagaacgggctcgctggaagggcgatcgaggtgtatagggagatgcaaatggccggggaagctccagattccgcgacgtttgtggccacgctctctgcctgtgcgcaggctggcgctttggacttgggacgtcaggtggacaagctcattgtttctgagaggatggagatgaatgtggttcttggtgctgcacttgtgaacatgtatgccaggatatggcatgcacggacatggcggcgaggcagtcaagctattcaatttgatgagacagcaagggccaccacccaatgatgtcacttttgttgcggtgctgtctgcgtgcgcacatgctggattggtaagcgagggccgggatgcttttgcttcaatgaagagtgtctacggattggtccctcgtgttgagcactattgctctatggttgatatgtatggaagggcaggacttcttgatgatgcgatgcgatttatacatgattcgatacccggagagcctggacctgaagtttggacagctatgcttggtgcatgcaagatgcacaaggatttcaatcttggagtggaggttgctgagcgattgatcgccctcgagcctgagagtccatctcaccgtgtgctgctttctaatctatatgctttgtctggtaaaatgaaccatgttgagaaggtgagggatacaatgattaagagaagattgaagaagccaataggatatagcttgattgagattgctggtgttgctcatttgtttcgcatgggtgagaagtctcaccccaaaacttcagagatttaccaatatttggagaaactgatcgaaaagattactgatgttggttatgtgcctaaaactgactcagtgttgcatgagttggaagaagaggaaagggagtttgcattaagataccatggtgaaaaactggctgtagcctttggactcatgatgacttctgggtgcaccactccaatcaggataattaaaaacctgcggatatgtgaggattgtcatctagctatcaaatatatgtcagccgtggagaatcgagagataattgtcagagatatgcaccggtttcaccatttcaaagctggaaagtgttcctgtcaggaatattggtgacgaggcctctctcgcaagctaaaaatctgaggaacaagagctgcaactcagcaacattgggagtgggacaccagcaacaacacctttactacccatcaaaattcacaagtaagcactagcaattgaccatcattttaaattgtgttctattacacaattgtccacaatataagttcctggaggtcagaacaactaaccactgattagagtcgactagtcatcctagtcgatcttatcgtccctaaggcgactaggtcgactatacgatttaaaaacattgatttcactaaggctgaactatatgctgctgtaatcattgtcggtcatttgccttttctgttagtctgtcttattggtccttactaggattccatattttttcaatcagaatttggtttaaatatttatgatatgatggggctgatagttgtgccactctttatcatcaaaataataaacatttgcaagctatccagacaacagtcccaactatgggagcaagcatatataatcttttgattcaaattgaagctaagatagtaagttttggcaactagaaaatgatgggagaatacacgatctctagcagggcctacctggacaactggtcaactggataaagcaaattgatctctaactgcataatagcacgagatgaaaaatattttgttggccatctgttgattatcattatcaattttaactacttaaaagcacaatgtgagaaatgttttaacttagcttcgtaatggaaatggtttgtgggaatgcattgtacttctacattctgttaattaccggtgttcatagatgccatgaatgcactttagatgcagtatcacaatgattgactgcatgccctttcccggtagtgggaacttcagcggtattgcatttctcactgttaaggtcagtttataagccagtttttctttcttttttttaaaaaaaaataagattctttttcatttggggacaccaacttattacatgttcaacattcctattccataaccagacatcgatctgacttgttaacagacctgggttaggaacgtagtatggtcttctatatgatgttagatgcttcagcggttcagccttgaatctgtatggtcctaacttcaattttaattgcacataaatacataatcatagaaatgaattgaaatatctgcaatgactgctgcctcgtaatttttatcatagagctttaccaaactattcatttcactatcgctatgtttcaaaggtatctgtgttgtctgacagactattcttgttcagactgatgctgccaaatagagagcattaaccatggatgtgtaagcatatacgtccttctgtgctacccctctcattcttttaatcatgggcagtgacattcttgatatccatttcagaggaggatcttatcctaaaacccagccttacaaacggaaccataaaaaagaagattttgcatcaaagttgataatagggattaataggacatgttggaaatataccatgggacgtaacaagtacgtatgttggaaatctactatggggtataatagctgacgatatgaaaaagctcttctctgattgcaaaatgtttgttcatccgatctggaactgacaagaagatagacgaaccaaacggttgtgtggatgttgatttttttcctgatggcacatctcttgatgttcatcttatatggatatttggcaccttggccgttgttgttggagttagaacatttgtaaagggtcctttgtgcatatagcatatatggaagaggtacacatgaaaattgaccccccaaatcacaatatggtatcgcgtgctagggtttggcctcacaaccgctgcccgtaggcactgcagccagccatgcactgtcgatccatcaacgccgggtctgtgcgtctggccgccgcctgcgtggggctgctctcacgccgcatccgcgttgttgggggactggtcatggtgccgcctccacgtcgtcgaggagcgcggtcgtcgccctccgcctgcgtggggctggcgggcctcagatctgaaggcggtccaggtccggccgtggcgtgtggcctgcgggcgcaccaccgccgccgctgggaggctgctgccgacgccgtattaggacgcgaagccgaggcggaggagggaggccggcatgctgaagtgcgttgggtggacgatgtcatgcgcgtcctccgcaccatgtgagaaaagctgctcaaagcaagcctagtgcatcttcatccttgaccacagatagatcatgcagtttgccttcagcttcatgtgagtttcagtcatacttatcatctactgaagcgaacccatcaaagagtgagttgctcatctatttggatgaaacaaatgtgagtttagttgacaaggagtttggtttgcttaactggtggaagattaactcacatagatttccagtggtgtcgaggatggcaaagaagttcttaactgttccagctacctctgtgtcttctgagtctacttttagcgctagtggtcgaactctagatgactatcgtagctctctaagcccttctacggtggaggcattggtatgctcctctagttggattcgaggtgcacatgatgggagttttacatatgtggagcaagaggacgatgtcgaaaacatttcatttccaaaaagtttggtggagagcaactagattatccttttgtaagtttgtattatgcttagctagttgag

SEQ ID NO: 31013 - DNA, 2684 bp, Zea Mays
cgcgttagtgcgagcttgatgaatcgaatcgctgatctctgttagcgctccgctcccacagacggacagcttgggctcgacggatgaacatgtgtgagaaagatcagaatttgccatggggatacgacctgttccgcgacccttttgctcctcccaacgggtactacgggcctcctcccggttactgtgatggccactgttgtgacctccatcattacggtagagcatcacatccagatgagactcagttgcattcttctcaactcgcatatgatatgtacaacccatcagtaggcatctaccatcctggaagcacccatgagcacgagcacgagcacgagacagtatatgtagaaccgtctagttcctctccagacacaggtggtgacggttgttttgagatggaggaggaagtagggaagaggttttaccccatggtcccagttcccctgccagaataatgaaagtttcgcttctaaggaagtctacctagatcatcagcaaaaattcctgtatatgtctgttgtatagccaaagcctcattggaagagggaaaaaacaacatggatatcactttcagttggaccactaaccttaaatgccaaatgactttaagaaatgatgttgacatcaaattcctctacaagtctttaattaactgaatggctaagtaactttgcatattcttggtcttaatgcgtgtctttgaagaattatcctatgcgaaaatcatgtctacctacttttattggtagacctctgtggacaaagctgtaggtattaacttttcttatacactgtatgatttgttgtgctactagcagtttcactgccctcagatagtattcctatttgttattgcttttaaatttagaatgatactatccaatattcttagtaacagtgtggcacccccaacaccctatcctagttgctttgaaggaaatgaacctgttgtgaatgctgtgctgtatatctgtaattttttccctgttcctctgactccatctccaactgtggtccaataatccgtgtctgccttgtccagcatgtccccaaaattaatggagaaatcccatcaattgatgaagccactatggaccatgaaaggctgacagaaaggttgaggctgtatgagctggttgaaaacaaggtgaaaggagatggcaactgtcagttccgagcactatcagatcagctttaccaaagtccggatcaccatgaatttgtgaggtcgcagataattaaccagcttaaaactaaccgtgacgcctatgatggatacgttcccatggcatatgatgattacttggagaaagttgcacggaacggtgaatggggtgaccatgtgacgctgcaggctgctgctgacaaggttagtctttataatctatgtttccagctgtcattcctggcatatcctgtgtggtggagctgacaagactgccattgttttactcacatcctaatgtaatgtaagacaacgatctggtgcagtatggagtaaaaatcttcgtgatgacatcgttcaaggatacttgctacatcgagatcctgcctaaggttcagaagtccaacaaaggtaaacatttggtcctcaagggccacctaccgggtatttcgattcttgactggttactggcttctggcatctaaatctggcttcctgcctgtgtggttgcagtgatactgttgagcttctgggcggaggtgcactacaactccatacatccgcagaacggtgagtaggcgtgccgttggcatgccgggccttcaccgccaacgtatgcaaccaacatgctgctatatactgtcaatagtctttcttttgttctgagtagtggtaggaatcatgtgcaagcacaaccaaacaagctctgtctattgtgttggtgaagacgattctgtggtttgtgaatgctgcagatgctccgaggtcgcagacgaccaagaggagaagatggtggccgttctcgcagcaccaccaccattgatggcgggttcagctctcttggggctggatggatgttcaggatcaggtggtggtcccggtcccggccatcgtccagatgatactacaagggacgtacgacattatgattaatatatatatacccagagcggagcagaaagacctgataagggaattagttgggatgaatgaaatggaataaacatgggatgggatgggaatcgtcgtcccgtatatagtttagagtggaggccggtgagcgccaactcaaactctttgtattgttgtttatatctacaaattttgccggaacgaggctagaattattggggaacaattatggtaataataaatcggttaagaattgagatgacccagctgttggcagagctcggatcatcatatgaccagaatcagaatggattccccagtgcatctagttttcctctggaagaacagaacaacataaaagaaaaacgttgaacactgaagtgggaagctgtaaccagaaatcttagatttgagcccaactgctctttttggaaggcaatatctagtttttggcccatgagtccaggacattttcagagggcccatgagtcatttcacaggtgaacaaccattgtagccattatacatacagagtaggctggtgtcttattttcgggttcaattgtaaatgattagtcaatgccatacagtcatttttggc

SEQ ID NO: 31014 - DNA, 2947 bp, Zea Mays
ccgcgtcctcctctccatttcgctctgtcgtccagggacagggaggcagggaagggatgctgctctccgtccctccctcccccgccacctgagcccgcccccccaaaaaaaagttttaaccaaccaaacccaccaccacctgcctgcgcgattcccatcccaccccaattaacccggaagaagagctcgcaacgcccccggtgggatcgccggacacctacgcgggcctcgccttgaaatccctgttggaaaccgaggaggatcatgtcgcgggtggcgtcgttgtcgccgtccttatcgggcgacgaggtggaggtggaggaggaagacgacgagggcgtcgacgggtaccgcaagggcggctaccacgccgtacgccccggggaccagttcgccgccggccgctacgtcgctcagcggaagctcggatggggcaacttctccaccgtctggctcgccttcgacgtccaatcacagagatacgtggccctgaagatccaaaagagtgcgcctgagtttgcgcaagctgctcttcatgaaatcgagttcctatcagagatcaccaagagggacccgttgaactgcaaatgcaccattcagctgatagatcacttcaagcacacggggccgaacgggcagcatatctgcctcgtctttgagttactgggagatagcttgcttaagctggtacagtacaaccggtacaaaggcatcgggttcgatagggtgaggcaaatatgcaagtcgattttggtaggtcttgattacttgcacaatgagcttggcatcatccattcagatttgaagcttgagaacattctccttgtctccacaattgatccctccaaggaccccattcgctctgggcttaaacctaaccttgagaggcctgaggggtaccctaacggtgaggctggtcttaacgcgattgagaataagctaaagatgagagcaaggagggtgcttgcaaagcttgctgagaaaagaaaatcagctgtggaatcttcacgctcagaaaggagcttggatggaattgatctgacatgcaagattgtggactttgggaatgcttgctgggctgacaagcaatttacagattttattcagacaaggcagtatcgggcgccagagatcattctaggtgcaggatactcgttttctgttgacatgtggtccttcgcatgtattgcttttgagctcgcaacaggagaaatactatttacacccaaggaaggccatggatacagtgaagatgaggatcacttggctttaatgatggaactacttggcaagatgccgaagaagattgcaaccatgggaacacgatcaaaggaatattttgaccgccatggagatctgaagcggatacgaaggctgaaattgtcatccattgaacgtgttctcgttgacaaatacaaaatttctgaatctgatgcccgggaattcgccaattttctttgccctttactcgactttgcaccagagaagaggccaacagctttagattgcctaaagcatccatggcttaaacatgacgaggataaaacatgtgggtctcttaacaataatgatgccaagagcattgatctggtccaaagcacagggagtatcaccaccgttgactgtacaaatattgatttgacgagcaaaaaaggcagctccactggaacttgtgataagactgttgatgcaaaatacaacacaagaagcattaccagcaatgctaccatgaacacttatgtacaacccacttctggaagttttgccaacagacttgcgaaaaatgttgatgtaaatccgaacattggatccatcagtaatagagatgccaagagttctgatatgaaggcccacatgggaagcaacaccatcagtgacgccaaaagctctattgtaaagctagatacaggtaacatcactgatagaaatgccaaacctgtcgatataaaacccaactctgacaacatctccagcagagatgacaagagcagtaatgtggatactaccacttcctgtgttgtaaagaaagacgtgaagcacagcattagaagtgttgttaattcttatatcaagaactttgatgcaaaatgcaacactgcaagcactgctaacagtgatgctagtaactcatcagaaataaaacccagcactagaatttttaccagtactgataatgccaagtgtatggacataaaaccgatcagcgaaagtgctaagagcaatgacaccagtgctaagagcaatgacaccatcaatgctaatgtgaaatccaacactggaattgttgcaaacactgatgccaagagcactgatgaacagactaacactggaagtgttgacagcagcggtgattacagcgctgactcaaaacaaaacattggccgggttgctgcaagcatacagaggttggagagcagcatgagtaaagtgcaaatcgggaaatacagggacaaccttcctcaagattgaggatctggcaggtaccagctggcgttattgtatatctctctattcccgctaactgtacaaaactttgtatttgcacacagaatgtacacggagtggtagagaatatcgctgttccttttatggtggatgcactggaaagggaagaattgtactctgaccagccacagcatctcttttgatcatgtccatattctgctgtcagtgaaaaaagagatttcattatgtcatttaacacggatcaccaattatgtgagcaggggtgtctgacattttttgtttggtttatggtttgagatttgcatgtaaaaagtgggacatgtgttgtataaaactattctttgatgttcatttcatggtgaacgatcatatagatggaaacttttcactttagccttgttcggttacaagggatgaaatcccaccatggatttaatctaggtctagatggagtaaatccatacctcacactcaatccaat

SEQ ID NO: 31015 - DNA, 523 bp, Zea Mays
tcatatgtgagaaggttcatgagttgatcacggtcctgaattttgccaattgggctattatggctggcgtgtaagcttcaggggactcttgaaacttggcctctgccacaaacttcccatagtggatccttctggagagtgcctgcaagcaggttgtgtcacaaagagcactggatccagcattaccatcacttccttctttcaccaatcttggaagaagttcatcaaaatacattttccaaatctctttgttgatattgatagaatcagcaatgggatgcaaaacccttgggtattgcataggtggcaaccggggctcaggcagatccttggaaaagaaagggtgctcatctgggctcttgtatctcccaacctgtgcatggagcttttcagtttctctaactatatattcaaccaaagatcctccaaaaccatccatgtggaaagcattgctatcatatgtatcagcattgtaacaaaactgtgctctctccaaaaggccaaatatgatgctgtcttctag

SEQ ID NO: 31016 - DNA, 3979 bp, Zea Mays
cccctcccctccgccctccgcacgccgcctccgaaccccatcgcccatcctcactacggcgacggctattgccacagccgccgccatcttgacgcgtacgagattctgaggccttgatctgaaacccgcctcgatcccacagccattcacccaccgttccaccggtcacggtagcggcgatccctactctcaggccgtagctacgacctagccggcgccatgcgacacggaggcggaggcaggggaggtggaggtaaaagaggtcgaggaagaggagcgggctccggacgcagagacgcgcgccccggcaacgattcgtaccgcggcgaccgtggtaggcgccacgactaccgctcccgccgcaccgcttccccggaccaccgcccacgccgcccgaggggcgaggacaacgaccgcgatccgccccgcggcggtcgcatcggctacggcgaccgtagccctccccgcggcggccgcaccggctacggcgaccgtagccctcccggcggcggccgcaccggctacggcgaccgtagccctcccggcggcggccgcaccggcccgccccggcgcgagcgcgctggctacggccaccttgacgcgtcgccccgccgcgggcatgcgccgtacaaggacgccttcggctcgccgggcggcgaccgccacgcttctccccgcgggcgcagggaatacggagatagccgcgtctcgccccccgggggtagggactacgaaagggcgccctgccgcgaggagcgcgaccggtacggccgccctggccgcggtgccgatctcgggcacaactccccgccagcccacatgctcccagaccacccgtccgacctgggacgttcagcatccctacgcgctgacgaccatagccttctcaaggacgactaccctaggggaggccctcatcggagcatcagaaaggagaacgagttgtttgcgaacggtgacctgactctcagaataagtgcaactgaaatgggaaggactagcgccatgtactcccaagaccgcaggctctcacctccaccacctatttatccctatgtgccacgtgagacgggattcttgacaggcggatctgccatgaaggccagtgatggttatggtgctggaactggaagcgcccagcggctgcatgatgatgacgattttaagtaccacaaggatgccccacacattgagaggagtagagatattgataggcattattctggcagtagggacttagttgttgagaaaggtggagttgctgaaaggtatgcttctgctgatgatctgccttctgggaggattcgagaaacagagagtctttactctagtagaggtatgctggagtctgacctggtgccgtgtaggcagttgaaggttcttggtgatccttcctcagctttgcctgccaaggaccaccatccatacaggatgtacactgaacctggctacgagacaagcaacagatacatcatggagggccttggcaggtcatctcatgactcactggggcatgggagtgaccatcctcataggttttcaggaggttcattagagcatgtaagcggtcatggtgatgaaacattattggatattgcaaggcaggcacactctaagcatacaccaagagctgcatcattggagtacgatgtacatgatacgcatagtgaaccagagaacttacgtgggaatgtctcaatgacttcaaggcacacatctgtctcaacatctttgagaggtcttagggatgaaaggattaacgacaatctgaggttatcccgtaggattgaagaagatgagggtagcattgaatccatgcatcaggacacagagcacttaattcgtcattgttacaacggtgacgcttctgtacagtaccaaacagcaaggggtggtgatgatcactattcccactcccctggaactgaacctattggaattgcaaggcggctagctcatcaacatgagtttgattcctttggttactcaagtgatcaagaagcttcccttatggtttctaggaaaagatgcaggagtcctgaatatcatgatcatgagattgatatgtatcaagctgatcatgggtttgcaggacatgagcactatgatgatgatgttgttgatgaatatgatatacccccaccaagaatgtcacggtttgatgatgaatatgatgaaatacatgatgtgctagctaatcgtgatgttttctcaaggatttctttgccacatgaaaccaatcaggaatggactgatatggatcaggggaaccatcctcattctaacatcttgggttacgggtgttcaaaacacgtacctatgcatcagaggttgtctaaacccaattaccactcacaatttggggaaactcccatgcatggaagaggaagaggaagaggaggattgactaaaagtgccaaaaagggactgagaactgctcctcatcagttgcatgatgggtacccatcaggtagaaatgaatttgttagaccaaataaattttcaaagtcgtcaaaagatgaacttaatggttctgaagtgaagcatgaagatgctccagagtatgaggatgttcctctgcagaaagatccaccagaaggttcagaggagttcagtaaacaggttgatgaagcctttcttaagtacacaaagatattaaatgagagtccagctatgcagaagaaataccgggaggcgccaaaaggatctttgccatgctgtgtctgtggcagtgtagcgaggaaatttctggaccttgatgcattgctatcacatgcttatgatacatgcaaggccggtttgaagacaaaacacttggggtttcacaaagcactgtgtgttctgatggggtggaattggcatgttgctccagacacatctaaatcacatcactccattccatctgaggaagtaaatgccatgaggggagacctcatgctgtggcctccagttgttgtgatacataacagctcgactggtcatgaggcaaaggatactgatgcaaagattgtgtccatagaagaaatcgaaggtgtattggcagatattggggtagcgcatgagaaggctagggttagccatggaagatcagccaatcagagcgtgttcctggtgaagttccagccaacaatatctgggttccaagaagccatgagagtgcatacccatttctccaccagaaaccatggcaaggaagagttccagctgatgaaaggcagcaaaggtaagaaggctgcctccactgatagcctggaagagctgctgtatgcgcatattggggtcgtggaagacctggggctgctggatgagggaacaaagaagagatgcaaggtcatgaggaagaaggaaattgaggcaaatgcagaggcaacactgaatttagaagtttattaggtctagtactaggatccgaaccatttgaagtggtcctcttttgcttcatcttgcagctgcttgcttgtccttgcggctgtaacgtcaaaagaagaaaagaagtgtaaattctgcttttgccattaaagagtgacgaaactcagttggcttctgtctgctggggaaggcctgcctcggtttgcatggcatggcaaggacataattttgtggctagatggggacaccttaacggcaaaagcagaattacctggtcgaagaaccgagtttaatctttatattatggaatcccttctttttttaagtcttttgctgcgtgaagttatgcataattcgttgaagtgtctataggtttgatggtggactagcatgtatgtatagtagcagctgcagtgagtgacttttctcaggtgttgcatgcatgagaaacgcaaactctattcggcgatggtttgcgctccagcttctcagttgctttgctctccatctccgacaggctgagtctgctcatcagcttgagtctgcttcaaatgaggacttaatataagcgagcaaacatcgctagactagtaaataattctggacaatt

SEQ ID NO: 31017 - DNA, 273 bp, Zea Mays
tgcaggtgtgcactgtagcgacggtggtcgatggcgaaggtaaagatcatgcgggttcgtgtcgatgggccgggagcggtaagaacgagcgatgggtcttgatcgagtgactagagaagtcgggtgactagccgtcagtgacaggcccaggttttgaaggaggggtattcaaaattattaagagataatttcttttggtatgtatattaccgtatagagtctagttatttggtgtatacaataacacaatatattatatatttacgtagcaac

SEQ ID NO: 31018 - DNA, 1270 bp, Zea Mays
agcattacttcccattgcattgctttcagttatctgtaataaagcttttcgtttgtgtagttttatgtatacctttttatgcgaagcctgcagcaatcttttcccagtgttgttgtgttgttattcactcttcattgtagcagggtaatccaatcaaccttgttcagttgttcttcacgcctttgtatcttagtatgagatccatgcagacataccaaagataaaaaggcatccctgttataaatgacagagaggcatcgtgcatctcggcaatatcatgacgaccctcgggggtatcgtgaagctccacctcctccacttgcacgaacaaggcttctctctccgcgacgcttggaagctccacctcctccacttgcacgaacgaggcttctctctccgcgacacttggacgaggaattgtctagtcgccgtgccgagatgcgcagaatccgtggagacaatcagcgtctggcagatgaaattgtcagtctcaggcaaaccatgcctcgtttgaaagaagacctccaagtctcaagtcaagctgtaccaaagctccgggcagagaaagagcttgaatcgagggagctgactcagaggaatctgaagctggaagctgagctacgtgccttagaaccccttaggcaagatgctttgcatctgcgatctgaagcaagtaaactacaatctttgaagcaagagttggctgcaaaggttcaaggtctatcaaaagagcttgaacatcagaaatctgaaagccagaaaatgactgctatggtagctgaacgtgatgctctgtgtcaagaattgttgcaggccagggctaatcttgagtttgagaagaaggcaaaaccagagcttactgcacaggttcaggcaatggagaaggatcttgtagctatggctcaagaggctgagaagctaagggctgatatttcgaagagaaacacacctagtttcagcggccgtggagcttatggaacttctttgtcgacgcctgggatgggtttgcaaggcatgtatgatggcggctatgctacggccgggagccgctatggcagtggcgctggggcttggagctcgcatgatccccatggttacccgcatctgtaattgtgcttctgacccgtattcactcctgaacagctcctagagtactttggcaattttctgtagtagtatataacttgtgctttttggtgcaccacattgctaccctttctggtcaatgaaatgcagtgtattgtgaaagcatctaaacccttaagctttg

SEQ ID NO: 31019 - DNA, 1914 bp, Zea Mays
gccagcgccaccgacgccgacgccggcgccgggctcagatcggagttcctgcaggtcctgctcagccgccgccgcgatctcctagtgcctctcacggtggagcaagggagtccggtgaaggacccgatgtaccagaatcctccgtcgaccatggaggcaaatccgatggagtcgtgccccagtaaagaggtggagaacttgagggagaagctggttgaagaaaatttctaccttatcactgaggtaagcggcggccagatgatcaggacaagtccagcagtcctagtctatctctctgtctcttttgacgctaggtgaacaaggacgagtacctgtacttctgctgaagcttgacgaccccgtccctagaagaaaaccagctatcgtgttcctgcacagctcttacaagtgcaaagagtggctgcgcccactgcttgaggcatatgcttccaagggctacgtctgtgtggctattgactcgcgctatcacggcgaaagggccagcaatgaaaccacttacatagatgcactgaaatcggcttggcggaatggggatacaatgcctttcgtttttgacacggtgtgggacttggtaaagcttggagactacctcggcgagagggaggacgtggatccctgtagggttgggatcaccggcgaatcgctgggagggatgcacgcgtggtttgctgcttttgtggacacacggtacagtgtcgtcgttcctatcatcggtgttcagggattcaggtgggccattgacaacaacatgtggctggctagggtgaatagcataaggcctttatttgaagaagcaagaattgacttaggaaagagcgaattagatacagaagttgttgaaagggtttgggaaaagatagcaccaggcctggactcgcaatttgatgccccctattcacttcctttgcttgcaccacggccgttgctacttctaaatggcgctgaagatcctcgttgcccaataagtggtttaggagaagctatttcaaaaactgctaaagcttacgaagaatctggttgcgcggagaagttcatgttcattgcagagcctggagtcggccataaaatcacaatcgacatggtgaaggcagcaagcgaatggttcgatcgcttcctgcatgcatgaatgcaaaagttattgtcgcccatcatttgttctatatcgattgtgatttgtcaacagcatcccttagttgaagtatttatgtcctcgtctgtgtaccttggtaattgccggtcggacaaacatctctatctctatttattatattaggatacgtttggttgctggacaaatgagggcagaatagaatggctcctaagttgggaatggaatgattcctcatattatttggttggaaggatgagatgatccttgttttttgtttggttagagatataactggggatagattgttcatgtcctttgtttggttcgagaacagagcacaaaaaaatgtttgccgccattgcccccatctcatgatatgttacaactaatattaagtcgacaaaacacacatattattaatttcacacaatacataataatgtgtcctagcattacacataatatcaagtttaaggcttccacaaaatctgcatgttcaagcaaaatccgctgacgtacttagaccacatttcattgtttgatgtggttcaagcaaaagaactgtccaagcctatctactataactaccctcacactcctgggtacacataaatcacaattcattgttcgatgtggttcaagcaaaagaacccctaccacctaccctcacactcttgggaacttcactgacgaaattgcgagcccagattaacttgtggtcgaatggcaacttgttgaaggctctagcaatgtgagggtgcgccaccagataattgaaataa

SEQ ID NO: 31020 - DNA, 143 bp, Zea Mays
ccatcctttgccttggtactcgttcagttatccatcttcaggttcgtccatcagcatcacctcgcgagtggctcatgctttacaacatcttgtggtcgacttggatcgtcttccgcatcatgtgatcaatcaacgtacctaaa

SEQ ID NO: 31021 - DNA, 1890 bp, Zea Mays
gtgttgtgacctacaacaccgagcccagggtccaaaacaggaattaaaacacacaggctttatcttgatttggcatatccagagaagttgttgaattgccttgagaaagctattcaaattgattcaaggttcgcaaaagcttaccatctgcgtggaattctctaccatggaatgggtcgacataggagtgctattaaagaattatcggttgctttgacatatgaaagttcaagtatagagtgcctatacttacgtgcctcaagccatcatgcaattggagaatataaagctgcgataaaaggttatgatgatgtacttgatttggaacttgattccatggataaatttgtgttgcaatgtttgtccttctaccagaaggaaatggctctgtatattgcttcaaaggccaatttagagttctctcagttcaacattgatgatgatgttgacccactatttaaggaatactggtgcaaacgactacatcccaaaaatgtggctgaaaaggtttatcgccagccaccgttgcggatctcattgagaagtgggcgccttaacaagcaagacttcaaattcacaaagcatcaaacaactcttcttctagctgcagattcaattgggaagaagattcaatacaattgtcatggcttcttaccaaatcaacgtcagtgaagagttcaattctggatttggttctcataccccaatgcttcttggtcaagcaaaagttattcgctactatccatattaccaaagagtcttggaaactgcgaagactataatgcttgacttgaagtatgtcaataatgcagaggaccgtgcaatttttcttacagatattgacaagttgaaaaagatagaaattgcatcgtcatgctcagatttgtaccatgtagttggtgagacctactgggttgctacaagatgtgatagtatggcgtttcgggggaggcgccttgaagggacaagaattaccactcaaaacataggcaagacaggatttgactttgcaattcgaacaccttgcacgccatcgagatgggaggagtatgatgaagaaatgactgcagcctgggaggctatttgtgaggcatattgtaatgacacaaaccccacacgagaccctggtgtgcttgatgctgtgaaggacgcgatattgcggatgacatattactggtacaattttatgcctctttcgagaggctcggctgttgttggctacgtagtgttgctcggtttattcctggcagcaaacatggatattactgccagcattccacccggtgtccaagttgattgggaggcgatcctgtctccagatcccggcacatttgttgacgccgtgaagccctggttgtacccatccacaaaaataagcaggtgcctgaaagattacacggacgtcagctgcgcgttcagcacgacaggttcggttgtagcggccctaacatctgttgacccataggttatttgtccaagtgttataggttgctccagttgttagtgtatttgtttcaaaatacctcagctttgcttagcttgtcagaatttctcagtttgcaaaaagtttgtatgtttctgtgttgtatacagatatgcagtaatgttgtaacttgaaaaaaaataagatttattttcattggaacaagttttttttttttttttgtaataaacagttaaacaccaataagttttgcagttacttcttggatgtttgtatgccatggtatatggtcttgaacacttagcctagaggatttccctcttatttatagagctattactcaaggccttgtggtatttgacatttatcagagtccataagcacgaatccactactttcaccatcatcattgactgacttcgagctctacacatacgcaagtcaag

SEQ ID NO: 31022 - DNA, 1360 bp, Zea Mays
gtttctcttccaatggcccgtctcagcgccaccgccacgtattgcgcccatcccttatccgaaaaatcagcccgaaacccgtactcgctctcgccacggctccaaccgcactcggccctcgtctccgccactcggcgcggcgctatggcccctgccgcgcttctcccgctcgcccctttgccgcatcacccgaacccaccacggcgacccctatgccgctgcggggcctcacgccgcggcttcactgtccacaccgtcatcgccattgcctcggtctcggactccgcctccgaccccaccgcggccgcggaggcgacgtccccatctccgcccccctcgctgccaacgcaaacgccttcctctaaaccaggacccccggctttgggcggcatcgcgaacacgaggtcttggtcgcagtactacggcagcggcttctccatccgcgtgcctccgtccttcgacgacatcctcgagcccgatgactacaacgccgggatgacatactacggtgacaaggccaagccccgggcgtacgcggcccgctttgcatctccagatagggatgagctcatcagtgtggtgattaagccgtcaaatcagctcaaaatcacattcctagaggcaaaagatataactgatttgggaactctaaaagaggcatccaagatatttgtaccggctggtgcaaaaatattctcggctcgaacaattaaagttaaggaagaggaggatattaggacatattacttctatgaattcagtctggacaagcaacacgtagctctgatggctaccgtgaatagtgggaagacgtacattgccggcgctaccgctccagagatgaaatggggtgatgatggcgtgaagttacgttcggctgccgtatctctatcggtttcatgatttattgtgcagaagataacaactaaaaaaatgtgatacaactctcagattcagcggtacgcatagagggttctattactgttctagtcattgaaagaaggtaaatagttgggttagtcggcaaaagcaacaaaagcactggatgagactgcaaggtttcagtcaagtctgtaaacaattttggaagtggatatgtattgttatgaagactggcatcatgattgaaatttgataattgagttcttgtctgcctataactgatatgttcattctaaactgtgctgattgtataaacttggtcaaagttaaaacaatttgactttggacaaaaccaggacaagtgtattattataacatttcagctgtaccataggtcgtcccgtaccctgtcatgtagaggaatgttattgatgcaaagggaaaagagtaatgttgagagaaaaacttattgtattgc

SEQ ID NO: 31023 - DNA, 1505 bp, Zea Mays
ggcctcggcgcaacggcccttcccgcgcgactgcacttgcacacgcggcggagaaatgaaagcgccagcggctagtggataagctaagctctccctctcgctgagccggctgttgctctccccacaaccccgcgcgcgggggagcgataaaccctagtcttcgccgtcgtcgcaggaggacccgcgatgtcgcacttcgggaggtcaggcccgccggacatccgcgacaccttctcgctcctcgtcctcaacatcagcttccgcaccacggccgacgacctcttcccgctcttcgagcgctacggcaaggtcgtcgacgtcttcatcccgagggaccggaggaccggggactcgaggggtttcgcgttcgtgcggtacaagtacgccgacgaggcgcagaaggctatagatcggctcgatggccgtgatgtggatgggagaaacatcatggtgcagtttgcaaagtacggccccaatgctgagccaatccgcaaaggaagggttaaagagggggttgagaaatcacaagacagatcaagaagccgcagtccaaggccaaggcacagagatagagatcatagaagccaaagtcgcagcaggagcagagaaaggcatgtccgtgatagagacaggggctatcgtcgtcggagcagaagtagaagccgaagtcttagttcaagccctgacaacagaagtcatcatagagcaagagatgatgataagcgcaagagcatgagtaagagcaggagcaggagcaggagcacaagtagaagccgctcatactatagtgcttcacctgcccggcacagtgctagccctcgcaagagcccaccgccacagaggagccccactcctgcaaagcatgccaatggaaaagtagcacctctgtcacgctgtgtttctccattaccgaagcgtgcaacctcccgcagcccaggcagtgatggcaagaaaacagccttctcacggagtcacgggattgcagaaccttgagaaggttgattgagcacaatggaagtagcagtctgcaatcaaccgcgatccaagttatctgttcgtgagatgggttgctgtttactggtagaacggtattgcacgggaccaactatggtggatgatgtcttgctgtcattggtgttgatatggcaatggtgcagctgatgtgacgatgcagatgccgatgctgctgacagtgaccatcttgtttgcacaatgatcccttacaagttatgttggttcttatccccccttctcgcagatgcttttgcatcagtgctagttggaacatggtgttgaggggttaattatgacgggcatgggtcctgtttatcatgtggtggtgttgagtgactccttttgctatctgtggccctagctttattcattatttgaagcaaccattaataaaatccatgaactcaattattaatttgttagccgaaacgctatatacaggtgacgttgtagtcgtaagcatgtagcaatgtattgactttttggtgatt

SEQ ID NO: 31024 - DNA, 1393 bp, Zea Mays
acaaaacgtgcctttcctcatagcccaagcccaccgtcagcacgcttacactcgctcgtttcccaacgcgcacccaacatggccgctccgaccgccgccgtcgacactgccgccccgcctcctcctccctcggcagaggccgcggctgcacctgtactggatcaaaaggtctctcctgctgctgcccctcagcccgatgcgcccgcgcccgcgcccgcgccgaagaagcggaagctcgaggaagcggggttccacacctccgaatactacaagatccgtgccgtcgtcgccgatctgcgtgttcgcttcgtccaggttcacgaagctactgatttccgcaacacggatgctgcacgtgagattatgagaggtcggaggtgaagacttaaaacgcagccatcagagttgtcggaatctatttgcagggtggtcccacagggacttcataaaacttagtgcctacacatggtggtgtcatacacatgacgaggacgaaacattttgtggtgcgagtggcatagatgtcaacagaaataaatgtggtaatggatctatccaagaaaatgaggctcaagcttggtgctacttctgaacctgtgaaaccattggagaagccttcagttggacttgtgaaggatgagcttgtgaaaccatcagagaagccttcatctggacctgtgacgggggaacctgtaaagccaccggagaagccttcagctggacctgtgaaggacgagcctatgaaaccatcggagaagccttctgctgaacctgtgaagaacgaacccagtgagccagctctagctggagaaaacaatcgagctcccagggtaagccagactacaagttctccaaataatgcaggtattgatgcaccagtagtcaagcatgataactcagaggcacggaagtgaagacgatagaggaagcccaaagtaccgatccatcgagatagcatatcacgcaaatctgctggacaaaaatgcagagtgaccggttgattccataggggctcagatttttcttgcccctatcgggggtaaaattattcgctttgggctaatggacgaagagtcgtggacacatcgagatccaaactagattgtcttcagttgttcatatccattcattcagtactatgttgctaatttcccatgaacaattttatcttcaaatagctactctctaactgcatcattctatacatcacattggcctgcagcctgctgtatgaagttaattgccagtcaatttcaagtcgtgcttgagaagaggtgatggaattgcaagcgagttgtaaggctttctggctcacctcacatttcaaacttcattctatgtgcagtccatggtgtaaaacagtattttgcacaaccatataactctactggag

SEQ ID NO: 31025 - DNA, 1210 bp, Zea Mays
tcgatcaaaaagagtccccccccagagacacggaacaacccctttctttttcttaattcctcatccactcgccgcacgacgaagagagcggctcccattccccaccacctactcggaccggagcagcagattctcgaagcgaccggtgaaacattctcgcgccaattgtgggggccatgggcgccaacggacacccgccggcgagcaccgtcgcgcagaacggatcccactctggcggaggcggaggagggggagggggagtgaaccctagcaacggcggcacgggggcggctcttcggcacgaccctggtctggcgcgggagtggtcgacggaggagcagaccatcctcgacgagctgctggtcaagtatgcatccgatttacccgttgttcgttatgcaaaagttgcaatgaagttgccagagaaaacagttcgggatgtagccttgcgctgcagatggatgaataaaaaggagagcgccaaaagaaagaaagaggatcacaactcgtctaagaaaagcaaggacaaaaaggagaaggtttcagattcttcgtcgaaaccacctgtgcatatggtgggtaggcctaatgttcctccataccctcttccagttcttccaatggacgatgatgaaatctcatccaaagccattggaggtccaacgggtgaaatacttgaaactaatgcccatgttttgggtcaaatttcgtcaaaccttagcaacatgcaggacaatatctctctgctctgccaaactcgcgataatatactcagggtcttgaaagagataaacgatgctccagatatcatgaagcagatgcccccgctacctgtgaagataaacgaggagctcgtcaactcgttgctccctagaccaactgtacctatgcagtagtgatagcaaaatgagcttttaagataggcagctgaaataaaaaaaaaaaggggcagccctggtacttttttgttcgttttgtagctccatcctctcgccttctgtattgtatgtttcgtctggatgcttatgtttgttccaaccttttgcaagtcaggcggttggaacgtgtaccaagttaccaagggctgcttccacataagtatcaggtcctgactctgttttgtaatctatagctgtttggtaatgccatggaatcggagtacactttagggtctgtttggttgggcggtggctgtgaaaaaagttgctgc

SEQ ID NO: 31026 - DNA, 2499 bp, Zea Mays
atttggacattccaagcgtggcctacagttgctgttttaattctatctctaatagactttaaatctcaatccttattttaatctctttttcaaatccctctctataaagtgtaaaacagtgttatacatatgcccgtacggagctggcctctgtcctcggcaaaacgcgcctcgtccgtccgcgcattttacaacacggccacaccaacgcagcgacatggacaccgccgccgcctcactcttgccccgcgccgccgccgtgaagacccgacgcgttttctctcctctccatgtttcccggagcggtctccttccccgtcaaagctccttcctcgctgctcgctgtgcccactcccgtgcccctcctccacctccgcctctccctcgcgccgattgcgatgatgctgccgccaaggcgcacccgcgcctccgtctccgcctgcttgcggaggagttccgcgcactcccatctgacgcagaccgcgcgcgccggctcctctccctcgcggccgcgctgccgcggctcccggagcccgaccgcgcccagggcaaccgcgtcatgggctgcgtcgcgcgggtgtggctcgtcgcccgctgcaacgcggcaacgggctggcggatgtggttcgcggcggactccgactctgacctctcgcgtgggtactgcgcctgcctcgtcgccgcgctggacggggccgaacctgaggacgtcctcgccgtcgaccccgccgatcccgacctcgcgccgctcggggcggggacaacggcggcccggtcgcgggccagcacgtggcataacgtgcttgtcggcatgcagaagcgggcgcgcacggccatcgcggcgcgcgagggtagacaccccgggaagccgtttccgtcgctcgtcatcgcccgcgacggcgccatccgcgcgcagggcagctatgcggaggcccaggcgctgtttttatcccctgatgagtccaaggtttcaggccttgtgaatacccttaaagagaaaaaaattggggttgttgcacacttttatatggatcctgaggtgcaaggcatactcactgctgcaaagaagcagtggccccacatccaaatatctgattccttgattatggcagatagtgctgttaaaatggctgaagcaggatgcgactatattacagttctaggtgttgacttcatgtcagaaaatgttcgggcagtacttgatcaagcaggatttaataaggttgtcgtttatagaatgtccagtgaacagattggctgttcattagcagatgctgcttcaagttgtgaatatactcattttttgagggaagcttcgagatgttatccgtctttgcatgttatttacattaatacttcgctggaaacaaaagctcatgctcatgaacttgttcctacaataacttgcacctcttctaatgttgttccaactatattacaggcatttgcccaaataccaaatcttaatgtctggtatggtcctgattcatatatgggtgcaaacatagcagatttattccagagaatggctacaatgtcagatgaagaaattgcaaaaattcatccagaccacaacagaaaatctttgagttcattactgccacgcctacactattaccagggtggtaactgtatggtacatgacatgtttggccatgaggttgtggggaaaataaaggaacaatattgtgatgcatttctaacagcacactttgaggtccctggagaaatgttctctttggcaatggaagcaaaacggagagcaatgggagttgttggatccactcagaatatcttggatttcattaaggatcatgtgatgggagctctggacagaaatgtagatgaacaccttcagtttgtgctaggaacagaatcagggatgatcacttcaattgttgctgctgttcaggaattacttcatttgtattcttctcaagagagagcaaacatcgaagtagaaattgtgtttccagtatcttcggatgcaatttctaagacatcgaatggttctcatcatgttggttcttcaatggctactgatttgaatagtcttactattgttcctggtgtgagttctggcgaaggctgctccattcatggtggttgtgcctcgtgtccctacatgaagatgaataccctggggtcgctacttaaagtttgccatcagcttcctgataaaaacaacaaattatctgtataccaagctaacagaattaatgttaggactcctctcggaaaatcagttgcagaggttgggtgtgagcctattctgcatatgcggcatttccagaaaacaaggaggttacccgacaagcttgttcaccaggttgtaaatggtaatggtgacaaacccttgcaatagctgttcatcaatacttgtatttattttataaaggtggtatggaggatgaatatatctcaagtgaatgccatgttgagctggcataccgaagataagattatttgccctgtacggtagacatgtggacttgccca

SEQ ID NO: 31027 - DNA, 2659 bp, Zea Mays
aaactgccttttcttccggcttccaacttccaagtggcgactgctgccgactgccgggtgcgagaagagggagagatcagagtatcagacaagctgttgtccgaatccactccggcgaggacgagtgctgaggtcgaaatggggagaggagcggatgaggtggtgaaggtcgtggattcggaggacggcgagggggaggaggaagaggcagaggccgcggcggcggaggggtcgagcaaggagacgccgatgctgccaaggatgccggtgcgcgtgctactcgccgagggcgacgactccacgcgccacgtcatctccgcgctgctacgcaagtgcggctaccgagttgctgcagcctctgatggtgtgaaggcgtgggacatattaaaggaaaaatctttcaacatagaccttgttttaactgaagttgaactgcctttgatgtctgggttcctcttgttatccacgatcatggagcatgatgcatccaagaacatccctgttataatgatgtcttcacacgactctgtaagcatggttttcaaatgcatgctaaagggtgcatcagatttccttgttaagccgctaagaaagaacgaattaaggaacttgtggcagcacgtttggagaaaacaactggcaaacggtgggcccgatgtgcagcacatacaagaagagaatcttgcagaaagaatggaacagaagactggcgtgacaaaagatgataatttgaacagcgatggtccctgtaaaaatagagaatgcagtgaacaagaaagtgatgctcaaagttcttgcacaaggtcagagttggaggctgaaagtaagcaaactaacaacattttggagtatatgcaatcaactgaaaggcatttgtctattcgtagccacaaggatttagagctaaatggagagaccaaaacacgaacagctaagggtaataacttgattccaacaagagaagacgatttattgccaaagaaaagaacatgtttgaatgacaataattctgagagaacttccagagatatggagctagtccacattatggacaatcagcagaagcatgacacacagagggatgtggatactatgagaacaacatccaggagaaatgatgagaagaactccatcccagcacaccagttggaactttctcttagaagaactgactatggaaaattagagaaccacgagaaaaatgatagaagaacactgaaccattcaacttcatctgcattttacttgtataattgcaggacagcgtccagcttaggaaatgctggtgatggtcaattatgcagcacctcagaaacactagtggatgttgaaaatagaaatggagatttggcagctctgtctgaagacacgactgaaacaaatcgtcctcctatcagagttgtaccatttcctgtccctgttcaatgcttcacatttgatgggcagccgttctggaatggtacaccggtggcatctccattctacccacagtcagctccccccatttggaatagcaaaacaccaacgtggcaagaatcaactccacaagcaacttcactgccacaaaaatcgcaacagaaagaaccagttgaaatggatgctaaaccagttgaaaatgcagaggaacaatttgtcgtaggtcctcccagtgccagtgggaagcagctgcatgttgaaattcctaaagatgatctacggcatatttctcctgtgaccggtgaaagtggaatcagtacggtgctagacagcaccagaaatactctgagcagcagtggctgtgatagcacttccaaccagatcaccgcccctactgaaccatcatccaatgtatacaggggcgttcctgaaaccgcaagagccgaaggtttacgacacctgagccagcgtgaggctgcactgaacaagttccggctaaagaggaaggacagatgctttgagaagaaggtaatcgactgattgcacattttcattccaatccaattctcggtgtcacttactaggacatgtgatttatgcctttgcattcatttgcaggttcggtaccagagccggaaattactcgcagagcagcgtccacgggtcaagggccagtttgtccgtcaagatcatagcatccaaggaagctagggtccagttactgagctggaactctttcccattatctacaaaaaaaagtcactgtaagtgactccactgcggggtaccctgatgtcaggttttttcgaagagttggaagcaaccacactgagttacggtttgctgtgtatgtttgctaaagcttgtaatatatgtatgtataggctgactcttttctttccttaggttaggcacaggacctggcacgttctagacggtttgtcggtagacgttaaaaaatacaggcatacttgtgtcctccagtagcacgtgtgctttaagccttgtattatgtaactagccaagttgtttttgatgtttcggattagatgtacactgtggatgtatggcgtgaaggatgtccaccaaagtatgctcgtttctgtgtagcttgttgcaatgaacattgttggcctggttttagtaatgctctcttgccttgagtattagtactgtgaaattttctacagacggtatgaagtgctaaatttgggtgacggtttttataagaagatcatgtctc

SEQ ID NO: 31028 - DNA, 3727 bp, Zea Mays
cgtcgcttgctcttccggctcacggcggtggtctccggccaaggggtcgtcacatacaaggaccagcgagatgggcggcgaggctgagcctgacaacgcggtgctcttcgttggggtgtcgctggtgctgggcatcgcctcccggcacctcctccgcggcacccgcgtgccctacaccgtcgcccttctcgtcctcggcgtcgcgcttggatccctcgagtacggaacacaacatggtctaggcaagcttggagctggaattcgtatctgggctaacataaaccctgatcttctgctggctgtttttctacctgccctcctctttgaaagctccttctccatggaagtacaccaaataaagagatgtatggcacagatggtgttacttgctggacctggtgtgctaatatcaacagttttacttggcgttgccgtaaagctcacttttccttacaactggagctggaaaacatcattgttgcttggcggactgcttagtgcaactgatccagttgctgtggttgcactgctaaaagaactcggagcaagtaaaaagcttagcacaatcattgaaggaccgctattgttgcctatcagctattctatcgaatggtgcttggaagaacctttgatgctggctcaataataaagttcttgtctgaagtttcacttggagctgttgctctgggccttgcatttggaatcatgtcaatactgtggctgggctttatttttaacgatacaatcatagagattgcacttactcttgctgtcagttatatagctttcttcactgcacaagactcactggaggtctctggtgttttgactgtcatgacactgggaatgttctatgcagcttttgcaaaaactgcttttaagggtgaaagtcagcaaagcttacaccatttctgggaaatggttgcttacattgcaaatacacttatttttatactgagtggggttgttattgcagatggtgttctacaaaataatggccactttgagaggcacggcagttcatggggcttccttcttctgctctatgtctttgtacaaatatctcgagttatagttgttggtgttttgtacccgatgttgcgtcactttgggtatgggttggacttgaaagaggccatgattcttgtttggtcagggctgcgaggggctgttgctctgtcactatcattatctgttaagcgtaccagcgattcagttcaaccttaccttaaaccagaagttggaacaatgtttgtgttcttcactggtggcattgtgtttctgacattgatttttaatggctcaaccacacaatttttgctacatatactcggcatggacaaattgttgcccacaaagcttcgtatattgaaatatacaaggtacgaaatgctaaagaaagcattagaggcttttggtgaactaagggatgacgaggaacttggacctgctgactgggttactgtaaagaaatatatcacatgtttgaatgacctagactatgagccagagcatccccatgatgttggtgacgaagatgactgcatgcatatcatgaacttaacagatatccgagtgcggcttttgaatggtgtgcaagccgcgtactggggaatgcttgaagaaggacgaataactcaagttacagcaaatattctgatgagatcggttgatgaagctatggaccttgtttctggacaaacattatgtgattggaaaggtttaaagtccaatgtgcagttcccaaattactataggttccttcagaggagtaggttaccacgaaagcttgtcacatacttcacagtcgaaagattagagtctggatgttacatctgtgctgcatttcttcgtgctcacagaatcgcaaggcggcagctacatgattttcttggtgatagtgaggttgcaagaactgttattgatgaaagtaacgctgagggggaggaagctagaaaattcttggaagatgttcgagttacattcccgcaggtgctacgagtgctaaagacacgacaagtcacatattctgtgctgacacacttgagtgagtatattcaaaacctccagaagactgggctgctggaagagaaggaaatggtccatttagatgatgctctgcagacagacttgaagaagttgcagaggaatccaccaatagtgaaaatgccaagagtcagtgatcttctgaacactcatcctttagttggcgcgctgcctgctgctgtacgtgatactttgctaagcaatacgaaggaaaccctgcgagggcagggcacaacgctgtatagagaaggatccaggccaaccggtatctggcttgtttctattggtgtagtgaagtggacaagtcagagattaagcagaaggcattccttggatccaattttatcgcatgggagcactctgggtctgtatgaggtgctgattggaaagccatatatctgtgacatgaccacagattcgatggtacagtgtttcttcatcgaaactgaaaagatagaagagctgctccattcagatccttcgattgagattttcctgtggcaggaaagtgctctggtgcttgccaggcttttggtccctcatagattcgagaaaatgggaatgcatgagatgagggttctggttgctgaaaggtcgacgatgaacatatacatcaagggagaagacttggaagtggagcagaattgcattggcattttgctggaagggttcttgaagatcgagaacctgactctcatcacgcccccagcgttgcttctgccatggaatgctgacttgagcttattcggtctcgagtcctcagactactgccatactgcacgcaggtatcaggtggaagccagagcgcggatcatcttcttcgacgaggcagaggccgcccatcttcatgttcagacaagtgcgtcgctgccccaaggtgagccagcacggagcatgagcaaggagcacagcggcttgctcagctggcccgagagcttccggaggtctcgtggcagcctaggcttagcagctgagatgctgccgggcggcttgtcttccagggccctgcaactgagcatgtacgggggcagcgtggtgagcctctcctccggccagcagggtcaccggcggcagaggccacgtcatcgcgtgcaggcggccacgacgatgacaaaccagaagaagcacagctcttcctaccccaggatgccatccatatccaaggagcggcatctgctctccgtgcagtcggagggctccaacatgaagagagtggcagctctacctgaggttgctgccaccgctcctgctccggcaggggcagcacaggggcagcggagggctatgaacttgcaggaggaatacaactcgagcgaagactccgccggcgaagaagtcatcgtcagagttgactcgcccagcatgctctctttccgtgagtccaccgccgtgcctccgccccaggagcagtagctggatgcctggatgtggtcttctcttctcgtgtattgtattgtactgtatgtattgtatcagggaagctttggcgcagtggtgtggtgtggtgtggtgtggtaaacaaaataaataaaacacatttccgcgttccatattttctcttcatgatcaccgaataaataaaagaaacagagacaatgatgcggaagaaaaatgcgctctttctgtctggacccgccgccgcctcaacttacgagaccaacaaaaactgggtgcaacccat

SEQ ID NO: 31029 - DNA, 1855 bp, Zea Mays
ctcaggccggcctgctcccgtcccgtgcggcggggggccctttccttctatggcggcggcggcggcgagcattagcggatggagaggcggattattcttcttgggacagtgacgacgagtaccagaaattcatccaaaacatgaaccctccaagggtcaccatcgacaacacatcatgtccaaatgctacagtcatccatgtggacagcgcgaacaagtatgggatactgttggaggtagtgcaggtcctcaccgacctcaagctcatagtcaagaaggcatacatatcctcagacgggggatggttcatggacgtcttcactgtgacgaaccaaagtgggcacaagataacggacgaatctgtgctgcaaggaataaaagactacatttacaagtctatcgggcctgactcctgcttccttccctcgcggaggagagccgtcggggtggagccgtcctccgaccacaccctgatagagctaacggggaccgacaggccgggcctcctctcggaggtgagcgcggtgctcacgagcctggagtgcaacgtggtgagcgcggagctgtggacgcacaacgggagagccgccgccgtgatgcaggtcaccgacagggagtccgggctggcggtctcggacgcggagagggtcggcaggatcaaggggcggctctacaacgtgttcagagggaggagccgggacgccaagaccgcggtcgcgacgacgggcgccacccacccggagcggaggctgcaccagatgatgttcgaggaccgggactacgagaggcgcggcaaggacgatggcagggcggcggcgagcggcagcaaccccggtccggtggtttcggtcgtgaactggcttcagaaatactactccgtggtgacggtccggtgcagggaccggcccaagctcctgttcgacacggtgtgcaccctgacggacatgcagtacgtggtgttccatggcagcgtggataccgagggccccgaagcttaccaggactactacatcaggcacatcgatgggtgtcccgtcaattcggaggccgagaggaagaggatcatccagtgccttgaagcagccatagaacggagagtgtccgagggcctgaagctagagctgtcgacaggcgacagggtgggtctgctgtcggacgtgacgcgcatcttccgcgagaacggcctgacggtgacgagagcggaggtctcgaccaggggcgacgaggcggtcaacaccttctacgtccgcgacgcggccgggagcgccgtcgagctgaggacgctggaggccatccgccaggagattggccagaccgttctccaggtgaaggggcaccccgagcagccgaagccgccggtagccgcgcaggactcgcccaccaggttcctcttcagcagcctgttgttcagaccgaggtcgctgtgcaacctcgggccctgatgatgagttccagctccagttccagctagcgcagcgcgtgcatgagaattgagaactgtctgttgtcgggagatgctgctgtaccccaagggcccaagggcaagagttgtacaacgcgatcaggagtgttcattcgtcagaagctcagaacaggtgaccagaagtcgtttaaagcgaagcccacacccaacagctggtgaatactgaatacaccctatagcatcgtccaccgttgagtagtgaaaggtgtagttctgtaaggctatctccagtcctgtcgacatggtggtgccccattgcaagtatgattcattcaagcttgctgtaaatactgcctcccacggccatctccatctatttattctctagacatcagcagcggtcactgatggcgttgcctcttggggatattc

SEQ ID NO: 31030 - DNA, 3099 bp, Zea Mays
aaccacgcgacgacgctctccatcggatcagagtcggagctaccaagcatgctttcaagcgtattttgacgagcctgcttaagcctggcggtggtgaatacggcaagttcttcagccttccggcgctaaatgatccaaggatcgataagcttccctactctatacgtgttctcctggaatcagctatccgccattgtgataacttccaagttacagagagtgatgttgagaaaatcattgattgggagaacacatctccaaagctggctgagatacctttcaagccagcgagatgcattctaatggacaacactggagtcccagcagttgtagaccttgcagctatgcgtgatatgatgccaaagttgggatgtgatccctacaagattaatccattgattcccgtggatgctgttattgaccacgcagtgcgagtggatgtagcagggacctatgatgcattggatagaaacgaggagctggagttccaacgcaacaaagaaaggtttgcttttcttaaatgggcatccaatgctttccacaacatgcaggttttccctcctggttcgggcactgtacaccagtcttggagttgctgggtggggagtaggcggtattgaagcagtcgttgcaatgcttggccagccaatgggcatggttttgcctggtgtggttggattcaaattgagtgggaagttacgggatggtgtcactactactgacattgttcttaccatgacccaaatgctaaggaagcacggtgctattggcaaattcgttgaattctatggtgttggtgtgggcgagctatctttgcctgctagggccacaattgccaacatgtctccagaatatggagctaccatgggcttcttccctgtagaccaagtagcattggactatctcaaactgacaggccgaagcgatgaaactgtgtcgatgattgaagcatacctgcgagctaacaaaatgtttgtggacaagcatgagcctgagacggaacgcgttttctcttcacatctggagctggaccttagtgaggtggagccttgcgtttcaggccccaaaaggcctcatgatcgtgtccctttgaaggaaatgaagtcagactggcatgcttgcctggacaacgaagttggcttcaagggctatgcggtgccaaaggaacagcaaggcaaagttgtgaaattcgacttccatggaaggccagctgaaatcaagcatggcagtgttgttcttgcagcaatatgtagctccacaaacacatcaaatcccagcgtcatgattggtgctggccttgtggcaaagaaagcctgcgaattaggccttgaggtgaagccatgggtaaagacaagccttacccctggatctgtggttgctaccgagtacttgaaacatagtggccttcaagattatctgaaccagcaagggttccatgtcgctgcgcatggttgcgccacttgtgtgggcaactccggtgacctggatggatctgtatcagctgctatcacagaaaatgatatggttgctgctgcggtgctgtcggccaaccgaaacttcgaggggcgtgtgaaccctctcactcgggctaactaccttgcctcgccgcctctggttgttgcctatgctcttgccggcactgttgacattgactttgagaaagagcccattggagttggaaagggtggtaaggaagttttcttgagggacatatggccttcaaaccaagagatcgatgaggttgtggagtccagcgtgcagactcacctgttcaagaaagtgtacgactcaattatggaacgtaaccctaggtggaaccagctgccggttccaaaggaggcactgtacccatgggaagacaggtccacctacatccgcaagcctacgtacctggagggcatgtccatgacgccgcctgcagccccgcccacggtgacggaggcctactgcctgctcaaccttggggacagcatcaccacggaccacatctcctactcggggaagatccccgagggcacacctgcggccaagtatctgctcgagtatggcgtggagcccaagaacttcagctcctatggtggccgccgcgggaacaacgaggtggtgatgaggggagcgtttgccaatatgaggatcgtgaataagcttcttgatggcaaggctggtccctggacgatccatgttcctaccggggagaagctctatgtttacgacgcggcaatgaagtacaagtcggaaggtcatgacatggtcatcattgctggctccgagtacggcagtggcagctctcgtgactctgctgccaagggaccaatgctactgggtgtcaagtcggtgattgcaaagagcttcgagcggatccaccggagcaacttggtggggatggggatcattcctctctgctttaaagcaggagaggatgccgattcactcggcctcaccggacgtgagcgctacaccatccacctccctaccagcaccgccgagctcagtccaggccaggacgtgaccgtcacaacccacgacggcagatccttcacttgcactcttcgcttggacacacagcttgaggtcacatacttcaaccatggaggcatccttccctacatggtccgcaacctggcagcacagatgaaataagttaaaaagcaagctagcttattggcgcggtgggaataaattaaaaaggtactcagtgccccacgtatttgacgtatgtctgtaaataagtggcacattcgagcgctcttcgctctgccattgaggtggatcgaagctgccacatattttctccgcaggacatcggcacgaattttgtcttagcaaaccagttaattttgtactctttagattctttaattggttccatgctctctttggtacttttcatgtcagtttgctttgcaaacattatcagcgtgcccttgtagatttcgtaatggttatatgtatatgccctattgaaattgtcattttgctttgcaaaaaaatatcagcgtgccgttgtagattttcaaatgtatatgtctgccgtcaaactctctcgtgaatatgtttggttacaataatggaacaggacggaatgaaacgattccaagt

SEQ ID NO: 31031 - DNA, 3436 bp, Zea Mays
caccaatagccaacaggcaacagcagcggaacatctcgccttctctgaaagccatttcagaaccaccttcaaagttcgaactccatctcctccgcgtccgcaaaccaatccctagatcctctcgccctcgcaccaacccccaattcgatccaccccgtcccctatccgcctcgagtcccacccaattcggcgctagcctgatcggcattgcctgccggcctcgtcgtacagatctgagcgccgtctcgagcgccagatctcgccggctccgcgcctagcattccgccaggaccaggattcgcgcagcgccggcgccggcaccggcaccggcgcctgacgccaagttggcgcctcagaagcggtcccagcgtggcggcggcggaggtggcgcctccgccgccgccgcggcttcgtcagccgccgcgggggactccggcgacgccgttatggcgcggtggctgcagtccgcaggtctgcagcacctcgccgcgtcctcggccgcaggcggggccggggccggcgaccttcgcgttggtggcctgagtggcggtggcggcggcggccttctcccgagtcttctcatgcagggatatggaccacaaacaatcgaggagaaacagaagctttatacattattgaggagcctaaatgttaatggtggattagcatctgcatctatatccgagccctatacttcaacaggacagagctttgctggtggtgctcctgtagatggattttattcacctgaacttagaggtgaatttggggctggccttttggatcttcatgcaatggatgacagcgagcttctttctgagaatgctgcatcagaaccatttgagccttcgccttttatgccaaaagaaatggatgatgacgactacgatgtaatagcagaaaaccaacaaggtctagtagacaaccagagtgccttcaccaacgaaaaagaaaacactgtggtcagtgcaagagaaagtaatgtagcaaagattaaagtcgtggtaaggaaaagacctctgaacaaaaaggaggtatctcgaaaagaggaagacatcatagatgtacacaattctcaattcttaactgtccatgagcctaaactaaaggtggatttgacagcttatgtggaaaagcatgatttctgctttgacactgtcttgggcgagaatgtaactaatgatgaggtgtaccgtgagactgtggagcctattataccattaattttccaaaggacaaaagcgacatgctttgcatatggccaaacagtggcaagacctatacaatgcaacccctacctcttagagctgcacatgatatggtttgtcttttacatcaacctatgtatcggaatcaacatttcaagttatggcttagctactttgaaatttatggtggcaaactctttgatcttcttagcgaaaggaggcaactcttaatgagagaagacggaaagaaacaggtctgtattgttggtttacaggagttcgaggtttctgatgtccagattgtcaaagaatacattgagaaaggaaatgctgcaagaagcacaggcacaactggagccaatgaagagtcctcacgatctcatgctattctgcaattgtctgtgaaaaagcatatcccagttactgaaacccggagacagagagaccgagatgctattgaagcaaagaatacaaagcatgtggggaaaatgtcatttattgatcttgctggaagtgagcgtggtgctgatacaacagataatgacaaacaaacaagaattgaaggtgcagagatcaacaagagccttttggctctcaaggaatgtattcgggcactggataacgatcaaatacacattcctttcagaggaagcaagctaacagaggtgcttcgggactcctttgttggaaactcccgtacagtgatgatttcttgcgtttcaccaagttcaggttcatgtgaacacacactgaatacgttaagatatgctgacagggttaaaagtctttcaaaaggtggtaacacaaaaaaggagcagtttgctgtgcagtctgtatcatctggcaaggaatctacctacacatcgtaccctttatcatgtgaagctgaagagactatggagcagactcaagaaattaggcctgttgattcttctaggaaaggtgttgacagtttcacttccaattcttccattgagcctgagaaaaactcctattgtatgattccaagctatccacataaaggaaaagaagaaactagtactagatctggtttgaatgatagggagagaggggacttgaaatataaccaggctggttttaatagtaaaacacattcacttcaggaatcaataaattcacaagaagaggtgaaagtgacaaaagtctcaccaccccggagaaaagctaacagggatgagaaatcagaaaggcaggtcaactacatgaaaaaagaaagtgggcctgaaattagtcggactggtgttaagcagcaacagcaacttaaacagctgcaaaggccatcatcaacctcatcgtcgcaggttttatccaagcaatctgagaaggaagatatggaaataaacacaatacttgaggaagaggcgctgatagcagctcacagaaaggaaattgaaagtacaatggagatagtacgagaagagatgaatctattagcagaggtcgatcagccaggtagtcttattgacaactacgtggcacagctaagctttctgttgtcgcggaaggcttctggtttggtaagccttcaggcacgcttggcacggtttcagcagcgcctcaaggaacaggagattcttagccgtcaaaaaccattgagatagtttaaaccgcccaaaatggaaacctttcggtttgtcgttgatcgcgagaagcctcggatactggaaactgccatcgattgcgacagcctcggatcatggcctccaacatcgccttttagggatctaagggtgaaaggatgggagatggaaatgtgggctgatgaagtgcgcattcattattgattttgaggttttatgaaccagtttactaatttttcttttactgaaaagggtgcttgagtgtattttctatcgatgtcatgggtttgtcaacgtttgccattttcttttgtacgagtatagttgtaactgttgttcgaataccggtagtgaagtgctgcgagtgaggaaataaccttgccttgccgttatggtgttgtatcttttgttgatatttatttcgcatcaacaaaagaaaagcagcgttcgataaatgtctacaggatttgctttgtaccttgggggtgccctgtttattgtgactacaagtctgtgatatgcattttttatacctttattttttgtacctttttctgattgaatccgaaatccacacaacacccgaagccaaatgtcagacaaaaatagtgctcaggcaaaaaaaaa

SEQ ID NO: 31032 - DNA, 2199 bp, Zea Mays
cccggactcccagactcctcccaaaaccctcgcatcctctcccacgcatgtcacaatcgccatgaccgacagaaaccccgccgccgcctcaagcaagcgtcactgtgacctctccctcgacgatcccacgccgtcggccaagctccagcggtgctccgagccgtcagaaccaacgccggcggggaaaccgaacggcggcgcggcgacgggagaggagagcgagatgatggccggcgcacggaaccctagggcgcagaggtacctggtcgccgtggagtacattggcacccgcttctccggctcacagaagcagcccaaccagcgcaccgtcactggggtcctcgaggaggcatttcaccgatttattgggcagccagtttcaataatcttttctagccgaacggatgcaggtgttcatgctttatcaaatgtttgtcatgttgatgttgagcggataagtaaaaggaagcctggcgaagttttcacaaaatgttgatgtcgttgaagacctggcggctggcgccactgctgaaacaagtcgctgtagtctgggcgtctggattgatgtattttggtgggagagttgtttggtaggttttgaactgtttgttgtgagtgttgttagtagttgagagtgattgttggtagttaaactatcacaatgttgattgtaagctggtaacatcagcagtggatatttgactattggtaagctttctaataaagctgggtgaatgcttttgatctaaaaaatgtcttgatagtgcacttgattggactttaagattttaatatgtttttattcctaaaaacttgttcagttagaggcatttgacttagaaccaaactaaagtgtcctataatttgtaaaagaggaaataaataaaaatatgttttctagaacagcgcctcttataactcctgctgctgatttgcttttccctttttacagttaacacctcatgagcctggagttgtaaaacgtgctgtgaaccactttctactgaagagtgaaggtgacataatggtgactgatgtctgctgtgttgcaccagattttcatgctagatacaaatctctagagcgcacatatcactatcgcttgcttgctggacctgaatcaacatctgtttttgagaaaaactctgtttggcatatatctgaagatttggatattcagtcaatgaagaaagcatgcagcatacttgttgggcatcatgatttcagttcatttcgagcggctggatgtcaggcaaactctccagtgcgaactctggatgaacttagtgttacagaagtattccctttcatgttttttccttcaagtgtagaaagatcagagttggaattatcaaatgtctctcttgtttattcaaggaaaccagacatggaatcttctgggaaaggatctgatggttcctgtaccagtagtgtgaaatcagattttgagaatggaaaagattttggaaagcggtcaaggcaccgttgctttgttgttactgcaagggcacggtcttttctttaccaccaggtaaggttgatggtcggtcttctaaaatctgttgggactggagatctaacaactgcagatgttgagagaattctggatgcaaagacggttactgctgcacccagtatggcaccttcttgtggtctgtaccttgctaacgttaaatatgatctgaatacctgaagacaagttttatctagtggcttctgttggtgggcctccagattttgtcagctgttggctatcaaaggaattatatgctgccacttgccaaagctttcagttgcctgttttgtccactgaatcttgcatggtgattgaaaacctagaattaagtttatctgtcagcacaagagccggcttcattctcttcttgtacacagagctcttctgcatgttcagaaacaaaataggtagcttcattttagttaagttcaactatccactctttaaatttcagctggatccacccgattttgttgggtgtacgtagatttgacctggtaggggcaaaattttatttcttggttttctcatgactgtacttggttcttgatatataattaattagccaaatgcgttgtgtgcatattgaaaatattcttttctgttccttgataaattacatcgagcaagactgcaagagaactttcttcaagaaaatattcttttctgttccttgataaatt

SEQ ID NO: 31033 - DNA, 970 bp, Zea Mays
tcatcacttacatgacttcataaggtttctctggggatccttatctttcttaacttcaggtattttgcacaccatattcttccatagaaccctcagcctggttcgccccaaagatgttgactgtgatttcctcgatattacttatgtacaatgtggtctaccggaactagaaaaggaagttgacgaaaagatagaccagttcagtgcatgggtggagaaacacccaaaccgcagaagccagatctgcctctcctttttcgacgagaaacacagacaccctggttggtttgtcaacaaaacagagcgcatctattgggagcaatggttcatcaatttgcaagtcatgttccccaaaagatacagcaagtcaaacagctccaaagggctgacaaacatccaagcaaatgccgtggaggagaccagcacaaggcgtgctgcattggaggcgtcgattaacgaagtgctgttccagatcataaagttcgccaacgagaaaaaggaccacattcctgctatccctgacaggattttcaatcacgagatcatgatcccaagctcggattctgtatttggatggaacacggacgtcattcgcagagttctgaatagcgggcacccatactcgctttaactgaagacgacatctcagtgggcgcccgtattcagtttattagcgtgctgccgccctgtttggaagacggctctgttaaccatcgtggtgaaccatataatatgcctaaggaaaaacctagttctgtgtacatcaccctgctcatctggcatgtacatactgtgttgggatcttgctcatcggtcaaacattcttaagttcgattaagtttataaataacaatattatgattctaaataagtttatcatgtaaaagtatttttcatgattgatacttattgcgaagcatctccgagtgagttaggtggttcgagtaacactccttaagtcttgaattcg

SEQ ID NO: 31034 - DNA, 1633 bp, Zea Mays
gcgcaaggttcaccccggttggcacgtcattcgctcaccactcccaccgccaccggcctcaagccaacaccaccagtccacacatgcgcaggcgcacacgcacggccgttgagacttgagacagagacgcaggagcgcggaggaaaaggaggcccagaccaccgacggggaaaaaacatcacgaacaccgttctccatagcgggagtagtgaggaacgaaagagagggggcggcctagggcttcgattccgcagccatggacgccgctgacgtgtggggccgctcatcgtcctcgtcttcttcgtccgccgccgccgcgaggcgcctgcaggcgcgctacgatctgtacatggggatcgacgacgcggacgccggcttggacgaggtgacggagccgcgcggcggggcggagtcctacaactgccccttctgcggcgaggacttcgactttgtcggcctctgctgtcacatcgacgacgagcatgccgttgaggctaagagcggggcatgccccatctgtgctacaagggtcggaatggacttgataggacatttgactatgcaacatggaagttatttcaagatatccttttttaactatgctgccgttgctgatcatttgcatttttacatttttcacattatactacagtgaagatacataggtgtcagggtccggcgcacgtcacgggcccggcggcgcctggagtacgtgcgcccgaccatgaccgcgaccatgacaataggtatgttggaacacagaatttacacattgttttccttaatgaataatacatgcaacgcaggcgcagagtccgaaaagtatcttctgggtcccattctttattatctttgttgagaaaggacttgagaaatggcagtttgcagtcatttctcggtggatcatcctatgtatccaatcctcctgctgcagcaccagatccatttgtgtcatctttaatttgtactttgcctgtggctgaaccatccaaagatttacattccgactcatctgacaataactttttgctaaataaattcccagatgaaaagcctgtagagaggtacgtcacctcaagcttgtcctttctgctgcctcactcatctccctctttgccacgataccattggatctgggctgaaccatcattgtcggagaaagatcagaaggaaagggttcaaaggagcaaattcgtccgagggcttgtgctctcgacaatatttgatgatgataacttgtaaagggggtcatcaaacttgataacagcatcacaatagttaaggaacacgaagagaatcatcagactctgctgctgttgtcgtgatcacacaagaggcccatctaagttcgtatatgtacggatggaatatttatgcatgtatgtatttatgtttatctccctgcatttacccttagtgcaacagggtggtaggggacggttgtagtattccaaatttatgtatcaaataaatgaggacactgtccttggggtgcaattgtgtatataatataataatagggagctactcgccatgatttaggatattttatttaactgttgtaataatatgcagtgttttgtatgatgaccccatttttttatatataactgttcattttagtcctttaatg

SEQ ID NO: 31035 - DNA, 677 bp, Zea Mays
ccggcaccatctccgagcacttcatcaacgggtcagtgacatccgacgactcgccggcggtgacgcccaggctgctgtccttgatgtccagctccagccccgaaaactgctcaggctgtggaaaattggggcacagaaaaaatagctccaaatgcccactaaatgggacaaagaagaggaaaagagcgccaaggaataatacaactaaaggttggtttcctaaagaagtgcctacatcatcacaggcagcacccaatattactcctccaagtgatgatgtgcctgcatcttcagaaattatgcttacaatacctccgccaggagaggatgtgcttgcatcttcacagatagtgcaaccaatgtctcctccaagagaggttgtgcctacagaattaatctctcctccgaaagacgcgtgaagaaggttgttcgttaaattacacctaggatgagctatacatatatgtattcttagggtgcatgttagttaggacagttatctgcaaaactgctaatgttagattaatgtatgtcattttatttgattgtcagtttggacagttatctgcaaaaatggtaatgtcatcagctattgggtgcattatctgaaatatatagttgatgccttgatggcgtgcaatatagtttgagagaaaggagtgctatttcttctgtta

SEQ ID NO: 31036 - DNA, 3286 bp, Zea Mays
tggctacctgctaataaaggcgcggcgatttgcgcatcattcgtcgccgtggattccctagcgaaacgccgaaacccaacaacatactacaagcggatttatgcggaaattcggaaaacgtgccgtactccggaaagctgcgttgactctgcctcgtttgctggagtgtctgggtgggtcgtggaattctgaccgagcgatttggtgccagttgttggttcacggccctcgagctgcaatcgacaattccgttggcatatgaacagttcgtgttttgtgatatatttcaccaaaaggaatcaggatggagagactgctcattttgtggcaagcgcctccattgtggatgtgttgcttcaaagaactcttatgatctacttgacagtggaggaattcaatgtgtcacttgcatgaaaaattcagcagctcagtctgcttctggacaagtggttccaaagctctttccatgtccaaacaatctgctgttttttggtaaaagcgacgagttattgtcaagcagaaaatttgaacaaccaccctctcttatgttggattccagaaatgatgatattgctattgtaaataagagtagtcacctgttcatggtaagcggcatagaggctggacagagcagtaacatcttgagacaaaaagagatagagaatggtccaaggcagattaaatgggaacaaccaacccttaatattggggacatgggaagacctttactaactaggtctcaaagtgcattagagtcacctcagtgtactcgaagagatgacaataaggatccaactacagatagcacaacaagtgaatcgtttccagaggcatgtctgagcatgaacctaggtattgcaaacaatggaaacaggatggaggctacttcaacagcggaaagacctatgctatcgccaacgacagccattgctgaaggaagagaacttaccactgcactgtccccctttcagcacgcacaaagggctcggcatttcctgaccagaccaccaagggttggtgagggtgcagcttttgatccaactagagacatgtttccgcatcttcgtgttgctaggccacctgctgaaggaaggggccgcaatcaattacttcctcggtattggccaagaataacagaccaagagctgcaacaaatatctggagattcaaattccacaatcgttccattgttcgagaaggtcctgagtgcgagtgatgcaggccgcatagggcgccttgttcttccaaaagcttgtgccgaggcatattttcccccaatttctcaaccagaaggacgccccttgacaattcaagatgcaagaggaaaagaatggcattttcagtttaggttttggccaaataataacagcagaatgtatgtcttggagggtgttacaccatgcatacaatcattgcaattacaagctggcgatacagtgacctttagtcgtatagatcctggagggaaacttgttatgggctttcggaaggccacaaatactgactcacagatttcagctattgcgaatggttcccttctcagtgagacactcttttctactgcaaatgaaagcataggagtagtaagtggttatcctggatttcttcactcaataaagggagctgcagatttccatccaagctctctatatgatcatcatattaactcagctgacggggatgtcagttggaataaggcagataaatttggcagcaggccagatgaggggtctttgcaatttctacaaaaacgaagtcgcaatattggttccaaaagcaggaggttcttaatcgacgctgaagatgccatggaactaaagcttacctgggaagaagctcaagagttgttgcgccctgctcccactgcaaaaccaactgttgtgatgattgaggactatgaatttgaagaatatgatgaaccccctgtctttgcaaagagatcaatttttaccatccgtgcaacaggggaacaagaccagtggattcaatgtgacgagtgctcaaaatggcgccggttgcctcttaatgttattgttgcatccaaatggacatgcaccgacaactcatgggacccaaaatgctgctcctgctctgcgcctgaagagttgaccccaaaagagttgcaaagtgttatgcagcagtatgaagaaatgaggaggcgaaagggcagctatggtctgaagctgaatgtcgctgaaatggatgcatccagctttgacgccttggccacgggtgcagtattcggtgaagtcgggaaccaaggtacggcttcagtcgcgacgaccacaaggcaccccaggcatcgccccggctgcacatgcatcgtgtgcatccagccacccagtggcaagggcccgaagcacaaccctgcgtgcacctgcaacgtgtgcatgacggtgaggcgccggttcaagacactgatgatgaggaagaagcagcggcagtcggagcgagaggaggcggaggcaagcaagaagatcgcgtgggtgaacagagacgagcccgaggggagcagcctgtcgagatccccgcagacgctggacacgacccgagacagcagcgatgtcaccatgttcgacaaggtggccgccgacgtgaacaaggggcacatcgacctcaacttccaccctgcagcccctgccgtccgtggcgctggcgaccagggacagaatggcgcgcagcagccccgggcggtgagcatgatgggcctcctggaagtggcgagccggccccttgataactacatgaagcagaacggcctgacgagcctggcgggggagcaaggaggtggcagctccagcacggccacggtcccgccggctccagtggagagtgaggaccggacgtccgatgagggccgtgtcgcgtcagcagagcgggaagcagacgccatggccatcgacgaggccggcgagaaccagcaggacaagcctgccgactctgccgctgccgctgctacttgacggcgtgcgtctgttgtgaaagtgactgatgggtgttgtcagcgtgctttgatgtgttgctcctggaggctggagttacttacgtgtacgtatgaggctgtgcaaccaacccccaggttgtatgttgtagaagttctgtaaaccacgatgctcttgtgttggttgctgctgtaatctaaaaacgcttagacctttggattcaataactcaccacatacttgatctgtactgtacatctcatctaagacatcttttggaaaacaggaatttcacaggagtcacggacggactcagtgcttaagtttaaatatacatgcctttta

SEQ ID NO: 31037 - DNA, 717 bp, Zea Mays
aattctcctatgctcaatatctacatccaaatagcctccgtgcccgcctacagacacctcgaggaccgccccctctcccccagtcccactccaaccgcaccactgtgggcgtcgcccccgagctcggaccacgacctttccaccctccgtgcccgctgtcgctcctcgttgccggccgccatcgatcttagcggcggtgtcgacgcttgcatggacgatgccctcaatgtgttcggtgaaatgggcacacgtgcaagtgttgggatggtgactatcatccacgggggctggacatcgaggttatatcgaggctgatacacagaccgtctcttcacgcatcgcttctcatagcgtctcagttcctcgatccagaaatggtgtgctcatcatgttgtccgtggcctctattttctcaggcgcaaatgcacctctcctcggctatgttccaactttgtttagctggggagagaaagataagcccgattacatatccattttagtgttctaatgacgtcaccaatagttcccatttaagagtaatcaataagctcacaacataaataaattacagcagagtacattgcttattggagcatgggtgaaacctgtttattaagttttatgctgctcataagtttccgtttaggcaaggaaaaactaatatgtatccttacaagctggattcattttttaagttatttatattttagaatttcg

SEQ ID NO: 31038 - DNA, 457 bp, Zea Mays
tggtcgttctggttcgtgcttcagcggtgcaattactggaggatgctctagttgcgataaaagacggcggtgtacctccacctagcgtcctgccatcttttcaggagatcaaggatacattgggtttcaaccgctattataaagaagagaaacaataccaagtggacaagtgaaggaagcagctgaagtctgatcctgtggattcagtcggatcgtggccatggcttaatttccaccggacatgctgggcttccaccggacatgatgcagaccaatcgtatttatgttgagttgtaatcgaacgctgcgtagcgcagtatcccgaagaacatatatatggggtcttctcttccgtttctgctctgctgtggtttcaataatcccgaaattgtgattccagtttaatataacaggccagcttgatggggctttcgttatgccagagcacactttaccc

SEQ ID NO: 31039 - DNA, 6444 bp, Zea Mays
cacgaccacaccagcagccaggtgcccggtgccgactcgacccgaccaccacccaggccagccagaagcccgtcccgacccggccgggcgcgcgcgtgcgtgcgttcgggcgcgcgcgttcctgcgcggattgggctcggcctccgctcgtcgccttccggccccacgcgcccctccccgcgagggctcgcccctccgcccccagtccgcctcccgcgatccccttctcccgccgctcgtcgcccgcctctttcctccccgctccccgcagagctggtgtgcacttctattacattacatgcatgtggagtaatttacctacggcagattgctgactaaaggcgctgaagtaaaccttccctcagtatacttcctcggatgtcacgtctgcccctctgcgtcatttatggctcagaactcgtcccgtcttcaccgcctcctcacattactagacactggttcgacacaagcaacgaggtttgcggctgcacgccaaattggagaaatcgccaagtcccacccccaggagctgaattcgttgctaaaaaaggtttctcaatatattcgtagtaaaaattgggacacgagggttgcggcagcccatgcgattggtgccatagcagagaatgtcaaacacacatcattgaaggacttgtatgcttccgtgcaagcagaaaaacatgcttccggtttctctgatggaagtgatgatgctggctcagcattgccacggactgatagtgcagcaacatctgatcttgcttttggaagctttgacataggcagggtattggaatttggatctcctctattggcatcaggtggacaggaatacgacattgctgatagtggcaagaatccagcagagcgtctagctcgccaaaagaaaaatctccggcgtcgtttaggactggatttatgtgagcagtttatggatgttaatgacgttatcaaagacgaggatcttcttgcccaaaaaaattattggggttcacatgtacagaataatggattccattcatttaattcaggtcataatattcagcagttggtttctaccatggtccccaggtatcccaagcattctaattttcgctctagacgattaagtgccagggagttaaatatgctgaagcgtaaagcaaagagtaatgcaaaagatcatacaaaggctgtatctgaggatgatgaggttacactgaaaggatctgtgccctccaatggagcttcttctgaacaaggtgtatttgatacagctgtcgaagaagacaatctggagtacaatgagaacggaagatggccttttcaacaatttgtggatcagcttattcatgatatgtttgatcctatttgggaagttcgccatggcaccattatggctttaagggaaattttgacacatcatggtgcttgtgctggagtatattttcctgatctgagcttgccttcctctgacttggatggtaaaaccaactttgactcccttaaaagggaacatggtatcgatctaaacgaagatgtccatttggaacaccttgaaccagcattaaagaagcataagaaagagccaaaatgtgctgaaagtatgatggattgtgataaggagttggttgacagtgattatctaaaaacggaaggagatctgagcaatgtgcctgatgtattaactgccgaaccaaattctactcatgtaaaagttgagcctgagttctgtgttgatgattcagctgacccctctaaaggcgtttcgacatgtaaatcacagaaaaaactcaactccatatcacatctgagttctcatattcttgctccagaaagttcaaaattcatgaaactgatgaaactagccaaatactcatatatgaagaattgggaatttcttcaggattgtgcaatccgcttcctttgtgtgctttcactggaccgctttggtgattatgtatccgatcaagttgtcgccccagttcgtgaaacttgtgctcaagctcttggtgctgtgctgaagtacatgcacccttctttagtatgtcatacattcaaaatcttgctgcagatgcagcacagacaagagtgggaagttcgtcatgggagccttcttggcattaaatacttagttgctgttcgccaggaaatgcttaaagatttgcttgactatatcattcatgcttgtaaagctggtctggaggaccctgatgatgatgtccgagcagtggctgcagaagccctgattccagctgccgactctttagttaggctaaatgaccaaattttgcatccaattgtggtgttgctttgggatatactgcttgaccttgacgatttaagcccatctacaagcagtgtaatgaacttgttagcagaaatatattctcaaccagagatggtcccaaagatgcttggcacagcagcttcaggggaaaagggagaatttgatctaaacgaagcaactcagattgctgagcaagaagacgaactaacatctattgaaaacccttacggtctagctacactgacaccccggctgtggccctttatgagacatagtattacttctgttcggcgttccgccatacgaacactggagaagcttcttgaggttggcaacactaggagttctgctggaacaaccccatctaaactctggccaacatcaatattaggtgatgcactgcaggttgtatttcagaacctacttttggagtcaaatgatgatattcttcagtcttctgaaagggcttggaaacttctacttcaggtggcttcaatgatcatcgtttcttggttcaaagatctgagaggcagagatcctgtatcagtgggtacattgctagcttttctatcttccttgaaagagtggctggtggacttattgacttgctctgatccagcattacccacaaaaggttctgtgcttccatattctgaactttcaaggacatacacgaagatgcgcaatgaagccaataatttgctccacttaatcgattcatgtgctgctttcaaagattatagtagcagcttaaaccttaacactgacgtgctgactgttgatgatgctatcaactttgcatcaaagcttttgttaccatctgaatctgatattccttcagaaactgagaacattttcttgaataacatagaatcagcaaaacaaggcctattgtctacatcaggttacttgaaatgtgttcagaataatttgcatgtgacagtctgttctttggtggcttctgctgtagtttggatgtcatgtttgcccagcaagttgaaccctgttattttacctttaatggctgccattaaaagagaacaggaggaagtacttcaagataaagctgctgatgcacttgctgagcttatatttagctgcattggccgcaagcctggccccaatgacaagctaaccaagaatctctgcactctaacatgcactgatgctagtgagacacctcaagctgcaataatcaactcaatgcaggttattgaggaccagaatttgctatcgattggaaagcgttttagcagtcatagatccaggggccatacaacgtctggtggcgatgaaaggtcaaaaatggagggttttataagccggcgtggatcagagttggctttcaagcatctctgtgtgaaatttggaccttcattgtttgaaaaccttcccaagttatgggattgccttactgagtttcttagacctgtaaaaacagaagatggtattccggaagatgatgcaagtattgcacagctgggcagatcgtatgaggataaggacccacagtcactcattaataatatccaggtcgttcgttccatttcacctcacttggctgagcccttaaggcctcaactgctaaatctccttccctctattcttgggtgtgttcgtcatcctcatgtggctgttagactagctgctgcaagatgcatcacatctatggcaaagtcattgaccgatgatgtgatggtactggtgatagaaaatgtcatcccaatgttgtccgatttatcttctgtctgtgcaagacaaggagctgggattctgttaagccttcttgttcagggtttggctgtggagttggttccttatgctcctttccttgtcgttcctcttctgaagtgtatgagtgacccagatggttctgttaggcagactgtgactcacagttttgctgctcttgttcctttgctgccattatcaaggggtgcttctttaccatgtggactaagtgaacgcttatctagcagtgctgaagatgtgcaatttctggaacagctccttgacaatacccaaattgatgatttcaagcttaatattgatcttaatgttgaactacgaaggtatcagcaagaagggatcaactggcttgcattcctccgtcggtttaagttacatggaattttatgtgatgacatggggctcggtaagacgctccaagcatctgctattgtagcaagtgacattgcagaagcacgtgcacggaatgatgaaaaaattctgacatctttgattatctgcccttctacattagtggcccactgggaatatgaaatagagaagtacatagacagctctatcttgaaacctcttcagtacgttggttcttctcaggacagagtgacactccgtagtcagtttgataaggttaatgttatcataacatcatatgatattatacggaaggatattgattttcttggaaatatcacttggaactattgtgttctggatgaagggcatataataaaaaactcaaggtctaaaataacgtttgctgtgaaacagctgaaagcgcaacaccgtcttatcttgagtggcacacctattcagaataatgtgttggagttatggtctttatttgacttccttatgcctgggtttcttggaacagaaaaacaattccaagctgcatatggaaaacccttgctagctgccaaagattctaaatgttcagcaaaggatgctgaagctggtattcttgcaatggaggcactgcataagcaggtcatgccgtttctactgagaagaacaaaggatgaagttttatctgatcttccagagaagataatccaggatagatattgtgatctcagtctattgcagctcaaactttatgacaaattttccagctccaatgcaaaagacgagatttcaactatagtaaaagcaaatgaactggaggaatctgcacctcaaccaaaggcaactcggcatgtgtttcaggcattgcagtacctattaaaactatgcagccatcccttgcttgtaactggggagaaccccccaaatcatcttgtggatcttctgaatgaaataggtctgggatctggcagtgagcttcatgagcttcaccactcacctaagcttgttgctcttcaagaaatacttcaagaatgtggtatagggtcagaaatatctagtcctgatgcttctacagctgttgggcaacacagagttttgatttttgctcagcataaggcttttcttgacatcatagagaaggacctgtttcaatctcatatgagaagtgtcacatatttgcggctggatggctctgttgatccagagaagagatttgaaatcgttaaagcattcaattcagacccaaccattgatgtacttctgctaacaacccatgtcggtgggcttggcttgaacttgacatctgccgacacattggtgttcgtggaacatgattggaacccaatgaaggaccttcaggctatggacagagcacatcgattgggtcaaaggaaagtggtgaatgttcaccgtctcatcatgcgtggcacccttgaggagaaggtgatgtctctccagaggttcaaggtgtcagtcgccaatgctgtcatcaatgctgagaactcgagcttgaagaccatgaacactgaccagctgcttgatctgttcacatcaacccctgcttcaagaaaagcaagcgacgagcagagtaagaggaaatctggtggcaaaggcttgaagtccattcttaatggtctggatgagctttgggatcagtcgcagtatgccgatgagtatgatctgaaccagttcctggcgaagctgaacggctgagccaccaccggctggctcgtgtacagtgtataaagcaatttggggcaggttaattttgttgttgctgttgtttgatagaggaaggaaaagattagatgctaacagatataggtggtggttggggttacgatctcaatttttttggtttccatcttcctcaatttttgttttgaggagttgtatatactctgctcacctataatcaaagctgcagctcttatcagaatttcccttgattggtcatggtgactgttccatgtactttgttctgccgcggccgtagctatatggactgctgcagctgcaattcatagaaacaaaatacttcatagaaacaaaatattgtagaagccgcatttggattaaag

SEQ ID NO: 31040 - DNA, 2638 bp, Zea Mays
cgagggcaaaggggcaacgcgtccaaccggccggacctcaccggctcatccctcatcgccctagtccccaagggccaagtccccaaccccggctgacgactgtgcccgtctccttccctgattcatccgcaagcccacccgtcggcgatcgtccatgacggaggatcgagcgcacaaggtcgccgacgagcccgccgcctcaggcaggcaaagacctgaaaggaagaagaggaagtgggatcaacccgcggaggacttggtctccgcggcggtgacggctgctgccgtgtcggggatgcctgtgatgaatttcggtgctcttcctggcgttgtactgcctggcgtcaccgcatatggagctgctacattgccaagtgtagtccctgttccgtattcattgccgccccatattgcaccatcggtgctccagaatgctgctgcagcagcccagaaattgagtcaggcaaaaataccagatgaggtcattgcacgggaaattgttataaacgatgcagatccatctgtgcgatataagcttacaaaacgacaaacacaagaagagattcagaaatgcacaaacactgtcatcattaccaggggaaaatatcaccctccaaatttacttcctgatggtgagaagcccctctatctacatatctctgctggatctcagttgaaagatactgctgagcgcattaaggcagttgatcgtgcagcttcaatgattgaggaaatattgaaacaaggaacaacctcagagtccatatcggtccctttctcctctagcactggacaagtaatcctctctatatctccgtagcatgagcaaatttacccgtttttgggagcgaattgaggtcattgtagttcgtttgctgtactactatataataaattctgcttgaaaaataacgtcatctctattcatctttcacaggctgttcgtccttttagtgcctcagtttttttgggttttgatgcagatccatcattgaatatcacagctcgaatccgtggtccaaatgatcagtacataaatcatatcatgaaagaaacaggggttactgttgtactaagaggaaaagattcggagaatcttggcagttgtcatagtgaagcctcacaacaacctctacacctatacctcacaagtatgcatttaaagaacctagaagctgcaaaagttttggcagagaacctcctggatacagtagcagcagaattcggtgcttccagaatttcttcttcaaaagtatatggtgctgttccacctcctcagcagttgttagctggtgtcgacacctcaggaacgaaatcagatgttcactatattgtagggcccaatgtgttatcgggagctacacattcctttgcatctactggagttattgctcctgttgttgctcctgcagtgacagtgcaatcaggggctccaacatattctggggttccactacccagtaacatggcctatcctattccaccagcaaacggtggggcattttacagtggttatggggacatttatccccaagcaactccgttgcagcagctggcattcacactcaagcatgcctcatcgtcggcaactcaggctgttccagtgacgtccacaccaacaagcatggctacaaaggggaactcaatcttggatgcggagatggataaacgatcccgaaggaaattccaggaactaccggtttcgaagggcccagcaacagaaagtcaggtttagatagttcaggtaacattgggagctcatcaattgcacctccgaagaaagttcaccctggatcaaatggaatgcttccgcaagaagaagcggatatgccatcacatctctctatatccactaagatgctaccaccacccctgaagagcatgctgccactgccacccagaagcatgcccccaccaccacctaagagcatgcctccaccgccaccaaaatttccttcagatgagtttttgtcaagaaacgagaacaagttttttcctttaaaggagccaacagcacctccaaggtcctttgatgcaatatcagtcttgccatctgaacgacgaccaagggagcctaaggaggaaaaaacaaaaggcacacctgtgtctgatactttgctgaaacttattgattatggagatgacgacgatgacggcgatattgatgtgacagacaacacacctaagggcaatccaactcctggttcagagcagaaaccattttgggctgtttaaaactgggtctgctaacgtagtctagtgtgaattcttgttgataaggatgcttgctgccttggtgcatcttctgaattgaagaggcaatcgagctccttgttcgtgtactgtagtaattctaacaggcaatgagatttctttgaacttgtattcattctggcctagtcaaaatgaaccgtttgttgttttggttcagatacgatgatgtttcgtttttagattcgacgttggttgctgaactcgtagcattttaatgtcggtattatataattgttagagcctatgtcaattttgtatccactgtcgtgcaaatttaatttttgtaatcagcctaaggtcacgacattgcttggaaacactttttttaatgaaggaaaatggcaggacatatggtatggtaatt

SEQ ID NO: 31041 - DNA, 2929 bp, Zea Mays
gttccgtgtcgtgtcggaccccaccacaaccctcttctccgtttcgtttcccgaccaggcctcgccggctcaccgcccccgccgcgcccgccatggacttctcggaacaggacgtcgacgtcttcggcgaggactacgacgtccacgacggcggcgccgaggccgaggccgaggccgacggcggcggggactcgtcgggctcctcctccccatcatcgtcctcgtcgtcctctgccgccgcgtcctcctcatcctcaagtggcggctcaagcctcagcagcagcggcggcgctgccggtgagggcgaggatggcgccgatgcgggggacggggaggaatacgattcgtccaacctcatagccacaaggagcgccggcgccgccggctatctggacgatgagaggagggaatatgagaaccaggaggtagaggaggagagagatttgttcggctcagataacgaagagtacgtcagaactccggcgcgcagccactacctagtcccagtgcttcctccaattcggaacactaataatcattctcgaggaggctttggaggacgaggtggtagaggcccaccacttcttccaaggccaggaggccatccagggcgacataactttggttacgggagattcgggaatgggcgtcatgttgaaggtttagtttcagatatgaagcttaataagagcgaagaaacattgtctagaaaagctgttacttttcaggagccttgtgagattgcatgcttaagccgtgttgagggtggagaggtgtattttgatgatcgcagcttgaggctcttcaaacgtgaaatctgtgaataccgcggtgcagatctcaataaaggattcgagtcatatatagagaagagagatttgggttctgaaggatttggcgatctactcgcatgcatacgaaattccaacatacttcttcagaatactatacattttgtgacataccgcaacaatcttaataagatattggccactgcttacctaagagaaccatggaagatgggcgttcataaaagaaggggtgttgtatatcttgatgttcataagctccctgaaagaccaaaaagtgaagttgagcgtaagagatgttattggggctattcttttgaaaaccttgccactgagaactcattcagcgacgatggaaggggtatcgatgcaaatgtagagttttgttctgtaataaagacaaaattgggtgcccatcggattgtcatgggtgctgagatggactgctgtgatgcaactgatgatggcaggaggttctatgtggagctgaaaacaagcagagagctggaataccatacagtggaagcatatgaaaaagaaaagctacttagattttggattcaatcgtttcttgccggtgttccttatgttgttgtgggattcaggaatgatgctggcatacttgtacggacggaaagactaagaaccaaagatattacacaaaaggtgaaggcaaagaactactggcagggtggcgtttgccttgcctttgccgatgaagtcttatgttggttgtatgggactgtcaaagagaatgaagactatgttcttcaatttgtacatccatttaaccgcctcgaacttctgcgtgcccagtccccctgtccggaagccataacgttgcatgtgcagcagctctcagatggttttatgctcacaaggcatcgtggattgcaatgtgaacctgctgtaatacgagctttaaaggtcaccttttgtcattgtttgtgtaggcgctgtggaattgttcatgatgagtcccggtcccgctgcctgtcccaagaacatctcgcttctcgcacgggcacagcaggtcaacgctctacacgcctcgacgccttgtccggcctgcaaagctgcagccccgctgcccagccgcctgcctcaaccctctccctctatcttcgtgagccagcggggaaggaaggaagcaacacccagggtaggatgggggtaggcgagtgcaagagcaacgactacggcgccgccgcatactgggacgcccgctactcctccggctcgccagcttccgccgccgccggctgtgggttcttcgactggtaccagacgtacccggcgctgcggccgctcctccgcgcccgcgtcccgacctcctcccgcgtcctgatgctcggctgcggcaactcccttttgtcggaggatatggtgaaggatggttacgaggacattgtaaacatagacatttcatctgtggtcatcgagcaaatgagagagaaacacaaggagattacacagctaacatatatgcagatggatattagagacatgggatttttcggtgatgagtcatttgattgtgtccttgataaagggaccctggatgctatgatgtgtgctgatgatgctcctcatggtgctttcaaaatgctagcagaagtggcaaggcttttgatgcctcatgggatctacttattgataacatatggtgctccaaaggaacgtgtcccacttctggaccagtccggatgcagctggagtattgcactctacatcatgcccacagctggataccaactgagaatgagtaaaggtgctcaacatcttataatggaggaggttacactcacagagggtggccaactgccacctgactatgttctcaaagatccagattcacatttcatttatgtttgtgagaagttggaagagaaagggactaattgcagagatactgatccaaaggaatcaacaaatgcaaattaactcactaccaacttcagatttcattttgattattgctggggaagtttgttgttgcaaaggcatagtcggagctcgtcttttgaatcatgtgttacccttcgtatgaaaaacctggctggcttcgccccgactgggtgtttggtttaaagaacgtgttagtatcttttcacttctca

SEQ ID NO: 31042 - DNA, 2168 bp, Zea Mays
cgctcccctcttcccccaatggcgaggaaaacacccaccccgtataagatcactctgtatttcaaatcccctcgcatccaaacacttccgtggaaaaaaaacaattaataatttattactggcagaagggggaagaagagatggtggacgaggcatgggagcgggcggtggaggcggcgctgcacgccggcggcgaggggagctcgtcgccggcgcggagcctgacgcttgacggcgccgtcaagtgcacgcacgggcggctgccggcggcagagatactggagcggcaccagagcctggagcacctttcgatcgctggcgtcggggtcacgtcgctcgagggtttcccgcggctgcggaacctcacgcggctcaccctctccgacaaccgcatcgccggcggtctcgaccacctcgtcgccgctggcctgtcctcgctgcgggacctcgacctcagcaacaaccgcatccaggacgttgacgacctcgcgccactcgccgacctgcgcctcgtctcgctcgacctctacgagtgccccgttacccgtgtcaaggactacagatccagggtcttcgagatgatccggacgctcaaatacctggacaagatggatgccgacgagaacgagcgccccgagtccgatgacgacgatgacgacggcgagggcgatggcgagggcgatggcgacgatgatgacgaagatgaagaagacgaggaagaccctgggagcggcgaggtagcgaacggcggcgtcgcccatgcgcgcgcgggcgtgccctcgcacccggtggaggtgaatggggtgatcgatgtggacgaggaggagagcgacgctgacgaggtcatcccgaacggtggtgtcgagcacagccatggcgcaaacgggtttcgtgtcgcggctgctggcgaagcccgtggcgaggaggatgaggacgtggaggaagatgacgacgacgacgatgactttgaggaggaggatttgggggaggagattgatgaggatgttgatgacgaggatgctgttgtggaggtgcatgatgtaccaagtagtgacgaggaggaagatggcgtggaggaggatgaggaagaagaggatgaggacgaagatgatgaagaagaggaggaggttgaggatgaaggtgaagaggcggagccacagagcagtggtagggttgccatgatgacaggcgaggatgaaggagaagagatagatgggcatgaacatggagaaggggacgatgaggatgaaaatggtgagattggtgaagaggatgaggagggattggaggtggggaatgatgacgacgaagacgacgcagatgcggatgatgaggatgaagatactgaatatcttgtgcaaccaatcgctcagcctcaagccatggctattggaagtgaattagatggagttgaccctgatgatgctgacgaggacaaggaagaagtcgacaacgatgatgatggggccacagatcagccttcatcctcgcatggagccaagcggaagagagatgatgatgatctgtcaggcagtggtgatgacagtgaggatgacggtgttgaggacttgaggcccttcaagcacaagtgatggagcagccaatgtacatggatccctccctcccccttcttcagctagaagtaagcagcaagatcagcagcagcaggaggaggcagcaggaacagaaatatggatttggaattacgcgaagttacggcgcggttgttgctcccaccggaatccctgcctgcgcgagcgggacggaaataaatggcgtggacccggttcacggggcaatcgcgccgggcctccatgtgggcgtggttctccgcctgcgacctgcctatcctccagcagctgtgagcgtatggtccgagtctatgtcgacggtcgtatgaaatggtgacaactcgcgacggaagtattacggcggcggcaggcaccacagctcatcacgctatacccgtgatgggagcagaacaacgcggaatacgacgtgggcgaagaagggtcggtacggagcaactagcaagacgtgtaccgcccatgcctcattttcttttctcccttcacatctcgccttcgttaggccgcctgttgtggggaatgtaaataaatgtacgtattttgagaaaggttaaataaaatacttcaattacaagcgaa

SEQ ID NO: 31043 - DNA, 1920 bp, Zea Mays
tggcccgcacaaccgtttccgcgtgggacacgaacgcagcgggaaagagaaaaaagtagaaaaagcgaaaagcctagtagcacaaggctacaagcctacaagcaaccgcgtccgcgtgtggagcaaggaaggcgaggggagccgagcgggcaaccggcggcgacagacatggcggagcagcacaaggaggagtcgggcgtgacagtgctggacaagatctccgacaagctccacgggcgcgggggcggctcgtcttcgtcgtcggactcggacgacgagcgctcgtcggcgacggccgccgtgaaggccaagatctaccgcatcttcgggcgcgagaagcccgtgcactccgtcctcggcggcggcaagcgtaagcccggacctcaactcctcatcctcaagcctcttctccgatctccactagagggccttcgtcttgtttggtctttatagagatgagatccaaccgctttggcgttgcttcacttgtcaagcgttggtgaactattattgatctgtagccgcatccatgtggacaaatgcaaattcctgggtagagatcttgggcgtctgggaaaccgctcgacttccgatccgatgtggtttgggtcaaatttctgcggcattgtctccacgatgcgagtatggcgcgaccagattactgtctctgtcgctgtaagatttgcctttacgccaggagtaagttatcgggctattctgtaagacagcaacagtaacttcgggtgattctgtagatgagctacagtagcttcctactcctggcctcctgggtaatttgcagcatgcgttacagtagctcgcttggtaatttgtagcgtgcgttacccttaaactcagcggccgatctgtttctatggaggaacaagaggatctctggtggggtgctcgcaggcgcaactgccttctggctgctgtttgaggtcatggattaccacctcctcaccctgctatgccactgcctcatcctcaccctggccatcctgttcctctggtccaatgccacgactttcatcaacaagtctcctcctaacatccccgaggtgaagatcccagatgacctggctgtgaatgttgcacgttccctgagatatgagatcaacaggggttttgctaccttgagggagattggccaaggccatgacctcaagaaatttctgattgtgattgcaggactgtggatcctttctgttcttgggagctgctgcaatttcctcaccttgtcttacatagtttttatggtactgtacactgtaccggtcctgtatgagaaacatgaggataaggttgatgcttttggtgagaaggccatggtcgagctgaagaggtactacgccatcttcgacgagaaatgcctatcaaagattccgaagggcccattaaaagacaagaagcaacattagaagcttagaatcagataagggtctgcggtgatttatcatctcttttgaccattattcgtcggttttggtggatggatgtgattccatgtctaaatacctggacgtgctctagtgttttagtgtggtcagtagcaatgttctaaattatctgagattacgctgaatcatgttctgaagtccacgtttaacgttgctctccctatcctttggaagtggcaatttcctcaatgtctgtaatatatctagtctagtgctatttcttaatctgacctagcgtcatgatgaacccttcttggatatttatttatttgtgccactggacatggtaattagagagcacgtaaattgtacatttgccatcatactcattagacgtgagacgtgttagtgtggtatcgatgcttgcactggagatacgatgctcaataacgccaagtttagaaaagtagcccttagagcatcttcaacaatatatagggttctattcagaaaaaaaaaa

SEQ ID NO: 31044 - DNA, 1736 bp, Zea Mays
tttcagtcgttgccacgacatagtttaaattataatcaaatacttgtagagtttgacacaggatcacggtaatctaaaacatgtagcttcttgcaagtgatactcacctcaacatggcagtgttaaatagcaaaccaccaaaatataaacgatcaacatgatagaccaatagaggtagcatgtaggaatgtggtccggaggcccaaacacacacacacaagtatagatgaatttgtttttttaatttagcttagtttactgtattttagcatttgtttgaagaaactgttggagtatataccatatttcacctctatttttttaacatgcccctaataataatgttttggaaaaacttttttagcatctttctagagttgctcttaaactatttatcttgaatgtcttggttggctactacacatttaattagccgaagactccacactcttcgttgtgcaccaaggtatatatatataagcgaaaccattttttattaaggaaaatatagacgaaaccaatgtaaagggtgctatttatttattgtattagtgacgtcttttccagctctgttaaagaagcaacatgttaaagacacaataattgaacaaactttcgcaatagatggtctcgagaaagtttgctgcgatgtggtaccagaatataggttttgccaaaaccatatgccacttgcccacttcctcacccaaaattctacagtgctcatttttttttctctcccccttctcaagtttttcattcctggtttggaggatatacagttatacacaaatttaccatttccattagcaaagaaagacattgggctcaagcccagcccaaaccgatgggatcggtcgacaccaagcgaggcaggctgtgtagggcttggcattttaaaccccatgaaccgaatccgaacccgaatagatcgaattggtcggtttttcgggttcgatccacatatcgtacttattcggttatcgagttagggttcggtttttatatcgcgtaagccgaatgtaaaaaaaaaagaacacacaacagtcaccagtcagcccaatagccacttgcccacttaggaagaatatccaacagcgacgccgcccgagaccatcaccatccgcgcggcggagatgcccgaggaagagcagcgctcggggagaggagcggtggtggatccgtggtaagaaacggactgccgtaaaattacgaggattactgcggctaaatctgtcgtagatcgtataattccaaagttcaactaattataatactaaaattttaattattctgtttgagatacctattttcagaagtccagtatcgacgatatcacggttccaaaaaaaaaaaaagctcgtctccctgaccctgaccgcactaccgcagcccgcaggcagccgagaccgcccaggcgcccaccagccaacctagagcctctccactgctcggccgccgcctgccgcagcccgccatccactgctcccgcctcccggcgtccggcgttctgcttctgcgtaggcgcggctgcgctccagctccaactccggcgtccggcctactgctactgctccagctccagctcccagcttcccccgcccgcctatgtccagctccaactccagcgtccgctctagcttcggtgtaccgctccaactcccccgctgcagctccggccacaacgcaagagttcagactccagcgccgtcttcttcacggtcgccttttgcgct

SEQ ID NO: 31045 - DNA, 2636 bp, Zea Mays
ggttgatgctctttctaggtacctacatttttgaaagaaggaaaatcggttcagcagatggttgatgaagctctccaacgggtacctaacaacaatggagacacaaatattgacgagctcaaccaaatcagagactctttggcggttatgggagataacagtacagcttttagcttaccacagcctcatctgcaaaggacaaagttatgtgatatggaggaccaggaacttgatccgttgtatgtaaagaagagggatcagttgaaagaagtcgttgcatccatgataaaaccaaaaattgtgcagggtagaactctgaatggaacagagtttgtatccttcctagggcagatagttgatgctttgaataaaggtgaaattccatcagccgggtcgctggttgaaattttcaataaggccattcttgaacgttgcttgaaggtgtacagtgaaataatgggcagagcaggtctaccagtgtcagtggatgaacttcgggagttccacgacctggcaaaagatgaagctagaaggcttttcaacaagcagcatttcggtaaacatcatgctgctcggtccatcctcaagcttgatgaagagattaaaaagaaacttgggccaagctaacgagtatcagtcatcaaagctgtgcgaagcacggttctcagagtgcgaagataaaatggaacgactccaagtcttgaagcttccgtccatggcgaaatttgatgccggattccttctctgcaatcgaagttttgaaacggactgtgtggggccagccaaggaaagctatcgacaccggatgtcaaagatgctggcaaggtcccgtgctcttttcatcaaggagtacaacaacaagctcttcaactggctcgccatattctccctggccatggttgtcgttgggcgcttcttggtcaagttcttcctgctcgaagttgctgcgtgggtgatgtttgccttcctagagacatacacgaggctgttctggtcgtcggagtccctgtactacaaccccgcctggcacgcgatcgtctcttcttgggaaaccgtcgtctacagccccgttcttgatcttgacagatgggcgttcccgatctgcgctgtcctgttgtttttggcgttttattggcgttgcctcggtggaaggaggggaattgcccggtcactgctacctctgtacaacggggcttattacagaagctccagtcgcacaagaacagactgatccctcgaaccatgcgcacaatcacaccattagcgtgcacatatagttgtatcatgcttattccaacactgcattcttcgattatgagtcaaaactcgggtgttgctgtaaatatgaaacccagaaggtttgtcaattgtataaatatatggctgcttgctaaacttcttggatttatttgtttgtttatttattaagctctgatcctctggggtttgtctccgtagtgtcaagcccattgaatggcgtagctgctgtagttggtctgcttgtcggcgtagcggtcccagatcatgatcccggcgtagctgggcgccttctgcaccaccgggaggacgccgtagtacaggttcttggggtgcacgtacccgaccgtccgctccgacgccggcaggccgacgtagagcccggagcccgggtacgccgcggcccacttgtcccactcctgctgccagtacgcggcgcagcgcgcgtcgccgtagagcctgacgttgacgcgggtaacgagccccgtggcgagcagccgcagcgccggcccgtccggcgggaacgcgcaccgcggcgtcgccgacagctgcacgggcgtgcgggcgcggaactgccggttgtagctccacaggcgcgcggccagcgcgtcgaggtggtccggcggcgggcggccgccgcggtcgaggaagaagtcgaggccgtcgacgtacgcgtcgccgaacgggcggcgcacgccggcgcgcggcgccggcgccgggaagtaggcgtaccagaggtagtcggcgaggtccgcggcggcctcggcgctcggcagggagtgctgccggccgccgagggagaggaacaccatgatgctcttcgactggcagtgcttgatgtcggcgccgatgccggcgacggggtggcccgagaggtccaggctcggcgggctgttgccggggccggccgagacgttgaggaaggagatgacgacgatggtgtacgtgcccgtgtcgcaggcctctcggagcgtgccctcggccttgttccggccccagaagacagtcacctgcccggtcttccccgcggccgcggccgggccggcgaggaagagggagccagcgacggccacaagggccgccaggggcagtagagtggttgctggtctattacttgcgaccgccattggtgtctcgttggttaattgctgctaccactactcgtcactactcttgcgtgtgcgtgtagcagcagtcacccatcacccattatatgcctttcatttggtgttcgtcttagacttgtcttgttttggatcgaatcgggaaagaggaggacagctcaccgagctagaaggacgtggacgtggtacatagcatggcggcgaatcgactatgcatgctgttgtgtttgaccgacgcacgacgcagtgtctcgt

SEQ ID NO: 31046 - DNA, 3958 bp, Zea Mays
tgtaatgtcaacattcgaaggtggacagtggacataacccttgccaaaattgttacagagaagagaagtaagtaagtaactagcatagcaacagcgtaaatagttaatagataaacacaggagtgagaaaaaaccagaaatggctctatgcatatatgtgtagcatattccaataaaccccttaacacaaggtgcagctgcttcgctgagtttggagaggcacaaactatatgctttgctatgcggctatgcccgggacttttggggacggaaaacaactagctggagctactgaaggaatagcaaggataaaaacatgctgatctacactcagattcatgtagcagcatagcaagcatccagaccaaatataaggtgagctaatacttctagggatcaggagtcatgttaatcacaatcagcacatcaactatgaacacgctgatctacacccagattcatgtaacgttaacctagctcgagaagcccaattatgcctaacctgttcgctgtggcacatcccaccttatacaaggaccaagctccaattatgcctaactgaatatcgcccaattaattaacaaatcgaatagacgcaaccatactgagggccagcagcagctagaagcaaagcaactagcagcttcgatgccagggtcaatcgactcaacgacagcgcctatggtccagttacgaacaggggcaagaagagaagaaccaacctggtgccagctctgcctcccgtcccagagagcacaggctgccggacgaggcccgcctatcctcatccaccgtgggggtcacgtactcacgagtctccacagatcctacaaaggcgcgaggtaagtcggagatacgcggcgccaacagagccgctgccgtaacagcagcagcatttgctcttcaccggcgagcgagcggcggcggagtagagaagggaaaggggacgacgacgacacggtgcctcccagtcccacctccgggttggactggtcactggacccgatccttcacctaatcaccttcactcgatcagtcgggctcgagcggcttcatttcactgacatgtgggtccctatccgcagctaggattctgggcccctgtggcagccagtggaagagttcctctcacttaacagcatctcttctctctcccacggttgcttccaggtcccaccacgtagggaggggattggagacgccgagctccaccggaggcgaaggcggaggcgcgtggcgcgccctcggactcctcgctgggggtaaactgcaaaaaaaatataggagtggactctggcgcattgctggaagagacacctccggctctggttgtacgagttggtggtcgtctctccagatccgatgctcttcctggtcgatggcgcgaaaccgtggtggctaaatcctttcttcccgcttgagtagacaacatcgcctttccctcgcaatgccaccgaaaagaggtgctgctggcacccgctgcaccacctctgctgcccatggcgccaccgagtttgccaccggcagccgatccgtcgcgggccaatccgccgcccagttcgtcgttgaagctgccacccagttggccgcccaagccaccaccccaaccatcgccctcgttcttagatatgcttcaaagtcttgtttttcaggacaaaatggaccttgcacctcagggtttgataacacagcaacaaaaggcaaatgagcgaaggccagttggtagctcacaaatttggacacggtatggtgttctgcttccaagccagcagactcgaaagctaaaagaatggattctgactgatgagcagcaacagcttgttaatgctagtggtcttggacatctggcacttaccactgggtttaccattgaccgttctttgctgacatctttttgtgaaagatggaataatgaaacaaatactgcacatttcatgggatttgagattgcgccttcacttcgtgatgtttcatatattcttggcattccagtgactggtcatgtggtgaccgcagagccaattggtgatgaagctgtgaagcggatgtgcttgcattatttaggagagagccctggaaatggagagcaactgtgtggcttaattaggctgacttggttgtataggaattttcatcaactacctgaacatccaaccatcaataagattgcatatagcacccgagcttaccttctataccttgttggttccaccttgtttcctgacaccatgaggggatttgtatccccaagatatctaccactgttggcagattttgggaagatccgtgagtatgcttggggggctgcagcccttgctcatttgtataggggattgtctgttgcagtaacacctaatgccacaacacagtttctcggcagtgcaactttgctcatggcctggatttatgagtatcttcctattactcaaccacaacagaagaaccagagcacattgctgccccgggcttgccggtggaactttggaggagcaacacgtggacagagaaaaaaagtcatggactggagaaaagtttttgagcaacttcaattttccgaggtcaactggaacccttacaaggacatgaatccagcaattgttccggaatattgcattgcagcagataacatctgctactctcgtacttggctaatcagctttaacataaaggaggcgtatgtgcctgacaggtttgctaggcagttcgggagggaacaaggacgcctccatggtgtgccaatgtggacaagaagaacttggagtaagtggaaagactggaggactgagtatgctcgtgagattgaggagttccatcaattggttggctgccatttcacccctcctgcggaaaccaatatcaactcctttccactacatgagtctagtgctggacagaatgatgcaggatgcagtctgaatatctctcataatttttctgcaatggttgaagatttgaaaaatgatctcccagtaattggtcgatatcttgagggaaacttgcttccttcagatgttgcaagcttcctagagagggtgagcacgatgatcaagagttataccccaccacagggcagccgaaggaaagatcgagtaagtcatggccccgctgacccagtcaggtcaaagaacccaagaaaaaggggaagacattcactctttcaagattcttttcctcatcggtatctaggcaccccggtaaacatagtgtttgatggcaccattcctctactaaatgggggtgaggcattgaaggaacaagtggccatggatccctggcgggtctcccagtcccatttgacgatgaccacatcttcttcatctctagactcaagctcaccagaatcaatgaagcggaggcgggaaggtggggatgaaattccaatcacaagggacactgattgcctccaaagtggaaggctctgtgtgcagctgaaaatgttcaagcacagagatggagtgaatgccgaggcagctaatccgattttccgctgacgaagacaaaacttcgcttggtcttcatattgtacaaagtagcaaagaaacatgacttgtttgctgcactgctgacagttagctggccaccaacaccgctctgcggtattgctgtctgcaatttgcgaggattttcctgtgtttatatcgttgtgaaacagttgcctctgtgaaatagatgccttttcagaagcgatagagttgtaactgtttatgacaattaacatggctattaaaggggcaagtcttttggcacagatagtgggaatggttgttctatcttttagggttagtttgggaactacgtttttccaagggatttctattttttcaagggaaaatgaactaattttccttggaaaaatgaaaatcccgtggaaaaatggggttcccaaactagcctttaatgataaggcatttcttcacgttttatattcgggagttagatcaatgtaaaatttaagctc

SEQ ID NO: 31047 - DNA, 1955 bp, Zea Mays
gtggtccggatcatctgtcacagcaaaggtgcaaagagtggcaattaattacaatggcattgccatacatttgtgttagtcatgcataaaacgtattggctatcggctctggacttctaaggataacctttgatcatttcgtttgctggacattggatcaactggtgctgttatacatagaaaggatttcattttaaattctcatctatatttggtggtgccataatcatttttccactagcgtttggcaataatgtcggagagcgagttagcagtaataaaaccagaggtgttgaagacatatatctggcttcagtgctttgatggttccatacaacaagtggaggaggaggttgcaatgttctgccccatgatatgtcaggaaattgtgaaaaatggcacagggtcatcaaaaaatcatgctattgctctcccggaaagagttaatccagccaatttgagtttgattcttgactactgtcgatttcatcagatcactgggcgttcaaacatggagcggaagtcctttgatgaaaagtttgttaggatagaaacagaaagactctgcgaattgacttctgcagccgacagtctacagttaaagccacttgttgatcttactggccgagcgcttgctcgaatcattgaaggaaagacacctgaggaaattcgtgacattttccatttaccagatgatttaacagaggaagagaaattggagcccctaaaaaatataaatgatggtcctgctaggattcgcctactgaaccggttgtatgccaagaagcggaaagagctccaggagcgccataagctgaaggatgttcaagtacagaaagagcaaaaagatgagagatctttggatgagttacttagttttattaatggggatggaggttcaggaggcaggaaagctaccaagagtaagaaaaagaataaaaggaaggatcatgttgagaaccccccaaaagctgactctgagcctgtaaatgcgaatccagatatgcaagatgatgccgagtacccttttgaagatgctgacctcgatgatggacttgatcctgcaatgaaagaagagcttgataggtttgtttttaacatgcagagaagttgaggcctttgcgaagaggttggattcagtttggaaggagtcacatattggtggtaatggttctgcacggagatttcctgggtttaatcacatgtgagtgttaagctggtaggatcagaaggcagaagcagaggagatttgtggacatacagcctggaagagagtaaaaataccaaacagtcgacttgctcctgtgtgtttgataagggcatgtacaaccctgaaatcatggatcggttttgcgaagtacaaaagacatgttaagagactgtataccctgagcctttggatcataaatgtaagtaagaggcaatgtgtgtagaattgtgtagagacagtctcttcgcggaaagagagcctgtctattgtatttttttcaattaaccctcaagagacttcatattgaaagaggttatacatgtcagagccaagcatgcagacatgctattttgttggggaggaggctgcctagttgggatgaagcttagcatggttcaaggaaaaagtgtagttttttttctttggaaagggaggattagaggtctgtcttgtctgtgttgccagggaggaggctgcctagttgggatgaagcttataatgcagtatatagtgtaaaacagtgttttgaatgactatatggctgaactgttggacacagtttgtatcaatgaaatttcgttgattcactgtattgtggtggtgcacataaaaaatgtcctttttttggctgaccttacgtgggttggaatatactataagcacgtgttcttatttataattaagttaaacaacattttatcgtatatatcaataataatagaattggatagatgaatgatagaag

SEQ ID NO: 31048 - DNA, 918 bp, Zea Mays
ccttccagttcccacgaaaaaggaaaaaagaaaactcaagagcccaggcttatctagaaacctcgctaaccctcgaggcctcgagtagctatgaagcagcgaggcgacgacggtgccgacggcgcagctgctttcgccggctgcctggattgcaggtcctccgaccattgctttttgcggtaaagagaccctttccatactatccttcgcttttcgattgtgtcgatgttgtagctttcgtgccggcagggaggcaacgccgccgccgccgccgacagtgacgacgctgctgccgccttcggtttctaactccttcgatcatcgcttttctgagttgtttgtgttttggaatcaaggtgcacatttgcatgaattggatcttttagcgaccagaccatatagttgtgtacaaccaaatatcatttgtggatttagagaaagaactcttcatgaagtcattcatagcatcatatggaagaaatgtcattgccatcacccagatgaaacattccactatctgtcaactccaacaaaactattgtctagaccaaaacaatcattctccaaattaacaggatagtcctggagatgaaggccaggacctaccgtcgtttgagtcaccataaaaaagaagcaacattcgattggttggttggctaacggacccagcgcattgtccaaagctcaaccgcagcatggcgggaggcagctcatgcacatcagccagtcaccgatcgagcatcggcttgcggtaccggatagagcaagtgatacatttggcggatagatagccagcttttgtctaatactatagtttacaatgttgtatctaaacactatttatcaaaaccatggtatgtttggagctaccaaaactacggtattatcatagcaattgcaaagtataatattataaaa

SEQ ID NO: 31049 - DNA, 1321 bp, Zea Mays
ataaacaactagtatagtgtttacttatctttttgccatgtaaactggaaagggatctaggacgtcgtttggtctctctgctgccttcttcctccttcctccacccctgccttgctcaaagtagtcagtcgtcatcgtctcctccgatcgcctccagttcattccagttagcgccgctgatcccctccctaatcaccatccatccatccggtaggattccccagccatgtcggcgaccgcggtgaagtttcccgtggaggcgccggagatattgaacatgtggagatgcagagtggtgatgagtggtctcaaattgcatatgtcactttcaaagatgcacaaggcgcagaaactgcacttcttctttcgggtgccacaatagttgatctttctgtgatcattggacctgctccagagtatcagccaccccctattgcctctgctccaccaatgagtggaaccagagttccagttggtggagacaacaacgttgtccacaaggccgaggatgttgtgagcactatgcttgccaagggtttcgtgctaggaaaagacgcggttggcaaggccaaagcgttcgatgagaagcacggcttcacatccacagccggtgctaaggtggcctccatcgacaagaagattgggctgagcaataagattaccacaggcacttcgttggtcagcgggaaggtgaaggagatggaccagaagttccaggtctctgacaagacaaagtcagcgttcgcggctgccgagcagaaggtgagcagtgccgggtccgccatcatgaagaacaggtacgtcttcaccggcgcgtcgtgggtcaccggcgcgttcaacaaggtcgccaaggctgccacggacgtcgggacaatgaccaaggagaagatggcggccgaggagcagcagaagggtttctctggcccatcgtctaggagccactcgtacacgcccatccgatgattcgttggctttctgttatgcgccctccctcagacagacaatgttgtattgtattacacataacacattggtggatgtaagacatagatagctatatatagaacagatcatcaggccccctcgcaccacttgttcaccgttccatgttctgttaaatttcgtactgcagggatttgtttctttaggacaagcaagtatggtggtgataccaatctgttggtttttacaaatccatgttcagactgtttgtggtttgaatgaacattttgtagaagtggtgggaagttaactggataatatgatgttgctgaaacaacatgctatcactatttgcagttatttggaatgcttcttgttt

SEQ ID NO: 31050 - DNA, 1284 bp, Zea Mays
actgcttcagcagatcactctagctgcagaagaacaagcaaaggttgctaatgagaacctgtccacactatctgctactgtaaaatccaaacaggaactagcatatgaattcctcggtaatttattgatggagactcaaggaataaatgtggagatggatcagtggagaaactcggttgacagtgctctttcttttattgatgaactctttcagaatctctgcatcatggcacaaggcattcgtgaagtaaatcactctgctcatgaagatagtgcacggtcctgttctgtgatcagggactatgaaaaactatcaacctgtttgatggacaaagtttacaaacttgaattggagaagaaactattggaggaacagtcccaagaccaacaaaatgagatttataagctgaaggccaatctggaaagctgtgagaaggccatagatgttcgtcactggactgtactcttcaacatgaattggagaaggatgccattcttttagagctcctaaacctccagaaggaagtatctatcttgtcatcatcttctttgatgaaagaaaaggaatctatccgaaaggaacttgatagaactaaatcaaagttaagagagacggaggacaaacttaagaattccattcaggagaaaacaaaacttcagagtgagaaagcagaggcccacaaagaaattaagaaattgcaaagccagagaactttgcttgaacgtgatttacggaaacgtgattcagctactgttgacaaaaggcatgaactgaattccatgccacaggaaagttctggtgcttttggtcacatgcaggagaactaccaaaatcttgagatgcatgcttttgatatggatgctgaaatttattctttacaagaagctcttgtcacttcaattgatgaaaaggatgaagcgttgtctaaagtagggcttataacatctgaactagaagatcttgcgaataaactgaacttagcagaatcagaaaggaactcctttagcaacgagatcacactcttgactgaaaagttaattgcatctgaatcttcccttaaaagtttggagacttctctcaattctgtatcaagggaaaaggaagatttgggaatgcaacttactgatgcccttttggacatggaatctgaaagatcaatttggacagcaaaggagaaagaatatgtagaagctaatcatagattgaacatctgccttgatgagaaccacaaactttcagaagatttgatgaagtgtataaatggattgcctaccttctcttaa

SEQ ID NO: 31051 - DNA, 1039 bp, Zea Mays
tagttcaatcaacctttgtcataattgatcaggaaaatttctctgaagttgcatgcttctgaggtttgaaagcgtgctacacacgaattcctcagaaccttcctagcgactcgtgctttgtcataacaaaaaaagaactgagaacatcagaaagaaacggacttggctgcattctaccatgaggagtgacaaggttcacatcgtacccacaccgcttcaccacatccatcgcaaagcccgaatggggggcggtcgtcaagacggagaccgacgcgttccaagaccagtactaccctgccgtccacctcaacggcgccggcgccggcgccctcttccacgacaaggaccggaagcacctcccattcctgaccaaccacaacaatggatgccagccattcaccgtcaccacgacggcttcctcagagagcagcagcaagcacagcaacggcaactgtgctctctctcttctgtcagacaacccgacaccagcacaggcacagacggccacgatccctaccgcgcagcccctcgtcgccacggcatcgcagtacggcaggctccctggcggcgacgacgacgacgtctccctcgccgggatgtcgtacatgagggtgggagacagccggcaggcttccaatctgacaacgtcctcacccggtcctgccactgcagctgcaacacagcagcacctgcagtaccaccatggctactactaccatgtgagcggtggcgagcagggcaacaacagcccagatggcgccgccattcaggccctccccttctcgtcgtggtagacgcgcgactttctgatgaagatcatgtgctaggataggcaggcagtcgctcttgttgttcaccaaacacatgggttgtaacactaggctcggtcatactgaaaaaccatgacaaaaaatgtccatttttcagcttgttctgataggtctaatctatggaaaattcttccctaagttactatgtgattcagaatcgtgtaaaaatgcccactttcagttgcccacacggatgagcttgtgcaggc

SEQ ID NO: 31052 - DNA, 334 bp, Zea Mays
tcgagctttttggtcgtgctctcggtgaatattactcggctagcttcgtcttcacccgacgcacagaacgacgacaggattatgtctgaagcgagctgacgaggtgggtttgagcagaggatgacaggtttgacgactcgacgctaaacgtgaacccgtcagaacccgatggatgaggagtgagcgcatgcggcgcaaacaggacgcagccaacaggggagcttcgatggcgagcaactaagaacggctcgactacgacgaacagacagctcgcgaccagcgggaggggctcaacacgcaaccaaggaatggagcaaaggaagctccgaaacag

SEQ ID NO: 31053 - DNA, 470 bp, Zea Mays
agttaagtttctaatgaactatcataccgttcttaatagtgaaacctccatgatagcttgatggtaaaatgcaggctggttttttatcaccttcacagcaacatagtcgttagtttctgtgtcccagcatttaactacttgaccaaaagttccctgcccaagcatttccttgacaataaacctaagtacaataataacaaggtacagttcaatatcatgaaacaagcaaatatggcacagctaaaaccaagtaaaaaaagaataaccttctgttcgacatcttattaaccaactccaagttgacatacaatatgagatcccaatttgcattgtcaagcccatcgttgtgggctggggtagagggattcgtgaggaaacgttttggatttagaacctctgagtacttaaactcgggatcacattgtagatatgtctgaatgatgcctgctgttaatctcgcaacagactgc

SEQ ID NO: 31054 - DNA, 1531 bp, Zea Mays
cacaggcacacagccgccactgctcagctctccatgtcgtgccctccgaattcccaaatcctatggcggtggcgcctttgcccccaaccccgcgaggtcgtgagtccgtgactcatcttcctcctctttgccgggctgcacgtggagtggagatccaccagaccacacatgatcgcattgcccccaatccagtatgtaatctgtaaccctagctttgcttaccgggctgcggcacccactaccggacggacgggcgcacgcactgctgggctgcaacacccaatgcacggacgcacgcaccagcaccacgcactgcatccacatccacagattggccggtagaaactgtgatctgctctaatggctagtgaaggcgaagcttcacctccacgaaagcatatgttgttggagttgcctagtgaacatcaaagtcagaacttgacatcctcacctcatgcaaatacaagtcaacattttggtgtgtccgcatcatcgtcaacacctgctgcaacatctcatgaacaaggtgcaaatccagaagaaggaattaattaggatgaggatgattcttcaaagttgaagcaagcaaagaagtccacttcaaatgtttggcagtattttaagaagtatgaggttgtcgtagaggagaatggtaaatctgtgaagcaagtttgggccaaatgcaagtattctggttgcaaaaacaagactagcaaagctagggttaaaaatagtagaggaacaactgcattttggtctcatttgaaaaattatcatacgattgtgaaggggcaacaatagctcaaggcagaaaaggatcatggcacagatatatgcattgtccagccatataaatatgatgaataaaccagtttgagaaagttttatacagctattatcatgcatgagtatccatttaacattgttgagcatagacactttgtggaattcattaaatcattgaagcctacctttcctatgaagtcatgtgtcactattagaaaagaaataatggaactctacttgcatgaaaaggatgtgttgtatgatgattgggaaatacagaagagaattatcaatttcctccatgttccgagtcggcatagtggttccaaggctaagagtgttgctattcctaatatggtttgtgaaatggaggaacttgaggctcttgctagaaatctttcacttgaggatgaagacctagatgatgatcatgatgatggacctaaggcatcgttgtaagcttgttgacgaagacctagatgatgataatgcaacatgaatgctccgaatgtttttattgaacttgttgcgtaatgctttatgaccttgcgaacttgggacttatggacttgtggctttgtgaactttgtgatctatgtgatcaacttgttattgtgaacttgtgatcaacttgttattttttgaacttgtgatctgtgtgatgaacttgttatattgtgaacttgtgatctgtgtgatccacttattatattgtgaacttgtgatctgtgtgatgaacttgtta

SEQ ID NO: 31055 - DNA, 2142 bp, Zea Mays
gtctggtccagttgaacggccacctgggccgtcagactcgccgcgcggcgcggccccgaccacatcgccgattcctcgtttcctccgcacccgcacgcttcccacccgctgccccgcgcccagccgtcgccgtgatcgccagagcgttcctctgccgagccgttcggccggtccactcccgcgaagcttccagtagaggcgaccttcggatcgagtctcggccgccgaggagtcgaaggccatggaagtggtggcgtcggcgccggggaaggtgctcatcgcgggaggatacctcgtgctggagcgccccaacgccggcctagtcctcagcaccaccgcccgcttctacgccgtcgtccgccccctccgcgacagcctccccgccgacgcttgggcctgggcgtggacggatgtcaaagtgacttcccctcagctctcacgggaggccacatacaagctgtccctaacgaagtcgacgctgcaattgacgtctgcgagggaatctacaaacccttttgtggagcaggccatacaattctcggtagcagctgctaaagcgaccattattgataaggagaggaaggatgtagtagataagttgctgctgcaaggtctgaacattacaattcttggatgcaatgatttctattcttatagaaagcagattgaagcacgcggtctccctcttactccagaggcactgctttcattgcctccattctcttcaatcacatttaactcagaggttgctaatggaacaatgactggagagaaatgtaaacctgaagtagccaaaactggacttgggtcatcagctgccatgaccacatcagttgttgcagctcttcttcactatcttggtgtcgttagcctctcatgtccaggacaatcttctggtgataatacaactacacgagaacttgacttggttcactctattgcccaaagtgcacattgtatagcacaggggaaaattggcagtggttttgatgttagtgctgctgtctatgggagtcaacgctatgtaaggttttctccagaaatactctcgtctcaggctacaggtgggactttcctcccagatgtagtatcagatattgttacacaaaggtgggatcatgagaataaacagttctcattacctcctctgatgacccttctccttggggaacctggaaccggaggatcatctactccatcaatggttggatctgtgaaacggtggcagaagtctgactctgagaaatgcaaagatacatggagtaaactggcctttgccaattcagcgctggagaaccaactgcgaatcttaaaaggactttctgaaaatcaccgagaggcatatgagtcggtagtgctatcctgtagccatctcacttatgagaagtggacagaggtggctactaaccaacatcaagaattaattattaaatcattgttggctgcaagggatgcttgccttgagataaggcttcacatgcgagagatgggcatagcagccggtgttccgattgagccagattcacaaacacggctacttgacgccactatgaatatggagggtgttttacttgctggagttccgggagctggtggcttcgatgcagtattctcagtgactttgggggatgcaagtaatgctgtagcaaatgcttggagctctgctggcgttctgccacttctcgttcgagaagactgccgtggtgtctcattggaagatgctgacccaagaacaagggaggcaaaataagctgcacgagatgaggcggaggagatgatggttgaagtcacatttcgaatttcgaatgtgggaggaaaagaccctgggccattggagagtcagggctcgtattcgcccgttgtagggaccacctcattggggatggtagctatgagaggccctctctctctcttgtcctgttggacgagttgacgtgcatctagggaggtgccctcgtatcaccacttggactggtctctcatgcatttagagttttagggttcaggatttagggagatgccctcgagacttgttgcagggatgtgctcgtgtcatgtagcggcatagacatgcgttgacttgtgccaggctcacgttgcacatggagctctctgtctgtctgctgcatcacagcgtgctca

SEQ ID NO: 31056 - DNA, 4034 bp, Zea Mays
gtcccatcagacatacggtaaaaaacagtcggtattttgctaaagtaaagtcccttccaccttacacgtgcgcagtgcgtccactgtcgtgggccctagaagacgaatcgctcctgtcacgctgtctgctcccacaggcaacagccacgtcttccgcgccgcagtgtccgatcgatcgatcccttctaggggaggggaattcaggacaggaggaggccaggttctcgccccgcaataggacgccgatcgattccggatcttagctcgagagcccggtgcccccttctcggtgctcgttgcaggattttcggccaggtatttaggaggaagacctgatttgtccttcagctaacagtcaacactgaaggttcacttgggcaagcaatataatttttccttctattctagggtagtccaaagaaataagaaacatgccagagacttatgttgatgagcaaccaaagggtgtgtctcggaatcgtccacctgcacatatgaatggtgatgaagaaaaggtttatcctggccaactcccagtgttgacctgggaacataagctaacccatgttagacatgatttgccgccattcagacttacatggagagagataatgcagctggctggtattggtttacgtcttagtcgacatatccttgaggaaacttcaaaagggcgaattgctgttattgatcctatgaaaaagcgggctgcaagatctggtcagggtgtcccacttggtggtattggtgcaggaagtattggaagaagctacaaaggcgatttccaacgttggcaattgtttccaggatcttgtgaagataatgctgtattggcaaatcaattttctgccttcatttcccgccaagatggtaaaaaatattccacagtgttgcatcctgggaaaccagatttgccgaaaggaagtgacatttcaggaattggatcctgggactggaatatgagtggacaacaatctacttaccatgccctttaccctagggcttggacagtatatgatggagaacctgatcctgagctcaatatagtgtgccgtcagatatctccaattattccacacaattatcaacagagcagctatccagttgcagtgttcacttttaccgtaacaaactcaggacatacagctgctgatgtgactttgctttttacatgggctaactctgttggtggaaaatctgaactcaccggatatcattccaactccagtatgatagaaaaggatggtgttcatggcatactattacatcacagaacagcagatggtcaaccacatgtaacttttgtgatagcagcacaggagaaagaggatatccttatatctgaatgtccttactttgtgatatctgggagctccgcatctgatgaattcacagctaaagatatgtggaattctgtgaaagagcatggatcttttgatcatcttgatcccatcaagacatcgatgtgctccagaccaggatcatcaataggggcagctatcgctgcttcagttaagctggctcccaaggcaacccaggatatttcattttcacttgcatgggcttgtcctgaagtgaagttctctagtgggaaaacctatcataggcgttacaccaaattttatggcacagacggtgatgcagcagcagcccttgctcacgatgccattcttgagcatgcttcctgggagagacaaattgaggagtggcaggatcctattttgcaagatgagaggtttcctgcttggtatccagttacacttttcaatgaactatactatcttaatgctggaggaactatatggacaggtatgcatccatagtttcttgttttccctctaaatgatgacaattacttttcctgagaattaactcagagatattatcagatggattaccaccaattcaaagcttgacagcagttggctggaaaaagttttctcttgacatgttaaatggtgaatctgatgatttcaatgagatggttcgacagaataatactgcttctgatattcttcatcgaatggcatcagtatttgagaggatgcatgcatctattgcatcaaattctgctataggaacaactttgcttcagggtgaagagaacattggccagtttctatacctcgagggcatcgagtattatatgtggaacacatatgatgttcatttttatgcatcattttcactgatcatgttgtttccaaagcttcaactcagcgtccagagagactttgctgctgctgttatgatgcatgatcctgaaaagctgaggatcttgcatgatggaaaatgggctgcaagaaaagttctcggtgctgttcctcatgatcttggattatatgacccatggttcaaggtcaatgcgtacactctctataatacagatcggtggaaagatttgaatccgaagtttgtgctgcaagtttatagagatgtggtggccacaggcgacaaatcctttgctcgagctgtttggccatcagtttatatagcaatggcatatatggagcaatttgataaggataaagatgggatgatagaaaatgaggatttcccagatcaaacatatgacgtgtggtcaatggctggtataagtgcatactgtggtggtctttgggtggctgctcttcaggcagcatcggccttggcacgtgaggttggtgacaaagcttctgaaaagcttttttgggacaaatatgagaaggccaagtttgtctatagcaagctgtggaatggttcttacttcagttatgatgatggcgacaacaaaatgagcacatctatccaagcagatcaattggctggacaatggtatgccaaagcctgtggtctcttcccaattgttgacaaagacaaggcacaaagtgcgctagagaaggtatattctttcaatgtgatgaagttcaagggtggtacaaggggagccatgaatgggatgtggccagatggcactgtggacatgtctgcaatgcaatctagggagatatggccaggggtgacatatgcactagctgcaagcatgattcaggaaggcatggttgagcagggatttaaaacagctgaaggggtctatcatgctgcctggtcaccaggaggacttggatactcattccaaacccctgaagcctggaacaacgacgacgagtacaggtccctgtgctacatgcgcccgctcgccatatgggcaatgcaatgggcactgtcgaagccgaagctccacaacactccacaggcagatataccccaggactcattccccaagaaccagttcgcctacgcgcggatcacaaagctcctgcagctgcctgaagacgaatcgtccaaaagcttcgtccgggtggtgtacgagatcatccggaacagatgatgcccttggtcgccgacgaggtgagctcgctgggacgtgagcgcgtgtcgccgtggatctcaagcaagacgcgagatagagtcggtaagcagtttcttcttatttcttatctcaatctgttcagcgattacatcctttatactctgattatgggctggacaactcctaggcccaacagtattctgggtcattaacggcccacacacccacaagccaacatggctgctactccacacctcggattactagacctcccggcacactgccagctcgagtttcttcgtgatcttcagacttcagccgtcacatgtgccccctctgtcaaacatgcttgtccccaagcaagcgattgtggaaaacattgctgaatcacatactatgtgattgttaccgtagaagtcgagccaggtccgtatgagtctggccagtattagtagaaccaaggtgagttcgtgcaaacacttttgtttggttgtgtttatagacttgtgtagatcagacatagatttagtttggttggttgcactgaaatgtgtattagtgcaaacacttttgtttggttgtgtttgtagactcgtgtagatcagacatagatttagtttggttggttgcactgaaatgtgtattagtaaagagtgtataaataaatctttatatatttatc

SEQ ID NO: 31057 - DNA, 1326 bp, Zea Mays
cactaaccgtgaactgatttttctgaatggtatatgtataacactggagcatagaagtgataaaatgttaggtatccagaccgtattaccttaatacgaggaaaccatgagagcagacagatcacacaggtttatggattctatgatgagtgccttcgcaaatatggctcagtcaatgtctggagatattgcactgatatattcgactatttaagctctatctgttttttcagtttgtctgcacttattgagaacaaaatatttagtgtccatggaggcctttctcctgctatcacgacactggatcagataagagtaatagaccgcaagcaagaagtacctcatgatggggctatgtgtgaccttctatggtctgatccagaggacactgtagatggttggggactaagtcctcggggtgcaggattcctctttggtggaaatgtggtctcatcatttaaccattcaaacaacatagattacatttgtcgtgcacatcaacttgtcatggaagggtataaatggatgttcaatagcaagattgtaactgtatggtctgctcctaattactgctacaggtgtggcaatattgctgcaatcctagagctggatgagaacctgaataagcagttccgcgtatttgaagctgctccacatgaatcaagaggtgttcctgctaagaggccagcaccagattactttctgtgatgctacacagcgaacgcttgagcttactgtgctttcaagcgctggacctcatgttgcaagaagagctcaggccctacagctttccagccaggaggtggttttcaggatgtgtaaattgagtgtcatcttctcccttcaggtccatgatttgtaagagagttggattttggcatccagttttttcacagaacatcacccatttgagctggagaaatacgcccttgcgaaggggtttcatgtgatgtgctaaaagtacacgttgtaagatttttttgcgattgcataccccctagaaaaaccgttcctggaatatgtggcaatcaggaaatgtgtcgatgctctggaaagtgtaggagatttttgtagtagtcatttgcgcgtgctgttagggactagggagcatgtggtcaggggacactagcactagcttgtcggcatgcaatggtgtattgtaactgtctttatgcagcatctctaattcaaatagctaactacatttgatgtcttcttctgagctgtcgtgttcatataaattcgttttattggatataaaatatatgatttaataatgacacttagatgttcacaaaatccatcgtcgtatgctcttctgtgtag

SEQ ID NO: 31058 - DNA, 1155 bp, Zea Mays
ctgggtaggaaagggaatggaaccttgagaagtgggtgccgcagtcgcatcggtactcgcgcgtgccgcagaccttggagtgcgccttccagtcggagtgcacagcgtagcgcttggcgcagcggtcgcacttccacttcttctcgccgtgcttgcggctgaagtgcttcttgatgccggtgaggtcgccgagcgcgcgcgcggggtcgtggtgcacgcagccgggctccgggcacacgtacgccttcttgcgcaccgcctccttggggttgcgctgcttgagcttccacggcaggttgtggccgcgccggtgcagctgcaggttctggtcgcgctggaaccccttgccgcacacctcgcacacgtagcggttcgtcgccatcagcgtccgcggcgacagcgcgatgacctccgcgtccgggtctgcgcgcgcggcgcggcccgccgatggatggatagacagcaaattccggtgagcacatcgatccgtttcattccatgcgccgatcgatgcatataggtgcatgaaaacttaattactcaacgtctcaaccgatcgataagatagatcgggatgcggctgacctgggttcccggggaggctgcgcttcttcttggcgggaggcggggcggggtgggacgagacgctggcctgcaggtcgcctgaagcggaggtcaggttagacatgttttcgtcggcagccagttgctgctgctggtgctgaattgctgccaaatccttgagcatcatctcttcgatcgatcgatccagctgccttagcttttgctcctttcctggcgatgctcacctataccagctagctgcttgcttctgcggatgactttgggtggtgcagtggtggatcagatcagcttgcgcgggcgcatgcaggcggctgggtgtcagaactccgaactgaggcgcaacaggcgccagcggcagaaggacgagatctcaccgtcgggcggggctctgggcgacccgatcatgtgcagtggtgcgtggtgggtgcttgcagttgcacccagatcagctagtgcgcctgtcctgttagaattataggcattttctgtattattttaattccataaattaacattatgatgatgacatataataaatgattaaccatagaaatcgtgatcttaaattga

SEQ ID NO: 31059 - DNA, 466 bp, Zea Mays
ctcaaagtatcaaacagcattacagcagagtagcaatcaccttgagtagcacctcaaacgaaactaatgcaaactctactcaaagtctcaaacacaaacgaatgcaaactgcactcaaagtctcaaaccatgacgtgggcgatcagcaaactgaatgcttgatccatggtgtactacttctgtactgcactcaaatcaaagcttgatcagggacagggatcacggtacctttagatgaggtgctcatcttcctcaggtcttgatcatagaggagtcgccgaagttgttcagattgaagttgccggtgtttcttgatcagggaggcgccagcgccaccggagttggtcagggaggaggagcagccggcttttttcttagggaggaggaatggaggaaacgccaggaaacaaaagaagcagcagccggccagccaggaagtagaagagagagagatgaaataaggaaa

SEQ ID NO: 31060 - DNA, 1013 bp, Zea Mays
gacgacacccgcgagccgagacagccacccagttgctcaagtgattccaggcccacgccacgccaaccccgggctcaactcgagtccacacgccccagcaccacccctgcctctcagtccagtcccccacccaccaccaccactcctcccctcgccgccgcccgttcccgaccgatccggccggatcgccccgccatggaccagtacgagaaggtggagaagatcggggagggcacgtacggggtggtgtacaagggcaaggaccgccacaccaacgagacgatcgcgctcaagaagatccgcctcgagcaggaggacgagggcgtcccctccaccgccatccgcgagatctccctcctcaaggagatgcagcaccgcaacatcgtcaggctgcaggacgtcgtgcacaacgacaagtgcatctacctcgtcttcgagtacctcgacctcgacctcaagaagcacatggactcctccacggacttcaagaaccaccgcatagtcaaatccttcctctaccagattctgcggggcatcgcctactgccactcgcaccgcgtgctccaccgcgacctgaagccgcagaacctgctgattgaccgccgcaacaacctcttgaagctcgcggactttggactggcgagggcgttcggcatccctgtccggacgttcactcatgaggtggtgacgctttggtatagagcgcctgaaatccttctcggtgcaaggcattattccacccctgttgatgtgtggtcagttggttgcattttcgctgaaatggtgaaccagaaggcgctttttcctggcgactctgagatcgatgagctgtttaagattttcagaattttgggcactccaactaaagaaacatggccaggcgttgcttcgttgcctgattacaagtcaactttcccaaagtggccacctgtggatcttgcaacggtggtcccgacactcgaaccgtcgggaatcgatctcctatctatggcacggctaggggtggtaatgga

SEQ ID NO: 31061 - DNA, 1050 bp, Zea Mays
ctccgtgattgccgctcgtcgatggctacaaggccagtcgactgcgtttcccccgcctatcgatccggatacaccaccactcgacgcagaaaaagccgaggaccgccatagccatagaactcgaaccagggggagggcaccgcggtcatcccctccactcgacgctcgtcggccacctcgggcgaagccatgcgcccccaccaagcatccaagacagagtgttgtcgctgtcggtcagagacgacgaagggactcagctgtgagcggaagattgggcgccgccgcgggaccccgcctaggttgccgttcgggcctcggatctgggcctgggagcttcaccctgcggtgcgtgactcagccgtggcctcgttgtgggtagagctcttggaattgctcaccatggatacgtcgtcgccgcggatccacctgttgccgcggccctgcttctctgctgccccattactggaacaacaagatcttagatcttcaaacaagaggtggccttagttcagacttcagagctgcaaattcatcttccttttttgaactggaagtgttgtcttaccgcgccaaagggagctactaaccaaggtttcaggaatggataaactatatttctagaagtgggtgcaaaccatccgcgagtttctaaaaaaacaataattcgataacggatggacattttccaagatctcacgtcccgtgctacattccaatttccaagccaggaggcagctgcatagccttggagacggtctgtttcggcctgtttcggtgccttggagacggcctccttcagatgacacctttatgcgggctttccaagtccgctatgtcccggtcgtttccgttgcaaaatagctataattagaggcacatatataccccaacctgcttgtttattattggtaatcttattgttatatatacagtttgaggacagagaaatcccatcttcttacgatctggatcaaaaaaactactatgcataacctgccatccaatatatatgtaacgacactgtgtgtgactctcttttttcagagatca

SEQ ID NO: 31062 - DNA, 2734 bp, Zea Mays
gcgggtgtgctctctgggctgcaaaattccggactgggctacggcccgtccgccgcacggccctttctgtccacggttcaccacttcaccgccccgcaacccgcagcgttctgtctccgacgactccgccgcccccgtcgtacgccaggtgcggaggcctttgctggtctcttcgccggcgacgaacacccaccagcagctgctgtagatgtgcacattcatctccctttactgggtccgcccctggagcatatcatttgactgccgtggccacaactgcgctagttttgctttgatcatccggccttaataatccagcagatatctggtatatagattaacatattcagtacctgagatcttccttcaactagcaaagggaattgggattccactccccagtcctcatcaacagagcgaagtagtgcaatattattcaggaaagatggttgccagctgccctagtttgaccggagagatcaaatatgaagtggctagcagttatttggttggtatggtgattagtgtatatgccaagcttttacagataggcaagaattgacagtagcaaattcttgactagctccgccacctacaggaaaatctagaagaataaaagaaagtcagagatggcgatgtttcttggttgctgtcattagctgccgcttgacacctcggcgacgaaaaaggagccgtccactcactgagccttttgtccccctggacatgcaggtgagtggcatgtaaccaacctgaatgacaggaggatcattgtggtggcaacgccaggaggcagttggatattcaagatcatgacatgaaagactttgggaaggggagagggcaatctccatggatcaaggtgtctgcacatgatccaagcgcacaactgctcaaagcacacaagagatcgtgttgtgtgttgtgtttttgggccgtaccaggaccagagcgggcccctatagctatagctatagcagcaatgagctgggtcgtactctctccacgacaacactgaaccgtccgtgtgcgttcctgttgccgtactgaaatccacagagaggatagctgggctctgatccgggatttatgtcaggcccattggggaggtcatgtgactcagcaggtcagtgcgtttccgctcaccagctaccattgcgagatcagtaggatgtgtcactctctctctgctgctcttttggattcttggcgaggtttcagattctctccagtacccacttgcattgcagctctgatggtcgccaggtaccaagagcacgcctctgcgtaatccactgtgctaataggcacctttgaattgatgcatgcatgatctatctgctgccagtttgctccatcggcaccagcagcaacagctcgtcacgtcacacatgactaggcatatgtattgcaacagccttgttcagttcaccgcagtgagatgtactgatcccccctcacagctgaaatcctgcacacagcaaggcgatcctccggccaccgccgccaaagctctgtggctccccaggtggccctcctctgacatctcccaggatcaagctcagggacggaaggtaccttgcgtacaaagaggatggagtacagagagacaaggccaggtacaagatcatcacagtgcacgcatttgatagcaccaaggacttcccctcgcctgtttctaaggagctcgtggaaggactgggaatttacctccttgcttatgacagagctggatatggggaaagtgaccccaatcccaaccggcatgtcaagagcgaggcgctagatatcgaggagcttgccgaccagctgggccttggccacaagttctatgtgctaggggcctcaatgggaggatactcggtttggggatgcctccagtatatacctcacaggcttgcaggagctgcgctggttgtgccaattatcaactactggtggccttcgttcccagctgaattatccaagcaggccttcaacagactgattgtgccagagcagagaactctttggattgcacacaacataccttccttgctttacctgtggatgacccagaggtggttcccttcttctgcagcagccatgcaccaccctgaaatatttagcaagcatgacatggaggttcttcagaagatgatggcaatgccaagaaccattgagaacaaatcaaggcagcaaggcatttatgaatcgatccaccgtgatttacttgtcgcttttggaacttgggagttcgatccaatgaatgtcaccaatccatttcctcaaaatgagggctctgtgcacatctggcaaggacgcgaagataggttggtgcttgttgagctgcagaggtacattgccaagaagcttccgtggatcaagtatcatgaagtcccagaaggtggacacatgttcgtgatggtagatggatggacagaccgaattctcaaggcactcttgttaggagaagagcccctagatgtgtgacagtagttccattttcaaaatgtcaaaaactgcagctgccagctgttattttacttaattttattcccaatttgtacacttgtattcctacaacaccaagactagtctaattcataatccgatagactttccatcatgtcaactcattacaacagcagtgataccattgtactcatcccatacgcatatgcctttggtccaaaattgatgtcaacccagaaagcacgtagtcaaaacattcaaattggagagaggggtgttt

SEQ ID NO: 31063 - DNA, 3370 bp, Zea Mays
gacaactttactacccgtctcgcgcgagcggaacacattccgcttgtcctctctcgccgctgctccgacgagctcgccggcgccgactcccctcccgtcggaccagcccgccgaaagcggccggacgaacgagaggcttccctcccctcgcacttgcctgcctcgtcgccttcctgagcctctttctgcgcccggccacgggctcgcggccccacgcccgagcacgtgcagcaggcgccgaacccgcctcctgtgccaccccatcggagctcgccggccacgtggagggattccttttcctcgcagcattcctcgtcgccgacggcttcgtcgtgctccaggggttggattggcgtggagcggagagcagtgcaaacctgggattgaattctggtgtagatggattccacagctcttcaatatgaaaaccaaaaattggtgcaacaactggaggtacagaagtccgaaatgcatgcattggagcgcaagttcaaggagcttagtgatgatcaatgttcttatgacaagactctgatttctttgaataaactgtggaatcagctgattgatgatttggttctgcttggagtacgggctggtggggatttggataatttgcaagcacttgaccatgaagagttatcagaagaatctttggagtcgtgtccttccgaggagatatttctcttaaggctcttgaagacaaacaacatcagagataatagtgacactagcttgttgaaatttgttgaagaagctcttgcttttcggtcttcagcaactgttactttgatgaagtccctgcaagagactatttcttcgcagcaagctagaagtgagtctttgtctttagctttgaatggacaaaagtcaaatgaagatgttattgttgcccttcgaaatcataatgattgcttgaaagaggtggcagagaatgcgagtcaagccatctctattatcaacgagaagcacaaaaggtatcttgatgagattgaggcttttaaaagcaaccattcaagggagctacaggaaatcaagcgtatttcaggtgagctagaggaaagcattgcagagcttgaggaaagtcaaaggaagttggttgtgctccagttgcagaggcatggttctgtaatggatgcatctggggcaaatgctgtgaatggtggtatttctactcataaatcttcagataaaagtatgagctggcaagacctcaaagatgctgttgacgcagctaagaccctcgcaggaaaccgtctattagaactccatcagactcaagaggataatctgatactatccaaggagctgggagatcttgaggggcaattgaaagatgagaagtatgtcttggtatccaaaccgtacatgattcttaatgataaactacaacatttgaatgctgagatagagcgttatagagggttggttgaagttttacagaatgacaaggaccagctcatgcaaagggagaaagaaatttctgcaaaagcagaatcgctcgacagtgttaaacaaaccattatcacatatgagaaaaaaattgaagaactggaaactcaaattcagatactcttttctgaaaagaatgatctcgaaaccaaggttgaggagactttgcaagattcaggtaagaaagacttcaagaatgagattcatgttatggctgcagcactctccaatgaactgggtatgatggagaatcagttgagtcgatcaaaggatgcagcttctgaagcacttgcattgcgtgagcaagctgaatcattaagatcattggtagctaaaaagattgaggaacacaagaagatttcggataaatacaactcacaagtaattgagatcaagtccctcaaggcattggttgaggagttggagcaggaaaagcaggagctggagtttattgcagatatgacaattgctgatattgaagaatcagaaacccgagctcgcaatcaggctgaatatttgaggagcaatctagaggagcatagtcttgagcttcgggttaaagcagcaaatgaagctgaagctgcatgccagcaaaggctttcctttgctgaagtggaactagaagagttaaggaccaaagtagatgcatctgaaagagatgttgtggaacttaaggaggcaataagaattaaagaggctgaaggagacgcctatatttctgatatcgagacagttggtcaagcatatgaagacatgcaaacgcaaaatcagcatcttcttcaacagcttactgatagagatgactttaacataaagctagtatcagatagtgtgaagatgaaacaagcttgtagttcccttctctctgacaagcttatgctagagaagcaactccagcaagttaacacttcactggagtcatctaaactgaaaattgcccgtggcgaagagcagatgaagacttgtgtagcgcaagctataaaaacttcagctgaaaacagacatcttactattagcctggaaaggattgcgctggagttatccaacacagataaggaactcaagtggcttcggtcctccgttggatcctctgagaaagaatacgagcaaactcagcaaaagatatctgagctgagagcgttactggagcacgagaggagtgagaggcggcggcttgaagaacaatatgaagaggtgaaaaatgaagttatggagctgacctctgagactgaagagactactgtccggaaacttgaggatgaaataaaagaatgcaagggtattctcaagtgtggtgtatgctttgaccggcctaaagaggttgtgatcaccaaatgtttccacctattctgctcgctatgcatccagagaaacctcgagattcgccaccgaaaatgtcctggctgtggaaccccattcggacaaaacgacgttagggaggtgaagatatgaacctcaccaaagtgacagtgacaaaaccgacttgcgtgtgaacagcagcaacaaactcccttgtgaatatcgtctgttatgttggcgaacatctagatctaacttgctttattactgggattaaaattaggataagaactggaagaagtgaagttcctaatttatttgctatcgtgtgtgctatgtatgattacccttggcagcgagtggtgtatctgctgggtgtcaatatgctcgaattctagctcctccctgctagcgggtgcatgccagttttattaaggctattccatgtacatggtgtcacactctttaatacataccacataggatgaaaatctgatgtgacatgtgattgaaacatagggagacaccactcatgcaccagattatagacattgaaatctgaaccatctaaatgaactgtaactcatactcttatatatatctaacattttgtcttgtg

SEQ ID NO: 31064 - DNA, 2817 bp, Zea Mays
ggcgtccacacacctgacgttctgcctcccacagtcccacccgacatcctcgcccagaacgcgtcgctaatctcgcgatcgcgcctcggccgttccgcgcctgcctgccgccgcccgcgattgtagctcaccccgacaccgtgccccctctcccctggcgtgatgcccgcctcccacccccttctccgcaccgcacggatctagcgcgggaactgctcagccacggctccgcacaccctcccttcccatgatacggagctgtcctatcctgctcgcgaggcaacgaaagggtacgtgatcctctgtctacatggaaggtgaggcagatcggggggagagtggctcgtggcagtcgcctcgatggcgtccttcgcgccgtccggcgaggtgtcgtccaagcacggcgtcgtcggctacgggatcgtgggtgggcccaacggcaacgccgtcgcgcccgctgccaagtccaccgtcgtcgagaccaccatcgagagggttatcttcgatttttggttcctggcgctcctccccgccgctcgggaaccactccaccgctgagaccgtcgtaacgatcggctccgttgtggcccgcctgtgaccccgtatccgcttgcgctcagctagggttcagatctaaaaatggctgatgacggtgcgaggaggggaatgcccgctgaaggctgaagctgcccccacgggctacagtaggtgccatcgctcgccacaccgaacaccccactgccctccagaccgtgctccagggccctacggcgataggaggccactgaggatggatcagtgcggtactgctgccttccggaggacgccgagcgccggagagggggctcttctattggacttggagcaagcccacggcaacaacgccggaagcaaaatggcctcttctctagaaggacatgagttcgatccaccgtaaggaggcgtgcccgccaggctccatcttcggatctgatcgcccaccaagtgggttgagttcgataaatgaagtcagcaaggaatacttcttaaaaactgtaagtaatattgttggtgataaattgcttaagcaagctgcttcacaatatcaaatgcaggcacaacgaagccctcagacaaacccaagcaactattctttatcaggtcaagtttctggtcagcagactgctcccagtggttctgtgacaggagatgaacagaagggatatccatgggcgcacaccatccctatgagacaagctattgccagcactcgaccacctcaatttcggccttcctcgtctggccaaatgcggagtaatacgggtaatccaccttcacaaaccaatttgcataaggctaataaaatgggaaacatgtcagatgggaaaggggtccatatgttacaaactcatccacccaataactccataccagtacaaacaatgcagcatcacgtgcagcgaccacaaacatcttcaccagtgtttggggcaaatagtattcatgcacgtccatttctgcggccagttggaggtccagctgcaccatttagaccacaaatggcagattccaatccaagagcacacttgattcagggagctgtgaccacaatatctaggagtgtgccaaaacgatccatagtgtctggaaatgcgccagtcaatcaagccttgggatcttcaaaagtcagtgctggcatggaaagccagtcacaacaattgagtgcgcctaagcctttagctgcaacaagcttaagtcagactcaatctcatggcattcaagaagagcctaaaattcaggggaagaaacaactattattcgagagtttgcctgcaaccgatctaaagtattggtctctagagaggaagctctgccaaccattattaataactgagaagatgttcgcgtacagggagacggtgttggaggaggcacatcagggcatggagctacatgagcactgccgccatatagttgacaacgatgaccaacactgtagattccattctctgtgtgtacaccaaggttactgcgaccgtgatgggcatctaggtgctcaaaccatcagttgggctgaggaacactgagcagcaacaacaatatcgtaaggagagtgcatatgttggacaaatggtatgccatatcttcagttctcttatgatgcttcagcgctgcatcttcagttttctcggctaaaaagagatcatagtcaatagtatacctatgtgtgaaatactgtcaaacttggtatatggacctcagaaagtataggaaagcgctatgctatttgcatgtttgctgggagaaagaaaagatagatgaaggatgtggacgatgacggagccgagagaggtcattcgaaggcaatgccggaggtgacgacaagggtcataaatagagaagaggtaattgtggatgggttgagggataatgtgttcgccttctcagagaatgttccaggcaccacaaccaagggcatcatggacacagtcctggtcacccagtactttggcaccatgagattggggcctcctcgaagtcatctcgttcatcccccatggtcctggagctgtcaaggatgtctcggcatagataagagatggcttcctgcatgctaatctttagtgagaaaacaaaggattgatatggcccatataggtgagggcattggtactatcatgctatgaaattgttaattatagtcaatatatgatatataaagctagacttgattggtctgtaaaagcatagttcgattgagctataagtgcacttgtgagtgagcctaggtatccaaacctgtcagctcttcatggaaatcctttgggtcagactgtg

SEQ ID NO: 31065 - DNA, 2764 bp, Zea Mays
tgttttcttgtggttctcgcgtgctactgtgctgagaggggaccaggaagaatccgtcgtccggccggctcgctctctgccggccatgacgagcgccaataaggcgaagctccagctgcaggagagggtcccgctcccccgcacggcgtggaagctggccgacctcgccgtcctttccctgctcctggccctcctcgcccgccgtgcgtcctcgctggtgtcgtcgggcggcacggcggccgcgtgcacgtggtgctgggtcgccgcgctcatttgcgaggcgtggttcacggtggtctggctgctcaacatgaacgccaaatggaaccccgtccgcttcgtcacgcaccctgaacgcctcgccggatattgggcgggcgacgacgagctgctgccggcggtggacatgttcgtgacgacggcggacccgaagctggagccggcggtggtgacggtgaacacggtgctgtcgctgctggcgctggactaccccgcgggcaagctgtcgtgctacgtctccgacgacggctgctcggcggtgacatgctacgcgctgcgcgaggccgccgagttcgccaagctctgggtgccgttcaccaggaagcacggcgccaaggtcagggcccccttcgcgtacttctcctcctcctccggcggcggggcggcggagcgtggcggtggcggtggggccgccgacgccgacgccgagttcctgcgcgcttggacgtccatgaagaacgagtacgaggagctggtccgccggatcgagagcgccgaggagaagtctctagtccggcgcggcgacggcgcgttcgccgagttcgtgggtgctgaccgcgggaaccacccgaccataatcaaggtcctgtgggacaacgacagcagcaagagcgagagcgatgagcaggcggcaggggatggagtcccaagcctcatatacgtctcgagggagaagagccgcacgcagccccaccacttcaaggccggggccatgaacgtcctgacgagggtgtccgcggtgctgaccaacgcgccgatcatgctgaacgtggactgcgacatgttcgccaacaacccgcaggcggccctccacgccatgtgcctcctcctgggcttcgacgacgaggtccacagcggcttcgtccaggcgccgcagcggttctacggcggcctcgcggacgaccctttcgggaaccagatgcaggttatattcgaggtacacgtcgaatcgcgctaccacatcgaggacgaggagtagtagtgctcgctactgttactgcatgcatgctgctctcgtttcagaaagttggacacggaattgccggactccaaggcatattttactgcgggacgggttgctttcaccgcaggaaagtcatgtacggcgtgccaccgggctccggcaccggcgccaccaaagcagcagattcaccgtcctacaaggagctacagaagaagtttggcagttcgaaagaactgatcgagtcggcgaggagcatcatcacgtcgaaagaagcgccagctgcggtggcagatctaacgagccgcgtcgaagtggcgaagcaagtctctgcctgcagctacgagacgggcacgagctggggtcaggaggttggctgggtgtacgggtccatgaccgaggacgtcctgacggggcagcgcatccacgccgccggctggaggtcggcgctcctgagcccggacccaccggcgttcctcggcggcgcgcccaccggcgggcccgccagcctcacccagtacaagagatgggcgacgggcctgctggagatcgtcctcagccgccacaacccgttcctcctctccgcgtccaagcgcctccgtttccggcagtgcctcgcctaccttgtcatcgacgtgtggcccgtcagggcgcccttcgagctctgctacgcgctgctcggaccctactgcctcatcgccaaccgctccttcctgccaaaggcatcggagcccggcttcgtcgttccgctggcgctgttcctggcctacaacgcgtacaacctgggcgagtacgtggactgccggctctcggcgcgcgcctggtggaacaaccagcggatgcagcggatcacgtcgtcctccgcatggctgctcgcgttcctcaccgtggtcctcaagacggtgggcctctcggagacggtgttcgaggtgacacgcaaggagcagcagcagcagcagggctcgcccgacggcgacggcgccgacgccgacccggggcggttcaccttcgactcgtcgccggtgttcgtcccgccggcggcgctcgcgatgctgagcgtcgtcgccgtcgccgtcggagcgtggagggcggtcaccggtggcggcggcggcccgggcgtcggggagttcgtgtgctgcgcctggcttctgctctgcttctggccgttcgtgaggggcctcgtcggcggcaggggaagctacggcatcccctggagcgtcaggatcaaggctgccctgctcgtggccgcgttcgtgcacctgtccacacgcaagtaacttgcccggccccggcgtcgactcaccactgctactgctgcggaaggttttcatgtcagagacccgtaataatgcagacaacagcatgttccgcctaagatttgtacacaactctctgcttccactgcttgtatagaattcttgctcaagattacaagtcgaggccagtggtcggcgatagaaacagcgagtattattttatcctactcccaccagttcctgagcgtcgattctgggccgcgtctga

SEQ ID NO: 31066 - DNA, 2024 bp, Zea Mays
aggcttcccttcagcaaacagcctggtagttctattcagccgcttaccgcgcgctctcttgtgcggcaattgggcgaccgccgccgccctaactcaggtgccgaggtcttcgccagtaacttcaacaggtcctcgcctggtccttcgctggcgaggagcatctccaccaggtgcgaatcatggggaagtttatgcatgacaatccaatgctatcatgtagtgaagtaaacagacatcactatagtcttgcggcagttgctgtcggtttgggactaggagttgccgggttatgcaaggcattgtatagtggtctgtccataccatgggtttctccaaggaatttgttttcgggatcagggagggcatactatgttggaggtctgcgaaatcttggcaacaattgctttcttaatgtcatcctccaggcacttgccagctgtgatggttttatttcctttctagataatttgcttgcaactgatggcttgctacctgaagaaaaggctgtaagaatgcctcttcttcttgctttaagttctctcttggaagacttaatcatagttcgagatgaaaggactgtgttgaatccacatggagtaatgcatgctttgagtttgtatgttggtcacttcaatctgaccagacagcaggatgcttcagaagcttttctccatcttctgatctcattgagggatgaatttgcccattgttatgtaccacataggagttctctggcagacatcaccctttctgactccaaagtatacaagcaaagggaaggtaacctgcctgaatgcaagcgctggaaacaaaacctatttggcccctttgatgggacagttggcagcatattgtcttgcagaaactgttcttctgtgctgtcattggacttcgagaatttccactgcttgcctctttcgccagtccttaatgcaaatggagatattaccagtgggtgtagtttggtggattgcctaaagtacttcactgtggtggagcatcttgacaactatcgttgtgaccggtgttggcacatcattgctgccaaatatctttctcttagatcagaagttgatgaggaaaaggttagcaagcttcaatcctgtgtcgactatggcacttgcagttgcagggatatgttccccctggagtcactgccatgttcatcatcttcacgagcaacaaagcagctgattatcagtcagtgcccgaagattctgtgcattcattttctacgcgcttcagtcggtcttgacggcgagcccatcaaacatcagggacatatttctttccctttgcttctcaatctgtccccgtttacgggaggcgcgtcgagtgctggacctttagcaatgaatgcgcaaagagatggccagcaagctctccatctataccggcaactgaatatgcaggctaatgctgacgtgtccagtagttcatcatcaccaccgcagctatcaaggagcaagttatacggtctcgcggccgtcgtggagcactacgggaagtgtggaggagggcactacgcagtctacaggagagtcgcgtcgaatcctgaccctgatgatccaggcaaacctgttgcaggccttggcaagcggtggttttacatctcagacggctacgtgtcagaagttccagaggaggatgtactgcgcgcggaggccacgctccttttctacgagagattgtagccgcttgttgagtagctaacgtgtgcatcataacaaaatctaggacagttttgttgtgaggagtctgatgttcttagcggtaccgtgagcttccaagtagacgaggaaactagctgtggcacaaaaaacaaagcctctcggcatctcgacgtggactgcaggcgtgtcttaggcagtgtggcctactttttttttgggtccttgcaaacgttaaaataattcttcatgcaatacgtcagtgaggtcttcctcttgagaataaatcagatcaccattgttttgcgacattgtaagcagcagatggtggatcgtgtgagttttgttctgctg

SEQ ID NO: 31067 - DNA, 2398 bp, Zea Mays
tgacacaccaatcaccaacccacctgctgcaaccaatatccaagaatcatatccatatccaacttgccaatgtgccattgaccatcgcaatgcgtagcactggtgcatcgatcctcctcttgcatcgagcgctcctccgtgccaagctgccaagcttctgtgcaccatcagtccagcagctcacagatccttcctccttcgcgcgcgccatgcacggccgcgtcaccgtcctgctagtagtagccgcagcagtgctgctgctcgcgtcgtcggccgtcgcgcagccgtggccgagctgcaacggcgccagcggcaactacctggccggcagcgcctacgccaacaacaccctgcagctcatcctgggcctccagacgaacgcgtccgactcgcccgcctacttcgcgtccggctccgtcggagcgggcgcggccgccgtccacgggctcatgatctgccgcggcgacgtcagcagcaacgactgcttcgactgcggcacccgcgcgtggcaggacgtgcaggctgtgcagccgctctgcaaccgcaccagggacgccgcgctcgccgacaaccagtgctacgtccgcgtcgccgccaccgacttcctcgcctcgcccaacaacaccggcctggtgagcgtcgtcggcggcgccagcatccccagcggcgtcgacgtcgcggcctacgacgccgcgctcaggcggctgctcaacgccaccgcgcggtacgcggtggacagctcggtcccgtcgtcgccgccgaggctgtacttcgcgacggggcagttcgtggggctcgacccgcgggtccccaacatctggtccctggcgcagtgtgcgggggacctggcgccggcacagtgccggaggtgcctggatgacctgatgacactgtggtggaacggaagtgggttcaagccggacggggaaagcgcgatgttcgctggctcgcggtgcaacctcaagtctgacctgggggacaagttctacaccagcagccccatggtgaagctgcagatgaacagcgaagtggtcgttccagcgcaagcgccttccatggcaggtaaaaataattcatcgggcaagcttcttggaatcatattgccaataatgtttgttgttgtagtaactgccatagtcctctttgtttgtaaaaagagaagatatcgaggaataaagctgccacacggaactcatatggccgaggactttgaaagcatcaagtcaactttattatcattgtcatcactacaagttgcaacaagtaactttgatgaaaacaataaacttggtgaagggggattcggtgtagtttataagggagatctttctggacaacaagtggctgtgaagaggttgtcaaaaggttcgggtcaggggctagaagaactaaaaaatgagttagttctggtcgccaaacttcaccataagaaccttgtccgcctagaaggtttttgcttagaagagggagaaagattgcttgtctatgagtacatgcccaacaaaagccttgacactattctttttgaccccgaggaaaaaatacgactagattggaggaaacggttcaacataataggaggagttgctagaggattacaatatctccatgaggaatctcaaaagaagattatacatcgtgacatgaaagcgagcaatgttttgttggatgaagacatgaaccctaagattggagactttggcctagctagactctttgggcaagatcagactcgagatgtcacaaaacacattgttgggacatttggctacatgtctcctgagtatgtgatgcgtggacagttttccacaaaatcagacgtgttcagttttgggatccttgttatagagatcataacagggcggagaaacattgggcactacttctttgatgagcaaaatgaagatattataagcctcgtatggagacactggactgagggaacaattgtagagatgatagatgattctcttgggagaaattactcggagagcgaggtgctaaaatgcgttaacattggtttgttgtgccttcaacatagtccaatggatcgacctacgatgtccgatgtcatggtgatgcttaatggtgatgatactagttctataccgtctgctgcgaggcccacatttttcttggatagaagcactccttactcctataattcatgtactattacacatatgtctcctaggtagcacaaacaattgttgatagtagcatattgttacttgttcgcatcttgatgtatagtagtttagatcaactagtttgatttatcacaaagtgtgatttgtagttgccatttgtaattgtggatttgaaagttgcctagagaggggtgaatatgtgaaacctaaaatttatcaaataaagaataaaattgatcgcaattaaa

SEQ ID NO: 31068 - DNA, 1354 bp, Zea Mays
aaaaagaaaaaaaaagtcctcataaactatagaggtccagttaagaaaatgaaccttttttcaacactaaggcccattcgataaggaggccgatgcgagtcaggccacatgacaaaacaaccgctcctactcttcagtggcaagcacatgttcactcgagcctgttcgcggtggagagtgatagctggggagtggagagtggcgaacccaagtggcggctacggttttacgatctctttctccttagcctcgtctgtcgtcttccttctacctccgttcctaaaccgtaaaccctagacctctcgtgtgtcgatacgatttgcccattcatggcattctctccgacggcgttgttcttgattactgattgagaggtcggattggtgtttcctttgatctgtgagtggagtttgaggcaaggagaggggcgacatggtccatgggcacgaagaactagttcgatctcctcgttgctcgcacctcatcgtggctgccgagaagaaggcggccgcatcgcccaagccggcgaccgtcgctccggccaaactggccaccgcccgcgcaggctgtaaaagagaccaggaactatggggctccagctattggggcaggacgtggtagatgtagcttctgtggaggcaggatgggaccaaggcgtgaatttggtgagggcaatggcaatggtgttgagggaggttatggtggtggtggatttggagatagtggtttcccgcggagggaggaaggtgatggaaaggctatgggaagaggccatggaccacgtcagccttaccgtggtggtggtcgccgtggtggctatactgatagtgaggctggtgatgagtctggtcgcccccctcgccgggcctatgagcgccacagtggcacaggtagaggttatggaatgaagtgtgaggtgcgctggccgtggcatctggggaattgtgactgatgaagcccttgcacaagaaacagtagaaactgagggggctcctgctgtggctgaggctgaaaacaagctggaagaagcaccacaatctgaggttgagaagggcaaagagggcgaatcaactgaagtggaggagcctgaagataaggtagttgatatttttaaatgtgagtcttgcacattcaacaaattgttggctctgcaagtgctcaatttcacccagcctatagatagcttaggtagcagcgtcaaggaagctgctgcacatttatggctctctattaaaaatacgaacacacttgatctaccgtaggcatgtcacatggacatacaacatacctcagcatttttttgagagcatgtgttgtgtggtttctgtttactaattgagtttaatgagatgct

SEQ ID NO: 31069 - DNA, 880 bp, Zea Mays
agagaggtagctgagcgaagcatccggtgtgttccctcgccatccgccgccgccgccatgccgggcttcgctcagcgtctcgcgggcatcccgtggcggagcatcgcgaggcaaggcctctcccgcgtgttcctggtggcgaaggcctactgcgtgatccacgtcgtcaacgaccacctctgctcggtgaccttagtgcggggcgccagcatgctgccgtccctgaacctggcgggcgacgcggtggcggtggacagggtcagcgtgaggctcggccgggtcgcgccgggggacatcgtgctgatgatctcccctgaggacccgcgcaaatcggtcgtcaagcgcgtcgtcgggatgcagggggactccgtcacctaccttgtcgaccccggcaaaagcgactcctccagaaccgtcgtggtaccgcaagatcatgtctgggtgcagggtgacaatatctttgcttctaacgattcgaggcaatttggagctgtgccttatgggctgattacagggaagatcttttgccgggtttggccgccagagagttttggcgcaattgatgacgcaacgaagcagtcttaacgctgaggaggagccgaggaggtactgagcacatggacccatattgtttgctcgcccccagagattctataatagccaactgcaggggggcccttccttgagctcgagagctttcgacgacctaccgcagcgcatttctacagcgaagcaaagagcgttgtgtgtcttgattgatgtcccgtgtttttacagttttggtgtgacaagttctgaaacccgtgtttttacaactacactacaacttcacatgcttattcgaaacatttgaactgatttgtcagtcctcgttttgcag

SEQ ID NO: 31070 - DNA, 1580 bp, Zea Mays
ctctgactccgccaatcttactgtctcctttccgttagtgttttgtgattaggaggtcactgattgggggtctgggggagtaattactgtgcccctgattctgtttcggcgttctcaatttctctggaccagacactacacgttgctgtgaggatacagaagttgtaaacacaaaaccagcaaagcgatacccacttgcgttatggatagccatattgggcctgataatgctagttggtgtgtacatattctcgttgtctctaaagcaaaatgggatgcttttcgggctcatgcagacaaatttgatagaaaaggaaagggagaaaccttgtcatgatcccggtattccagacacagaaatcccttacttgcactacccaatgccaaatacttatgataggaaagaatgtgcgtgcacgggggttaggttctttgctatattgtcaatgcagaggtcagggagtggatgggttgagacattgttgaatagccatcctaatattagctccaatggagagatcttctctgtcaaagaaagacgcagtaatttcactgcgattaagaaaacactggacaaattgtacaatttggattggtacagcagtgctgctaagaatgaatgtacagctgctgtggggctgaaatggatgctcaatcagggcttaatgaagcaccatcaagagatagttgaatacttcaaccgaaggggcgtttctgcaatttttctactaagaagaaatcttctcaggcgttatgtctctatattagcaaatgctcatgatagtgccatgaaacagctgaatggaactcataaagctcatgtgcactccaaacatgaggctgaaattcttgctcaatataagccaaccattgacaaaaaaacattgatcgctgaactaaaacggtctgataagtttgcagctgatgctttggtgaatttcaagaacaccaggcatgtcgttctgtactatgaggatgttgtcaggagtcggacgatgctcatggatgtcctggattttctaagactgcctaagaggaagctgttgagtcgacatgtgaaaatccacactaaacgattgcgtgatcatattgataactgggcagacgttaataattttttgaaggggacgccgttcgagagctttttgaatggctcaaggagatgacatcgctagctgatgtatatagggctatagtgtgctgcccttttgacgctttggtacccctttctaaggttaacagagttagcacagtaggcaaaaaaaatttgacatcatgatcgaataagtttgggtcagtgagagaaatagttaggaagcagaagtagatatgcttgatccaggttagtctcatagatatggacttcatgacagcagaatgaagacgagaaacaatacctttggggttatcaaatattcaatgcaagaacttgtaaaagctgtctggactcattcatgaatacatcgaagtttacacttgaaaatgatagcccagccggattgccgccacaagtgctcaactgctcatactccttttgtgcacatgttggccccctcgaaagtatcttggggtgtgtttgg

SEQ ID NO: 31071 - DNA, 2022 bp, Zea Mays
tcgtcatcaagcacgcccgcccgcagctcgcatcgtctaccctgcgcggctgcgcctagggtttaaccactcacagcagccgccgtgactctcgaaccatgtcagcgccgccgtcgctcaagcccccagcaacctccgcagcggcctatccgcgggcgtccgccgccccgagagccaccgggattcgcggcgcctgtgctcttccaactcggcgcctccaatgctcagcctccgccgccgtcgccggagcttccactgagatggctgatgccccgctggactgggctggaaggtcgctggaggagttgcgcagcttgccggaccacgacacgttctgcctgatggcgctctcgccgctggacgggcggtacgaccgcttcgttaaagagctgatgcctttcttcagcgagttcggcctaatcagataccgcgttctcatcgagatcaagtggttattgaaactttctcaaattcctgagatcactgaggtgcctcagttcagcaaggaagcccaagccttcttgattgctattattgagaatttttgcattgatgatgcaaaagaaataaagaaaatcgagaaagtaaccaaccatgatgtgaaagccgtcgagtactttctgaagcaaaggtgcagctccaatccagagattgctaaggtgtcggagttcttccattttggctgtacctctgaagatatcaacaatttgtcacatgcattggctctgaaagagggggtaaatagagttatgttccctgccatgattgacatatgcacagcattatgttccttggcgacacaaaattcaggctaccctatgttggctcgaactcatgggcagcatcaccaacaactgtgggaaaggagatggcaaacttcgcggccagattatctgatataggaaagagtttctcagaggtgaagatactagggaaatttgctggcgctgttggcaattacaatgctgatgtggttgcatatcctgaagttgactggcctaaggtggcagaagagtttgttaggtccttgggtttgcagcttaatccctatgttactcagatcgagcctcatgattacatatcaaagctcttcaatctattcacccagttcaacaatgtgttgactgattttgatagagacatgtggtcctatatatcattaggctacttcaagcagataccaaaggctggtgaagttggttcttccaccatgcctcataaaatcaaccccattgattttgaaaatagtgatggtaatttatgtctggcgaattctgtattatctggtataagcatgaaactgccaatatcccggatgcagcgtgacctgacagactcaactgttttgagaaacttgggtatgggattgggtcattctctattggcttacaaggccaccatacgtggaatcagcaaggttcaggtgaatgaagcgcgtttagctgaagacttggagcaaacttgggaggtccttgctgagccaatacagacagtgatgcgaagatatggaatacctgaaccttatgagaagctgaaggaacttacgagaggccaagctgtcaccaaggacagcatgcagcaattcattgatggtctagacataccgggggaggttcgagcaaaactttcgaagctaacccctcattcttatactgggctagcggaggatttggcaagatacatcgagaagtgggttgatcttgaatctggatttcaaatcaagtgaccttcctttttaaaaggataatcttctccacatttttttctttttgacaacgacggagaaaaaaaataacagacgggtgcgtcgtggcctctaattgtcgaccaagatgatttacgtggttctcattaatgatatttttggcacatgtaaaatgcgcctcaaggaattatgctaactgtatgttggaggtaatttaacgagctaaaaaagttgcttgctgggtttcttatgagtacggagttgttttgcaacgcctagtgcgagaagctaaaaaaatgctttgtgttgtgctgcct

SEQ ID NO: 31072 - DNA, 904 bp, Zea Mays
ctttactgtagccgtgcacagacgcacggttctgtcatcgcgccattcacctcctccatcccgattcctccgcccgcgattcccctccccacgcccgtagcccccgccgtcgtcctcgcggccagccgaggacagccgccgcgcccgcaaatcacgcgaccatgcccttccatgtcctcgcgttctccattgcagccacatccatggcgtcgcccccttccatcgatggcagcccgcgcaagattcttccctgcagccgcgcccgcaaatcacgcgactccccctttcatggcgtcgcccccttccatggcagtcgcgctccctctgcgcccttccatccatggccgcggatccctgcgcgccgcgattcttcccatacactccctctgcgcccttccatccatggccgcggatctctgcgcaccgcaattcttcccatacgctccctccgcgcggtttgcggatgccaatcctctccctccacaccgcgattcttcccatcctctcgcgactgccttccccccattagttttggcgtccacaatccctccctccgcacaccacatccgggcacatcatcggtgtgccgctgccggcgacgaagaaggagccccgctcccgccagccggtgtgccgccactccgcatccgtgcgtagcgccggtgttccacgttgcgaagggaatctcaaataacaaaatttgtcgatcttaagtttcttcatcaaccagtttgttgtttcggctagcgaccggtgcgcaagaaggaagggataaggtgcttggttgacccggaccggacgacaggacaccgtcggggattcgctgcaacgcagcgacggcttccgcatcttctcaggccaaggtcttggagtatccacacgagagccaactggagactccgaa

SEQ ID NO: 31073 - DNA, 1435 bp, Zea Mays
acgcggaaaccctagcagctcaacaccctcgaggtggcggcgcgctcctccccttctccctgctactagtccccccccgtctcaattcgccactgacgtccattccgcttgcttgattgctccaggtacatccattcgcagtcggccgtgtcctcggagccgcgggagatggcgtaagttctcccaccgaaaccatttgctccttgtgctgtttttttttcagaggaggtaccgctggctgctgtgtgggggcggttggtgtcggctgctagccgatggtgatttaccgggatgtttggggttcaggtggatagtaggccggctgacagagctgcaagggatcaggagaccgtagctgtggttgaggcacctaccccggttcttggggaaccgatggacctgatgactgccctgcagctcgtcatgaagaagtcaggtgctcatgatggccttgtgaagggtcttcgtgaggctgccaaagccatcgagaagcatgccgctcagctctgcgtgcttgccgaggactgcgaccagcctgattatgtcaagctggtgaaggctctctgcgctgagcacaatgtccacctggttactgtgcctagcgccaaaactcttggagagtgggctgggctttgcaagatcgactctgagggcaaggcgaggaaggttgtaggctgctcctgtgttgttgtcaaggactacggcgaagaatctgaaggccttaacatagtgcaggagtacgtcaaatcgcactagatacagtctgtcagtatctggaagttgtgttcaacactacattttgcacctgagtttaaatatgtgtttggttcttgggctttgctaggagattagaacagttttcaagtgagcctaggatccatgtgaacgatttgaatatctcgcctcttgtcttgcaagtgttctcatctgctgttaatacaaaatcagcaagagctagtattttgttcttccttgtccttgccatagcatgtggtttcgtgctgctgcccattcgttcgatggtggtttttatatgctggggttgtggaaagcgcttgcggatgtagcccttcatgtttgggaaattcgtacgcttcttattacgacataagtgaccggcaggcgttcttttatcaatccaatttttttttcaaaatatatatgttggagagagaactccagccggtgggggaatgtacctgcctattgaacaagggcatcctatgttttgcttggagagaaaaactctagccggtcgatggtgtcatttgtgagttgtattgtttagagcttgagcgtcgatggtgtggattttgagtgagcttgtccccttgacctttgtatcgtgcctcttcttttatagtccaacggtattttgtgtgtctcccattttataatttaaggaaatacatgatgttgagcccttggactcagc

SEQ ID NO: 31074 - DNA, 2310 bp, Zea Mays
ctcatattttgccctcccctcccgtgccacggcctcgccccttcgtaccgcacccataagctaggttttagccgcagctttctcctttttcgccgcggcggccgcaagctccaaccttctccccgaagaagccccaagcaagcgacactcttgtcctctccgcgccagatcgttgtttatgagctcgaaggagaagcccactcttggaggcacgcggattaagacccgcaagcggaacattgcagctcctttggaccctgcatcattctctgatgcaattgtccagatttatctggataatggtggagatctggttaggccttctgtgggtgtaccatttgcatttcatatgttatttctgtcattgagatgtatgcatttagatttatgaaatatccttgatgtgatatatagttagattcctattaagctggataaatcaattatgctttgcatggggtatgtccagctgtgcatgcaggatttggagttttaagaataaaagaaagtggtttaagcatatatgcttaatcaaaaagaataaaattgttgaaccaaatacctttaatttgcccatgtcctccagctccaagaatttggagctagtaatgagcggctccaaaaaatcttggatctggagctgtgcaaacagctcctagcacatgtgttgtatgatagtaatagctatcaggatccaaactgaccgagaactgtttgatatttttcttttacttgtttcattgatgcagttttatgccattctcaattttttgttaccaggaactcgtcgccaaaagtattgagtcttccgacctcaacttctcacgttacggtgacaccttttttgaggtggtttttgttggaggacgcactcagcctggcactgtaaaacctgaagaaggagaccgccacccttattctatgttagattgtgtggcacagcgtgaaacaattttgcctttcgtactctatatccagaaaacattgcgcaggaggcctttcttaataaaaaatcttgaaaatgttatgcgcaaattcctccaatccttggagttctttgaggaaaatgagaggaagaaactcgccatattcacagcccttgcattttctcaaaagctgtcagggcttcctccggagacagtgttccagccattgctcaaggataatctggttgccaaagggatagtactttcattcataactgagtttttcaaggagtacctgaaggaaaacaccttggatgatttgattgcgcttttgaagaaaggaaaaatggaggacaatctgttggacttttttccatcagctaagagatcctctgaggctttatctgagcatttcatcaaagaaggtctgactagccttgttgagtacaatgaaaagaagatgtttgaagttaaacttaaagagataaagtcaacactgaccactatgatcaatgatgaggctgcaatacctgaagtgattgagactgtcaaacagcaagttaaggatgctaaatttcctgatctagaggtcattcgcatgttgtgggatgtgctcatggaggctgttcagtggtctgggaagaaccagcaacagaattctaatgcagcacttcggcaggtgaaagcatgggctgagcttttgaatgctttttgcacgagtggcagactcgaactggaacttatatacaaagtacagacacagtgctatgaggatgctaagctgatgaagctgtttcctgaaatcataagaacactgtatgaccaagatgtcctagctgaagatactgtcctgctttggttccgtaaaggttcaaaccagaagggcaggcaatctttcgtgaaagctctggagccgtttgtcaaatggctcgaggaggctgaggaggaagaataagtttttgatttggagaacggccgaatgctggcctaagtgttactttatatttctgaagttagaagtttgtggaggaattattgctgctgcctcttactgccgagaactttatgttatgatgtttagccacatggatcccggctgcagagtgctataatatgttgctgttaaaactttgtgtcgagcatttgttgaaacttttgttatcattactgaaaggatttataatgggacgtcagtttactgtcggtattgtacaattactggattattcataagctgcagaatgctacaaatgtcatttctggcaaatggaatattgaaatgttacgaatgtaaggactctccctgtctgccgtaatttagagcagcctaagtagggctcctttggaatccataggattctcaaaacgtaggattagaaaaaac

SEQ ID NO: 31075 - DNA, 1542 bp, Zea Mays
ccagcatcaagcacccccgtccgtgtctccctgactccctccctctagaattttacagtattctactcgctgcctgcgttccaaaacctttcgtcttttcccccgccgtctacaaagacttcacactcgcagccgcaggctgctccggcagactcctacaccgggaagacttctcctctcctctctcctctctcctctctcccttccactcgcgctctcctggataccgcgcgcggcgacgagatggcgatagatcacgcgacccctctcgggctgaagcggagaggcgccatgggcggaggcggcgagtgcgacgacggcagtgatacccggcggtggccgccgtggctgaggccgctgctgtccgcgagcttcttcgtccaatgcagggtccacgccgacgcgcacaagagcgagtgcaacatgtactgcctcgactgcatgggcggcgcgctctgcgcgctctgcctcgccgcgcgccaccgcgaccaccactccatccaggtcagtggagagcctagcgctgtgcgcagactggtgcagttcggcagttcaggcggctgcgttctcgttccccagtgcctctgcctccagcacatttcattcccctccgtcgccttctccatccatacggaggtcgtcgtaccacgacgtgatccgggtgtcggagatacagaaggtgctggacatcgccggcgtgcagacgtacatcatcaacagcgcgcgcgtggtgttcctcaacgagcggccgcagccccgcccgggcaagggcgtcaccaacacctgcgaggtctgcgagcgcagcctcctcgactgcttccgcttctgctcccttgggtgcaagatagtgggcacggcccgtggctaccgtcctgggaagaagaagcacggcggcggcggcggtaacaagaagagggcgtcgccggcgccggcgcttaaggacgtgcggtctgactcggaggactcgtgcaccagcaccagcggcgccagcagcgacaagagcagcgtcgtgcagagctcccctccgccgccgacctctgccagccaccgcccccccgggaacaagcgccggaagggcatcccgcaccggtcgcccttgggcagcctcatcgtcgagctctaggactcttcgtcagcgccaaggcaaggcaacgcactctgtatacatgacatagccccccgaagagaagggaataacaaacagtaagcctctggacgtggagggcgaagggcgacagcggtaagccgtaagatcggacaatccttagttttgcttcttctcaggttttgttttgcttttacagttactagcagtggtaccatcagtaagataaccgcgactaagttttgcagccttgtacattgtaatattattactatagaccatgactctccgatgcttagatgtatatagtaatagtatcagaacgtgggggtagcagtcgatcggcagcgaggtgttcgtcgtatgtgcatcataagctgtatgtaataaaaataagaaacgctgctccagatcctactgttgctcgctgccccccc

SEQ ID NO: 31076 - DNA, 1230 bp, Zea Mays
acacggatcgaacggtccatccactccggcctcgctttaagagcggcacttcccgtcaccccccagttcgaagctgccgctaaaccctaaacccagcaccagcgcccccaatcctccaacttccactcgagtagggttctgccggccgtttcctcgtcgtcgcaatggagttctggggtgaagaagtgaagccaggagccacggtttcttgcaaagttggtgatggtttggttatccacctttcacaggctgccctaggggaaccaaagaaagcgagtgagaatgccattgtgtctgtcaaaattgatgataagaaactagtgcttggaaccttatcagttcccgtgaaggttggtatacaaaatgctgatgaagatgaaacttctagtggtgatgatgatgatttcactgatagtgatagtgaaatgtctgaggaagatgagtccagtgatgaagatgaagtgtcaagcgatacagatactagtgatgattctggttcggaagaacagacacctaccccaaagaagactgaggtagtagttggcaagaagagggcaattgaagctgagacaccttctggtaagaaggctaagtctgaacaatctgctcagaaaacaggcgacaaggtctcaacttctcatcctgcaaagcagtccagcaagactcctgcagacaaatctacaaagacccccacagctgacaagaagtcccccaaatctgggagccatgcctgcaagtcatgcagcaatgcgtcagcacttgagtctcatcagaaggcaaagaagcatgaagcctagagcacgtgctataccatctactcgttatcaaaatcagtggtcttatttttgaacttgaaaatgtccaagtttggaacttgcccagtagtcatctgattagtggtgttatttttctttgaacttgggaattgtctagtttgggacatacgcggtatgcctggttaagaacatgggaaatgtcaggttagaacaggtcctgctggcccagttttggtcgtcgtcgaatgttgctaatgttggaactgattattgtgacccgtaaggccgtaagggagaatctttgttatctggtagtgcctagtgcaaatcacctttttctcagttgttaaacatcttgcttttacggtgttcgttttttcccgagaaatgtgcacgcaattggtttgcgagggatgagccatgaagtttcgaccagtatgtgccctacataaga

SEQ ID NO: 31077 - DNA, 915 bp, Zea Mays
atgccggtgctgccgggcaacaagcggcgaccgaggcagcacgtgcagccactgcccggcgcgccgcttgtcccccggatcttgcctccccctcccaccaccaatcacctctcgtcgacctaccctgccgcgcgccgcgctgtgctcatactcatagctcccatcatcccctcgccccttcgccatgatttatactcgcgtgacgcccacacaacgcccatgattagaagtcgcccggccgcccgcgcgctgccgagatccatcagctcttatcctcaacatccttccagcttcctggagcagtgccgcctttcatataaaccttatatgggttcttgggtgcgcaccatcacaacgcccttcaggaaagcctgcaccatcttcggcccacacaaggacggcggcggcaagaagcagacgcagcagcggccaaactcagcggtggtgcagcacgtcgacgccgagagggccaagctccacggggaggtgatggcgtgcgcctacgacgacgtgcaggtcatgtggtccatgctcgaccaggcaaggatccgggatctcagtgccagctcgtgacctagcttcgtgcatctagcttcgcctagagccgcgaaaatggactagtacatagcaaaatatcctctctctctctctctctctctctctctctctcctcctcaccaattaaacgttcccaaacctgcactcgctcgcttttcttgtacacgtagctgcttagatttagcttttctcttttatttggaggttttgcagctcagtcaagtgtttgaatccccacaggcactctcttctcttctctttgagcgaggggcttgattggagagatgtacattattgccacctattggaatcttgatttgttgcaatcctttccttgtcatcgtcttgggcttcatg

SEQ ID NO: 31078 - DNA, 2328 bp, Zea Mays
  misc_feature (2327)..(2328): n is a, c, g, or t
atggtcgcgattgttggatttggtgatagatggcggctacggttgagccatgagattatattccaggcagtttggaatcttctctccattctccgcacaggtgatcgtgaagcctacagacaattctttctagatgctatggttgcggtagaagacgtgctatatgtggcatcattgcatgacagaagtcttagtggtgtgtctcctggaagatgtttagttaaatgcctatgtggatccttggacatattagacacacctgggccttttagtgagctcccagccagttgccgacctaagaatggacctggcgtgctggttgatctgacaggcgatgcaagatggcgcccatttgccacttcgttgattaagctagttaacaaatgtcttacagacgggaccttgtatgtcgatgggctcgttaccatgccatttgtttctgctgcttgttctatcctctgctatggtgatggttctctgcacaaggtttgttttgatttcgcacgtattgttgccacggtaatgactcctgagattcttcctctagaaagcatcattcgttcaatcacatgcattttgagccaagaaattagcgaactctctgatatcagagatgcagattatgacttttcaatgggagcgtgcctttgtgcactgcattcttcatgtcctgactatattgttgaatctacagctgctgatattgttaatgttctcaaaagagcagtaaagaccagcaaaagtgcagaacttcaggttgcactgtacactgcatacaagagaataattgaactctgctctgtacaagtatggaaaccagaaatccttctgaagttgctcagcttgccaaaaccttgcagcaaactgatccaatgtattcgagcagttattggcaaatttggtcaaacctttttcactctggatgatggtaacagtcaaagcagtcctcaggcaagatctgaaaaaaatgagttgcaaaaagctggccataaaagaataccacagaacgaggaaagcaattctgccaaacgtcagaagataactgaatcaggattttctgctgccactggatttgaaaaagaagattatggctatgcttttctacagtctttaaattcactgattaattgcctgtcaccagacaatcatgagtcttatccattagaccctgatgttgctatagaagtgattagtctgctgtgtatttcattatgtgtttatccgaagacaagtttgtttaccagagtttctaagcaagttctttcctggatttcttggattcataaacagacagtccagagaaacctgtattcctttgatgcatcactgtattttgaagctcttcatactgtaatgcttctccaattcaatcttcctggacacacgaaactgcttgaagatgactatcagttgattggcgatggtacacattttgttaatccaatatatgctgacctcatcagcatgttgaaactgatatgggatgttggtcatgatgtcactgaaacaagttcaaactacaagatagagtatcttttgatgcaagtctttgctaagcttggcaatagactgaattctggatgtgatcttgaattctttgatttggctatctgtaatggaactgctgagattaaaaatgaagcaattatatcactacccataattgtgctgtattctggtcctaggattcttggagcgatgtttaagaaacttgagtcagtggatgctttaggactcgagaacgtggggaaacatattgccttttcacttggttttctatcttgcttaaatggaaccacttattacactgacaatgtggggaaggggaaccattgcaagctattcttggacaagcactatgaacaacctgtgtcaacattagatcttctcttgagaggtttctgttgtcctcaatgtgatatcaggaatagaactatccacaatgaagaacaaatttctatagtgaacattgcaccattacaagttgagaatgcggacttcaatattaacatctccaaggcccacactctccttttcaaatttctctacgcagggacttctgaggaatttatagtttctttggttgaagcgtcttctacttgagatgagaactcaatggaatcagtgttttgaatttctactgtgtcatgaaatgaaagctgtcagggaagcattttctggtgtagtctactgcttcttggaagacagtgttatggatattttgttttctggtggactgggaatgaatggagggtctaaagaacttcaattcatggataagataaaatgtgctttcactgaagctgaagatcctcagattcttttgnn

SEQ ID NO: 31079 - DNA, 957 bp, Zea Mays
ccttccagttcccacgaaaaaggaaaaaagaaaactcaagagcccaggcttatctagaaacctcgctaaccctcgaggcctcgagtagctatgaagcagcgaggcgacgacggtgccgacggcgcagctgctttcgccggctgcctggattgcaggtcctccgaccattgctttttgcgggaggcaacgccgccgccgccgccgacagtgacgacgctgctgccgccttcggtttctaactccttcgatcatcgcttttctgaggtacaaacttagttccatggcttccgatgacactgctgaaatgtgaatgttctgtttcgacgacgttgccaagaaaattgttgggaaatcatacaactctcctatcatcagttacagggacttcaactatcctactagatttaacattgatcgtatctcttaaattcacatttgtagttgtgtacaaccaaatatcatttgtggatttagagaaagaactcttcatgaagtcattcatagcatcatatggaagaaatgtcattgccatcacccagatgaaacattccactatctgtcaactccaacaaaactattgtctagaccaaaacaatcattctccaaattaacaggatagtcctggagatgaaggccaggacctaccgtcgtttgagtcaccataaaaaagaagcaacattcgattggttggttggctaacggacccagcgcattgtccaaagctcaaccgcagcatggcgggaggcagctcatgcacatcagccagtcaccgatcgagcatcggcttgcggtaccggatagagcaagtgatacatttggcggatagatagccagcttttgtctaatactatagtttacaatgttgtatctaaacactatttatcaaaaccatggtatgtttggagctaccaaaactacggtattatcatagcaattgcaaagtataatattataaaa

SEQ ID NO: 31080 - DNA, 1166 bp, Zea Mays
atggccgcctcttccattcctccttgccaggttcaggagcaagatgacgaggtggtggacaggaacatcctcccctactgcagcatcgacaggaagcagaagaagacgctgggagagatggagcaggagttcctgcaagccctccaggccttctactatgaccagaaggccatcatgtccaacgaggagtttgacaacctcaaggaggagctcatgtgggaggggagcagcgtcgtcattgctaaacagacgaacagtgtcattgtgaaggagggtcccaggtgcagtctaaggagtcataaggtgtacagtgacttgaatgttgactacataaagatgtttctgctaaatgttccagccaccaccgtagctctgggactgttctttttcattgatgaattgactggttttgagatcaatgtgttccaggtcagtgtccacctgattcaactgccagagcctttcggattcattttcacatggtttgctgctttgcccctaatattgttcttagcacagtcattgactaaggctatagtccaggactttttaatcctcaagattcgtgtctaccctcttgatgtgcttatttctaagaagcacccttccaatgttctatttccagttgcagtgccgagctggagtatgactcaaaatctcgggtgatcacacttccagaagcatcaaatgcataaacataggaacagggagctccagcgcttgtggattatatagaataataaaggtggctgtccgcacagtatagcaaactgcgaagcctgcaactactgaagtttggtctgtagcaggctcagttgggaatgtgtagcagagtatggatggtcatgatccatggtgtggatgagttgcagagtactgtgctgtgctgtgtgtgtagtaggaaggaaaagcttaggtaaagctgccgcctgccgattgtgcagtcagtccagtacgttggtatgcgaccatctcaagtctgggctttgatttgaagcaatgatttttggcaatgaatgaacaagctatctactgtatatacagttatacacacaaacgatttgcactgtttttgtacagttatgtttgcaaggcccaagtctattggccggccacggcctggctgactgatgagcccaagcctggcacacggtccacggcccaag

SEQ ID NO: 31081 - DNA, 3683 bp, Zea Mays
cgcgtgcgctgtctccccccaggccccccacctctctggctctctctctctctgcgagtctgcgacgacggggctaccgccgcctccgtacgccaggtgccgaggtcttcgttggtcctttcgccggcgacatccaccagaaattatatcatcaattcattaccgggtgtacatttgtacacagtacacccatgtccttcactggatccgcccctgtagtgaggataatatctttggagtttcggagggggcgcgctagaaggatggtttccaaaatgagatttcggaatgctctcggttctagaccatttcagtgttgttcgcgtgagaatcatacatatgtccggaagctgttggaccgagtgtcggagagatcaaagctccttaaaaaggtgtctgttttggtgggttacagtaatccacaagatttagttgagaaacaaagagcccctggggaatcttctgcagagttgattagtgccttgaaagaaatcgatttcccagaaattactgcaaagtttccatgcataaaagttggtgatgcatcacctgttgaactgtatgaggattctactaacatgaagtttaaagaagctgcactttctgaaaagctcacaaatttcatccaaggctcagctcgaaatttggagtcagcttatgaattccataatgactgtcatccattgaatcaaacacccacaactgcaggtgatctttcaatcagtgaagagatccctctcattgaaccaatagttgatacgaagtcccccgagtcattgtcagatgctataacctctgacaatagtatactggataaaagtataaggtgcttgcctggaacaactagtaggcaatatcgccagctagaggatggtggtttccatacggtccgcaaattattgcagcattttcctcggacttatgcagatctgcaaaaccctcaaggccccatagaatatgggcagtatattatgttatctggtactgttatatcttccaggggaatcaaggttaagtccactttaggtcttcttgaggtggttgttggttgttccataatcgagtctgaattgagctcttcagttgagagtagtcactctggagcagagcaaaagagaattcacttgcacctcaacagatttttcagtggcgcacgtttttcttcccaacattttcttaacttaatgtcagcaaagcacaaagaaggggatcttgtttatgttagtggtaagggccttgaagatattgagcccagatgttgatccagtgcctcccgatgttctcgttgaattcaacttgcctaatctctttgatgcttacatgggaattcacaaacctaaggatcgatctgaagctgattttgctcgaagaaggcttatatttgatgatttcttttacctccagttaggaagactatttcaaatgcttgaagcagttggtacgcgggttgagaaggaggaattgttatacaagtgcaaaagtcatgagctgaatactgttggtgtagatgattggtctcctcttacaaagaaattgttgagggctcttccttattggcttactcctagtcagttggatgctgttcaagagattatatgggatctcaggagaccagttcccatgaacagactcttgcagggggatgttggttgtggaaagaccattgttgctttcctggcatgtatggaggttgttaattcaggatttcaggctgctttcatggttccaacagaggtgcttgctgtccagcattatgaacacctaacttcattgctagagaagtttgatggagatgagaaaccaaatattgccttgctaactggttcaacgtccacaagggagtcaaggataattcgagatgcaagctgttctccctagttctttcactcactctcaagttccacatgcatatattaatatctccgctctattcgtattctattacagggtctgaaaactggagagataggcatggtcattggaacacactgcttaatagctgataaaactgaattttcagctttacgtatctctgttatagatgaacagcagcgctttggagttgtacagagaggcaggtttaacagtaagctatatacttcttcctcaaagttgagtggtgaaaatacaagttcagacgaggcttctgattctgaaacatttatggctccacacgttcttgcgatgtcagctacccctattccaagaacattggcacttgctttatatggtgatatgtctcttactcagatcacggacctgcctcctggaaggcaacctattaaaacccttgctcttgaaggaaatgatgtagggtttgaagctgtcttccagatgatgagggatgaactgatagacgggggcaaggtctaccttgtgtatcctatcatagatgagtctgagcacttgccacaactccgtgctgcaacagctggatttgattccataaagcaaaaattcgaaggctatccctgtgggctattacacggccgcatgaggagcgatgagaaggaagaaactctcaacagttttagaagcggagaaacacgcattctcctgtcgacacaggtgatcgagatcggggtcgatgttcctgatgcttccatgatggttgtcatgaacgctgagcgatttggaatctctcagctgcatcagctgcgagggagagtaggtcgcggtgagaggaaatccagatgcatattcctggcttcaacttcgagcacgctgccaaggctgaaggtgctcgagaagtcctccgatgggttttacctggctaatgcagacctgctgctccgtggccctggcaatctactaggtaaaaagcaatctggtcatcttccagaatttccaatagctagattggaggtcgatggtggtattttacaagaggcccatcttgccgctctgaaagtgctggtcgcaagcaacgacctagcgttgtatccacggctgaaggtggagctcagcatgaggcagccattgtgcattcttggagattgacatgtcaacagtactgctcgtaggctcgtagcattgggcgacgcgtgtactgtggataactattggtcgtaggctcgtagcgtcggcaaagttgacatgccgtctggtgagcgaggcgtgtaccatgaataactgttagactgattgtgtgagtgtgtgtgggctggtaccattgttaggctgccggttcattagggttagagttgagtctatatattgtaaccccttctctatgcaatacaatgatccacttcactattctacatgttattagactaggttagggttttctgaaacccacagtagccaccggtcgcctcccaccccacagcagccgccaccacctgagccgtcgtcgccctccaggaggctcctccctctcggggcggcacttgcccctggcgcggctgtgcatgggcgcggcccctcgtagctcggcgcgggagtggcagcccctggcctcgacggcgcgaggcgcgaccccctggcagtgtggacgcgacggtccgtccatggcggcgcggccacgccggccccggcgcgggaaacggctcggcggcgcacgacacggagcctcatcacgaggcaatggtggccacggcgccgccctggcggctggctcctccggcgaggtacagcctcggcgcgacctaggcgcgagcgtaggctcgtgggcctcctct

SEQ ID NO: 31082 - DNA, 1068 bp, Zea Mays
tcactacttagccatccacccaattctctaaacatcctcgatactagagaacctccttgtaacccaccacacaaagtattcacgccaagatgtagggtattacgcatctcaaagcggcccaaacttgtacaaaattgtccactttctctcgtgcatctagagcgaaccatcgagctacagtcggtaacaccatcctactccaaaaagcacctcaaggggcaaccctgggtgcgcggtcggacccaaaacaccgacagggtctcacatatctatataaggaacatgtacacccctcataatagatagaagaaaagaggccagaggcccaaccctacatactgtctcttcttgtgtgctctctgtcgtgcttctggaaagggatacgggtcttccacatcttctcgtgcctaatctactgacgggagggaagggagcggatctggtgatccgtggtgacgtagttctcaacatgttatcagcacgctctacctcgacgttgttgcagaatcagatctgcatcgactctccgtcaagccgtcaggtccctcggcctagccgaactgtcctacgtgacagacttcgattttccttctacctaatcgaatggtatgtttatctgctagtgtgcacaaactatgatccatgcccgacaaacttgctatcgttgtcgtggtgttgcacccgcggtggaagtgcccgctcccgcgatagctagcccatgttggaaggcgccccacacctagaccacgctagagccattccacgcgccagcagccgtgccggtgctggagccacgtcgctgtcggaggagcgttagcacaacaccggagtcacatcttgttggaagtgtctgtgccctggcaggtggagcgagacgcgttggtgcctgcgaacaaggtcataccggagctcgcgcacccacggtttatgagaggtggggcccgcacaccacgacgacgatgttcactacacagagtaggtcgggcatgcgtgctagagaagttttggaggccatggccgacgggtccgcggaggaagaagaaacgccctccagcctgtacctgtagc

SEQ ID NO: 31083 - DNA, 692 bp, Zea Mays
cctctctcccgaacgcgcacgagaagaccaggtggaacatatgcaagcaggttctagagcaataaccccatgaatccagatcgggggtttgcatctacatgggcgtgtactccgcaccgctccctccggccccgaccgccgtgcgctcgttgtagccggggtcgacctcaaccacgacgacgatgcggtctcctcgccccacgctcgacctcctcactgacctcgccctgctccacctcaactcgtgatgaggattgtcggcatgttcacaccgcgccgttgcagaacgttggagcctctcagaactctagaagctgcctaccaccacgcaccctaagataggggcatatctgtaaatattgtactctcaaatggtgggttgctgcgtcacgggagtttgggtgaaggcctgaaggatgtgatgcaaaacgtctatgcaggtctgggatgtccgcctcattatggatcaaaattcatgatttctaaaggtgtcagatgagtacctatatactccctccatcccagaaaacaaggcgcctcattagactattggaagctggacgacatggatgactctggcaagatgcggtgggagcacgacgacatggatgactccgaccacgagttcgacaggaagcctagcaatagtatgcagtagcaaggttgaccagaggggcagtggagagtaactg

SEQ ID NO: 31084 - DNA, 4804 bp, Zea Mays
caaagccacaaaggcctgttaggctagctgcttgccttggctgacggctcccccacggaccacggttgtttggctgcgcggcgtgtgcccttgcggtcattcgtcgtccagccagccgtccagtggccttgcccggcggccggagcgggcgagcggcggtccggccttctcggctcctcgccgtccggcgtcctccgtcactctcgctcagccgctgtgtccggccagcaggtagcagctgtgtccgtccgagtgtccgacgtcctccggcgctcagccattgtctccggcgctcagccgccttgtccggccagccggccaggccgacagggccagcgccgagcgccgctccagcctccaggctcaactccaagtcagaattgagaaataagatggaaaatgattggttgaatcatagaatgcagcacaagcaggcgcatcacttcgccttccatgcgtactagacggtgttggtcgcgctcgaggtttacttacggggctccgttagcgtcgagcccccggatgtgcctctccttcgggacctgttcctaatcgagggcaagtgtcctagttctttggaccccggtggctgccacgacacccgacacccgccgcctgctccaccgtcgcggctgctcatgccctcgctgctgacctagcgcatgcaaacctcacatttcgaggcctaaaaccctcagcgtcagtggccggcacgtggcctctctagtgcccatcggtgccatggcagctctcgcgccgtggatcctacggcggcgacccgtccgctctgtcgcttctctggtctccattcgtgattcatggcatcgaaggtgtgggtcctcttcctcatatccttcagcatcgttcaagtgtttgtggggatggtttggaccagaggcacacgggcggaggaggccgtggtttcagcagcccgtgaggtgcgggagcacgacgatcacacttgatacagatggcaagtttgcgaggtttggagtcggcgatatgggtgtcaccaagcagaagtggaggcagcagccgcctccaaagaagaagatgtcgagaaaggccaaggtcaaccagctcaagtggtaccgcctgaaggccaagaagaagatgaagtcacccaaccccgaagttaggatcagatacaagcttgaaaaggctaagaggaaggaggaatggttgattgagaagctgaggaagtatgaggtcccgaggacaccggagccagttcatgaccctgagattcttactgaggaggaaaagttttatctcaagcgaacgggggagaagaagaagaattatgttcctgttgggaggagaggggtatttggtggtgtggttctcaacatgcacctccattggaagaagcatgagaccgtgaaggtggtttgcaagccttgtcggcctggccaagtttacgagtatgctgaggaattgacaaggctcagcaaaggcacagtcattgatattaaacctaataatacgattatgttttatcgcgggaagaactatgtgcaaccaaaggtgatgtcacctcctgaaactctttcgaagcagaaggccttagagaaatatagatatctacaatcccttgagcataccagccagtttattgagaagctggagaaggagcttgaagattacaagaagcatgttgctttattcaagaaccataataagggggttgctattgagaaaatcagcaatgaagataccactgttgatgatcctgcaactacctcagattctaaatgagctaactatttggacatgctggcatgatagatctttcagtcgtcaaatcttgcaagcctacatagctcaatgttcactattcatattaaatatgctggcttcagttgtggtgatatagggagctagcttgaaaactcagattcagatagaagaagtaatagccataggattttaaaggcttgcaagattaaaatcctggttgatggaaagctgtattacttgaaaaatacctcgttcatcaatctatctctataaggaaaggctagtagcatgatactgagtgcagatcagccttttaatatttctgcaatctttcctgtaaacacttttatgataaaataggacattcttttgaattgtggcccccttttatgtaggcttttcacttcttgggccttccttgctacataaaagacaatgaaattgtaattttggagctggaatagttctgcaggaccctctcagaaatgaagacatttactgtgccacacgttcacgtactcagtattcatacaccaatgatggacgtcagaagtgcacaagatttctgtgcgtcatttgggcattggtgcatgaactttgaaacaacttgttggtctacatttgtgtgctttttgcaggtactgggccgttcctgagctgagaagatgggcatgtgcagaagcacaatgatgactttaaggatttggcttgataaaaaggaagcgaaaagacagcttcgtcagagatagagctctagtcctacgggagttgcactctgctgcacagcgcgagtcttgcattggcaacaagaaattctggaaagagagaacctaccaagagctgagacgtctattcatggaatcgtgacaaacatcgatggttgcagctttctctttccagaaagacctgatctgaagtctgtagtgcttaaagagcaaccattctctttgcagagggaaacatcgatgaacaaaccatttttcatgctgttgacattaaatttcagtgatggttgcagctgtttgagctcctcaattggatggcctgttgattttcagtttatagggtgtcttggactgaagaagatatcagcaaagcttgaaaaggactgagagatgtcattgggctatgctgagaagctgtcctaccgggaggatgtgggtactgtgggaatgcctgagatctttgagacccctgagctagtccagaataagatagaagagcttgctgccatggtgcaaaagagtaagcatttagtggtgtttaccggggcagggatatcaacttcatcaggcatacctgattttcgagggcccatgggtgtctggaccttgcagcgtgcaggaaaaggtattcctaatgcatcacttcccttccatcatgctgttccaagcttgacacatatggcactagtcgaacttgaaagagcaggatttctaaagtttgtcataagccagaatgttgacagcctacatctccgttctggtttcccaagggagaagttggctgaattacatggcaattctttcaaggagatctgcccatgctgtaaaactgagtaccttcgtgattttgagattgagacaattggactgaaggatactccaagacgttgttctgataagaattgtggagctagattaaaggatacagttcttgactgggatgatgctttaccccctgaggagatgaatttggccacggagcattgtcgatcagctgatcttgttctatgtctaggaactagtttgcagattactcctgcatgtaatatgcctctgatgtcaatcaagaatggggggagggtggccattgtaaatcttcaggcaactccaaaggataaaaaggcaagccttgtcatccatggacttgttgataaggtcattgctggagtcatgagcaagttgagtctgcgaattcctccatacatacagaaatgtgttagatggactcttcgagtaacaagtattcatggcctccgagcaccattgccatttcttcagtctgtcaaggtttcctttccagaaagacctgatctgaagtctgtagtgcttaaagagcaaccattctctttgcagagggaaacatcgatgaacaaaccatttttcatgctgttgacattaaatttcagtgatggttgcagctgtttgagctcctcaattggatggcctgttgattttcagaagcgaaaagacagcttcgtcagagatagagctctagtcctacgggagttgtactctgctgcacagcgcgagtcttgcattgggcaacaagaaattctggaaagagagaacctaccaagagctgagacgtctattcatggaatcgtgacaaacatcgttaggtatgacactgaagatgaaaagttggctccacccaagaatgatttgatgaatcacagccgcagcaaccctgcaaaacggcacgtggaaggcactgattgccactcgtcattgccaaagaaactgaagtactttttgaaagacaagaagctgaactgctaaaagtgtaaaaccgtagaaggtagatagagaatgctgtaggtttgtttattttggttattagacgagttatacgtagcatagatgcatgggaagttcgcatgctaaggttgaactcttctgctgcataggaaagttggctgacttcttatattatgcgagcctagcttaggtacctcctgtggggagaagcgattgcaatacatggtagcatgttgtagagctcctcaccccagttagtcagtgactgatgatggtatcctcttaccagtcctctggtggtatcatcttttgttcacggaggtcgatgaagtactgcctccgataaaaaaaagacgcttttgacattattgctccccaaattcttattttgacggctatactttgcccagcgagtaatatctaataaatatacgttttaacgcaattacatttttttttgtccaagaaaaatatttttggaagctgttgaaggtcaagtgtcaaaattttggatagacgttgacgtagtaggttgagagcaggtacttgcgtgcttcccctgtgaagttttgtttcataat

SEQ ID NO: 31085 - DNA, 2220 bp, Zea Mays
aacaccctaggtgtttatcgtctgctcgaccatgagtgcggactttaacacgtgatagcgatgaataaaatggtcactgaattctagtcatctttgtatatcatgattttaatatcgaatctgtctctatctatctaagtcgtttaaataaaatttagagaaatttggactttaaaaatctttcaagacattaagtctatgctgttcagatcgatcgagtacgtgaatatgatttcagaaagagtttgattttataaatttgaccacgttccatatccaagaaaaataggacgtaaaattattacttgaattggttactagccgaatgttcagataaccgcgaaattcgtttaggttcaactaaatcgaatgtctattaaaatatcgaatccaatatcgttcgggttgagccatcgacgtcttgcccaaactctaatccttgaaatcgaatccggtttatttgcttttcgtccaaatcgtaaccctagaacttaaactaggttttgtggccagtgtcgctttaattcggaacaacattaatttaattaaagtctgaatataaaattgaggcgaatacgaattatttaaatcttttgtagtttaaactctaataaattcacgtcataatcctgagcatgaatcttgaggtaattattgcgctaaaaatgtgagtcaagaggagactgataacaaaaaaaaagtttctagagcctttcacgttcttacgctagtagataaagtgaatcagaataattgaggatcatgagaaatagactaataagaggttgagccctataatatctacggtgatgttagcattcatatggaatcagattgttagacataattcgtgggccatctttctggttcggcaacagcaaggataatattaatgagagcaggatttaagaccaagagtgatacgtaaatctagtccaaagtggaatttacaggctcgtaaattaaatagagaaaatgtcctctcttttctgttatctccacgtagctctacttctgggaatactcttgtatgtttcctttcctcatacagaagccactcacagaagccactcttctccttatccgaattagcatccgatggacatctctatccatacgtcaggagcttctagtctctctatccacgcgtctcagctcaagcacgccagccgcattctggttctgtacttctgtactctggttctatacggggtctccttcataccaccccagccttatctcttcaagtggtacgcatctctccctgtcagccttatctctcgcttcctgtccacagcaagccgcgccccagcccgtggccatcggcctcttcttcgccgcatgctctccttgctcgagctcgcccacttcctggtgcatcttcctcctcgcctcccatctcagggccaggctgctcggccacgcccagcagctccttgaacgcgtgcccctccgagcatcttgtccctttgttggttgccatctttcccagctccccagcgcagccctagccgagctcgctctccccgcccagcagcaagcagctcctttcccctcgccatgaacgccgtcgatcccctactgcagttcctccacgtggtctggtcgtcgaccgcgcgcgtcacctgctcgtggttatgggaaaccagcgagcctctcctcacggcgtagtttccttgcatcatcgttcagcccgagatttagatgagaagaaagctttagcgaggcgcttgccaagtgcttggtgaatcacctcaaccggatgtggttgtcgatcttgcggagtcgagtcgagtttagtcgtggtacgctagctgattatgcgagctgaaggacatggatcagagcaaaccggtattggtggattaatcttgtggatgcatcaagccagcaccagaatggaagatgctcaccaagtggtcgtcaattaacaacactaacgtagtgtttatcccaggcaagctccggtgcatttgccacctccttgttgttttaaaacttttatcacttatatgctgcattaggtgataggagttgagtgatgaaacaattgatgtattgccattccttggaattcgattactattccttgatagagaactaatgaggcttagccctgcttagaaactaaaagttgtttcttttaaaaagaatgttgtgcaacattggatatgggttttatgaaaaaggaacttgcaataatgaaggcatcactcgcga

SEQ ID NO: 31086 - DNA, 2647 bp, Zea Mays
gccgggtcagcacgatcacacggcaatctactcctcccctacttgctagaggacagaaaaccacccccaagaactaaaaaactaaccgagccatatcatatgatatgatatgatgtgatatggtagtagcactagcagcagtatgaaaaaggcagagggaacaaaagaaaatggtggtggatcctttcgggcccctgctctagaatactagcgcaactgatatggggtcaattcgtggcaagatttggagcaaatctgctccaggatcttgctttccatgcgctgggactttcttttagtcaccgcacctttttccccttcgctttgctttccacgattccacacatcatatctcctcgaatcgtttcatgtgcttactgcttatatatatatatgtgtgtgtgtctgtcgactcaagcacacacacacacatcctccaccaccattcatcagaaagcgaagcaccagcctctgatgccaagccaaagcacacacacctcctccagcctttcttcctctacaaccccaattcttccctgcagctctgctgctgccttgtttcgatcggtcatggcggcggtggccacagagactccgttccatgtcctggcggtggacgacagcctcccggacaggaagctcatcgagaggctcctcaagacctcttccttccaagtgaccactgtcgactccgggagcaaggcgctgcagttcctgggcctccatgaccaggacagcacggttcctcctgtccacacgcaccagctggatgtggctgccaatcaggatgtggctgtgaacctgatcatcacagactactgcatgcctggcatgacaggatatgacctgctcaagaagatcaaggagtcgtcgtctctcagagatatcccggtggtgatcatgtcctctgagaacattccttcaaggatcaataggtgagcagtcagctagcactctactatttgtcttgtggatctaaacaacagtttttaagggaaacaaatcttaagttaaaaattggggaaaaattacactagtgaggtgaggacttgagtagagttcaggcaagaaaacaactttatcatttataaggatttttttagcagccggcctgttcttgctcagaaaatcacatcatgttcacaaaaccattagacagccactataaagttccttttttctctctctcttccatgcatgcggacataaataaatgaataagttttgtaccaaaagattggatatggaaatctctccgaatccttaatgatctgctgtcacatgtgttgtataatagtagatgacagcaacccttgtattatatctcggcctggtcggtgtaaaataaatcaaaaacaaataaaagaagatatgaaatgatacgcagttcgatcttgcggatcttttcatatcgccgtacgtatccatggaacaggtctgttgatgcagacaggtcactagcaccactgacaaattgttgcgttgcgcgatacaccagtggcagggcgctaaagtcaaagaaagaatcaaacgatattattgctgttctttcgaacaaaaaaaaaagaaggaatcataagatatgacatatccaaaaataaaaatatataaaaaaacacaagttgcaagacttgtcttttaacagcatatatatgatgctctatatatgatcaacgggagagagagaaaactaacaatcctggttttgaaattctgaaccaggtgcctggaggaaggagctgacgagttcttcctaaaacctgtgcggctatcagacatgaacaagctcaagccccacatactgaaaagcagatgcaaccaggaacagcaccagcaaagtgacagtcacagtggcgaacgcaggaaccccacaatcagcagcagcgatagcataaacaaccgcaagagaaagggtgcaggcaccgaagaaatcttgccccagctggcaaacagatcaaggcacagttaactgagaactgactagtacagctaaaaccttttctttttcactttactttggcttactgatttgtaacgtagatgttagccctggatttgcaaaacggaacggaatctgtaaactgatactgcttgagtcgaatcgatcgaagtgattctgcaccagatctccctatttcatttatcagaatcgaaagccagctgacagagtcacagtaacagcccgttggacatagcagcaggtgccgaagccaagaacatctgaaactgaccgtcggataacctacgatgggagtagccttttactgcttctaagctttagcctggatacaagttgtcactacagtagtcagtagggcagtaacttggtgcatctccaagagttttcaaaacacactgtcaatctagaaatttttggtgatgtagcttctcccacaagtggcctcttgcaaattcttcagtgatgtggtttctaccacttgtgctcttggattctcagttccttgactctacagtatttttgtctctacgtgctacttaatggtgttccaggtagttggattaactactgcaagggccttccgcaggataaccccctttctccctacatattcatcatcgtcttcggccccgttttaccctctagatcatataatccagcttaaataaattaaaagacaaacaaaca

SEQ ID NO: 31087 - DNA, 1465 bp, Zea Mays
ctgtaatacagtggagtgccggcggtggcgccggcgccggctccggctccggctccggctccgctctccttttgggtggagagcttcatagagcaccaggacacttgcaacgccgggcgggcacgggcggacccctcgccggcgtgtggcgccgggagcaccggtgtggctgctgctagtgctgggtcgcagccgcaggcgccgccgcccatgtcactgtcgaggaccgcgtcgagcaccagcccgtccagcgacattgtcatcagcccggtggccgcctggcccggttcgtcggcaccgacgattccaagccctgcgaccgccgcgttccaccggttcgaacaagtcccgtcgccgcggacaccgccatcggaccaccatcaccgcggcgggcacaacctcgagctgcagctcatgccgccgtccggcagcggcgtggtgggccgtggcgcgccgggggtggcggagtacggcgtcgcgccacgcactccggccgctcctccacagagccaccccgccaccatgcagctgcagctgtccatcggcgtctgcggcggcggggggttcggggacgaggcgatgctggcagcggcgagggagaaagaggaggtggaggcgcgggagcagctgcggcaagctgtggcggagaaggcggcggcgaacgaggcccgcgcgcaggcgaggcggcacgcggagctggccgagcaggagctggcgagcgccaagcggatgcggcggcaggcgcaggtggagctgagccgagcccacgcgctccgggagcacgccgtgcgccaggtgaacgcgacgcttctccagatcacctgcctcggctgccgccacaagttccgcgcgcgtccgcagctcctggatgcggccctgggcgcccccgaggtgacctgcagctacatgtcctccgtcgtgacagaaggcggcgacgccgaggccgacgatgagccgcccctcgacggcagggacggcatgctgcagcggcgccgacacgccatggcaatggacgtcatcctctagctaacctgaaatgagatgatggtcttcgtttcaaatagtttcttgtgtttttgccggcaagacgccggggttgcatttgcattggcccctgctgtatgaggtgtatcagatgccgatgcctgatggtgcgtagacagtggaagaccccgctagctcgatcgggccagtgctgcctagacttcgagtcctgtgatgagaaggaaggaccggagaggtagccattaggcaagtccaaggagagacgaagacgagggctagctgctactagcttactgtgacgtacgtgcatggaatctttcggtgtttgcttcctattggatcttgttggaaagaaacattcattatattgctcatggaaagcaagttgatgatgccctttgtaaaggtcttcagtagccaacagggaaatcaagaatatttgtcacacctaaattcagcg

SEQ ID NO: 31088 - DNA, 408 bp, Zea Mays
ctgagtattagtatactcagtcttgcttgtggcataattttacaggttctctggaggacatggttgctggagtgacttggccgtccatcttgccacctggttggacagtcgagtgagaccctacctcagcagaggaggagcatgaggagtgatgggataggcttccccatctctttgttttttatcgttagttttattccgctgcatttcgaacaatgatcactgcttttgttaacactccgatgatgttgtaataaattaattactccttaatgtttggttttatgttttattgtatttgctctgtgcctcaccatcgagtgagtatgtggtacttgatcctgttagtggcctcatcggactagatccgagggactgacgttttattattatttaagtgtggtctag

SEQ ID NO: 31089 - DNA, 2874 bp, Zea Mays
cccccttcctcttcctcccctcgtgcaagtgcaaccacccacccgctctcccaccgccctcctcgcctatccctgccgccactgcggccgtcgatgagccccatgcccaccgcgccgtacacctccgcgacctcgctgctgctgggcagccgcaggctcccgcggttccagttccagtccctccgcacccccaccaagccccccttccgccgcccggcctcctcttcgtccacacctctccctcgatgccgcgccagcgcgaccccccgccctctggcccccgtctgcgcttccgccctcgcgctgcccgtgtcggtggcggccgctcccccaccgcaggtggacggtggctgggtgggagggacggcagcagccgtgaggagagtagctgtggcggttgcgtgcggggctctcgcggcggcgtggtgccgccgggcgatggctgtgggggctgccgcggcggcgggagccggggccggggcgccggggacggtggaggctgctgcagggattggatggatggcgctgcgcgggggctggcccagggtgctacagattctgcagctgctcagggagcacggcttgattctggccgcgctgcttagcctctctgcgttcttctccatggcagaaacttctatcacgacgctttggccttggaaggttcgtgaactagctgagaaggaacctgagaatggtgttttcaaaatgctccgaagtgacgtcacccgtttcttgaccaccattctcattggcacaactggtcaacattggtgcaacagcaattgttactgaggcagcaacagcaatgttcggtgaagcaggcgttagtgcagcaacaggtgtcatgacagttgccatcttacttcttacagaaatcactcccaaaagtgttgcagtccataatgccaccgaggtcgctaggtttgtggtaagaccggtcgcatggctttcactgatcctctatccagttgggcggattgttacttttctgtcaatggggatgctaaagattctaggcctgaaagggagaagtgaaccatatgttactgaagatgaactgaagttaatgttacgaggagcagagttgagtggtgcaattgcagaagatgaacaggatatgatcgagaatgtcctggaaattaaagatacacatgtgagggaagtaatgacgcctttggtggacgtagtagcaattgatgctatcgcaacacttattgatttcaaaaacttgtgggaaactcatcagtactctagagttcctgtatttgaggagcgcatagataatattgttggaattgcttatgcaatggacatgcttgaatatgttgaagaggttgagaaattgaatgcaatcactgtgaaggaaatcgcacatatgcctacatactttgttccagattcaatgtctgtttggaacctattaagagagttccggatcaggcaggttcatatggcagtggtcctcaatgaatatggtggaactattggtatttaacattagaagacgtagtggaagaaatagttggtgaaatcttcgatgagaatgattccaaggaggaaatccagaagaaaacaggctatatagtaaggcggggggatggaacatttgatgttgatgcaaacacatcgatagatcacctatctgaagagcttggtatcaaaataccagagggacatcagtatgagacggtgtctggttttgtctgtgcatcttttggctatattccagaagaaggtgggaaaatgcttgtgattcttgaaaagaatttcagagaagaaaacggtgaatatcaggaggaaggtcctgatcgccaagatgatagagaaaaaactcaagcttatgaactcgagatagtggaagctaatgcaaggaaggtgggcaaagttctattcaagccaataagcagtgaatgtgttgatgtcgacaacaagggtgtgaaccgcctcatttccaagaagatcatcaagcggaagaagaaaggctctgatgattcctccaatgatgacgagtgtccagacgtaacagagaatggttgccctgcagagttactctcatactcggatgataacagtgccttgttggaagatgcaagcagttctagtgccaaaagatgacaagaaaggaactgcaagaccatcgtactactggtaataattacagcacaccgtcacccctcctaataccccttgttacaacagaagaagagaacatagtagtaggctaccaaaaaaaaaactgcgagagcaacaccaagtggttaacagaagtttatagggcattggaacatttttttagtagcagtagcagtctagaggtgcagcgaggtgtcgacgtcgacttcaccagagacatgtttgtagttgtaagtcttactgggccacagctccaccgtgatggggtcgttatcgccgtggagctggaagcttttgcattcacaggccgggaataaggaggcggcagcggtgtcccgcagtggcctgcacgggtagagcagctccggatggaagaaccacttcacgggcatctccctcggggaggtggtggccacagggcgcggggcgagcacgtggagtagcctctcctcccgcttctccctgatcctctccagctccctgaacctctgctgcagcagggcgatggaggagaacatcatctggccctcgctgctctgtacccccatgatgaacaaaaactcctcgttttcagttgatgtgtgtgtgtgtgtgtatctcagccagcgtctgtctacttcgctcgctcgctgtgtggggttttgctgcttgaggtggtggtggtcttgggcatgcgcctacttataagctgcaaagttttgtcacggcgcagggcgtcgtcttgtggtcgtcttgcaa

SEQ ID NO: 31090 - DNA, 2156 bp, Zea Mays
cgcctttattaatttccgtttcccgtaatttcctcctccttttcccagttcccaccttgcttcctctcctcgctttgcttcctctctggctctctctcacatgcctgcctactactccctcaagcaagcaagcaagcaagctgcaagaggtcaggaggagccgtgactgtgagtgagcggcgtctggtgtgaactgtgaagtgaggacttgttggaggaggacggagcgcggagggtcatggcatggtgatggacctgctgctccccctcactttgcccctagtgctctaggcagccttagctagcctcgcagtcctgggaggaggagaaggacaaggtctctgatcagctccagcttgtctggtcaaagctgaggagcctgcttgggctgcctgtgagtccaagctcgacaggaccactgccactgtgaagcacagcggcagcggcgacgagacgaggacgcggaagctgccaagcggatagatctacgcaaaatggagaccaaggacgtgtcgccgcttgccgccgccgccgcggcgcccgtgcttgcaccggcctctcagcagcagcagcagcagccgccccagccgcagcagcaccaccaccagccaccgcagccgcagcatcagcaccagcaccagccgccgccgccgccgttcccgcagcaggcggccccggcggcggcctcgtcgcccgccgcgtccatgcccggcggcatgcgcctctcgttcgaccatatgcccgggaaggcgcccggggagcagcaccaccaccaccaccacgcggcgccgcccatgctgtacgcggcgccaccgcagggcgcgggtgcgccggggggcagtgtgctcggcatgggcgaactgatgcgcaagaagcgcgggcggccgcgcaagtacgcgcccgacgggagcatggctctggcgctggcccccatctcttccgcctcggccggcggcggcggcggcgccgcagcccccgggcagcagcagcagcacggcgggttctccatcggtagccccccgtccgaccccagcgccaagcgccgcggccggccccccggctccggcaagaagaagcagttcgaggccctgggttcttggggcatcgctttcacccctcacatcctcgccgtcaaggcaggcgaggatgttgcttcaaaaataatgacattctcacagcaaggccctcgcacagtctgcatcctctcggcgaatggcgcgattagcaacgttacgcttcggcagccagccacatctggtggactagttacttatgaggggcgtttcgagataatctcgctgtccggttctttcctgctcgcggaggatggtgacactcgcagcaggactggtggcttgagcgtcgcgctcgcgggatctgacggccgagttcttggagggtgtgtcgctggaatgcttatggctgcaactcctgtccaggtcgtggtggctagttttatcgcagaggggaagaaatctaagccagccgaagcgcggaaggtcgaaccgatggctgctcccccgccgccgccgccacagatggctgccttcgtgccggctccggtggccaccagccctccgtcggaggggacgtccagcgcgtcgtctgatgactccggcagcccgatcaaccacggtgcgatgccgttcagccactccagtcagcaccagcaccctcaccagcaccagcagcacatgccgcctgcctacgcgtccgggggctggtccctctcggtgcaccagcagaacaggcatgattctgacatgaagatgatgtcgaactaacaggcgccccattcgttggtgtttgggctggagaggaaggaaaggaacctgctgatggttaggttggtactgctgctatgaaacggtcctcttgcgcgtcgtctgtgctctggtcagtgacgacgtgtcgatctgctacttaagctaagctagctaggagagttagggttcatggtctcaccccccgctgttgtgcccctgagtaagattaatttaatttgaattagtcgctctcataatgctgcgagttgtgatggtttcctgatcagatcttcaccttctaggctagttaaaatatcatttctctagtactatggatcatggatttacttggatacttgggtttaattcaggaatttgatcgtattctgt

SEQ ID NO: 31091 - DNA, 919 bp, Zea Mays
ctcctctcttgcccgctgtccacttccctctcatcctctcgacctcgcttcctccctcccaccgtgccctgccttttcctcacgacctcgccgctgattgcggtcccccatggaaccgtgaaggcggccgagcacgcggccgagatggaggcgacggtggtcgtcgcggctgccgtggaggccgaggaggaggaggctgctgctgctgcggcttcgacgccgcagcggtctgggaggaaacggccccgcgcgattgggagtgggcggtaccgctcggtgtccagcaggcaggcagtcggccagggacggatggacggagacgacggatggaagccgcagccactagccagccacaccgcagaccgcgcacgcaagagaaagaagcggtgtttgcatggactgggattgccgacttgactgcggattgacggggacaggtgggagccagaaccgcccgaggaccctcttctcctcggccaagagacccacaccgcaactggaaccctcttctcctcatccgacgacagtggtggccactgctccggccaggcatagcataggcagcctggttacacaaaccaaaaaagaatggtagtgtgaagtggaatcaaaatgggaactgggtgcagactgcctcaaaggatcagattattaagatccatgaaagagcagcaatccttctgaggggacgtcgctggttagatagttattacagtatcaagatttttatatgttcctttacatattttaaggttcacaaattgatactggttttatatgtagcagttcattgttcactgtaaccatacatgtaaaccataagcaaatgtgatgtaggagattgttatataaagagacttttgcagccactttgatgttttgttttatgcttctttttgtgaaaaattattatggtgct

SEQ ID NO: 31092 - DNA, 1501 bp, Zea Mays
cgacgcctccgcaccaccgtccatattcccccatcaaactgcgaaccgaaaaaggagaagacggacaacgaattgggatcgaaaaacatctccgttccccaccaccaccttcgctccttctgcttcgcccgtccccctccgtcgcgtcgactcccaagatggataagctcagtggttctgcacgtcttatgattgtttcagatcttgaccatacaatggtgaatgtcgtccaactcatatcttggtctgccttaagctatctgtttggtgccctgtgggaatctgtttactgtgaggattctctactagtcttctcgactggaagatcaccaactctttacaaggaattaaggaaagagaagcctatgctaactccagacatcactatcatgtctgttggcactgagataacatatggggaggcaatggttcctgatgatggctgggaagaatatctgaacaataagtgggacaggaatattgttgtagcagaaactgtgagcttttctgagctgaagcttcagccagagacagaacagcgcccgcacaaggtcagcttttttgttgataagaagaatgcccaggaagtgataaaatctgttgccgagagattggacaaatgtgggctagatgccaaaataatatatagtggtggccaggaccttgatatattacctcaaggagctggaaagggccaagcacttgcatatttgcttaaaaagctaagctcatgtggaaaaccgcccaacaatactcttgtttgtggtgactctggtaatgatgcagaattattcagcatccctggtgtacatggtgtcatggtcagcaatgcccaagaggaactacttcagtggtacacagaaaatgcgaaggataacccaaagataattcattcaaatgagagatgtgcagctggtattatacaagctattggacacttcaagctaggacctaacatttctcctagagacctgcagtttccttatgcaaaggaagcctctttcaaacctacagatgctgtagtgaagttctacgttctctatgagaagtggcgcagggctgaggttccaaagtctgattcagttataaagtacttcaaaaacatcactcatgcaaatggagttaccatccatcctgctgggcttgaactctcactccatgcatccattgatgcgttgggatcatgttatggtgacaaacaagggagaaagtaccgagcatgggtggacagactttttatcacacagactggttcagatagttgggtggggaggtttgacttgtgggaatcagaagaaggccgagccaccgagcacgggaagcctgtgagccggtgacggacgacgaaggatgccgaggaagtggacagcggtggcgggcgatggcaggcacgccagacaaaacagaagtcacagcctcgccgggttggagctcgaagagcggagatggatgcgaacggtggtttgtatcctgcgcgacgtgcctggaggctggaggccgg

SEQ ID NO: 31093 - DNA, 1464 bp, Zea Mays
atctgttccgttgcgtgctcctctctcactccacggtccacgactgccaccagcgcttcccgctttcccagccacccgtcgcctccgcgtgtcgccccatccagccatcagttccaccccagctgcgaatccggcgcgctactaaccgccgggggaccgaaatttccccagccgcaagtttcgggaccggaacaacaatggcagcagcagccgtcgcctccagttccaccccgcggccgctccggttggcgcagcgcggggcggtctctgcgcacgcgtcccaccacgtcagcgccccgccccaccgctcccgcaggccgcggctctccgtctcggcctcagccggggtggaggggaccagcgggtcggagcggttctacttcaacttcaccgggttccccttcccgctcggcccgttcctcaaccgccgcaccatccgcaccgaggcggtgaagggcagcatatggctgttcgagcaggagcaggcgctgggcttcagcagcgtctccaccaacatccgcatgacggtcatcaagctcaagtccggtgggctctgggtgcacgcgcccatcgcgcccacgaaggagtgcatccagatgctcaaggagctggacgcgccggtggagcacatcgtgctgccgaccttcgcatacgagcacaaaatcttcgtcgggcccttctccaggaagttccccaaggctcagatatgggtggcgcccaggcagtggagctggccaatcaacctgccgctcgagttcttcgggatcttccgggccaagccgctcaaagatgaggatgacgccacgccctgggtcgccgaaatcgagcagaaggtgctcagctctccggaagttgggattgggccatatgtggaggtggcgttctaccataagccttcacggacactactggtgaccgatgctgtcatatttgttcctcaacagccaccggagtgtatcagcaaagaatctctgttggcatctgcgaagaatggactggcagtgaagctattgagcaaagggaaggaggttcccgatgaaccagttgttgacaataagctaaaccgtcagaaagggtgggagagaatggtacttcaaatactatttcttggtccgtcaaatctacttgagccaaatgcaagttttgctcaaatgtcgcaaaaattgatcgtctcacctattgtcaagacgctcgttttcagcaaagttccagagaagttattgctgtagggctgcctccacgagcaggcgcacgccaaggtttgcttcacgcggcagggcgtcgaacagcaagctcattatgaccacaggcatcgcagttcaacacttcacaggccgaaacgcctgctgcgtcgcttactattgtctgacactgacagaagttccatattgcacgggcggacgtctcgaaaccagccgagcctcgtggatttcgttgaggcccgacccccgctggcgcacgttc

SEQ ID NO: 31094 - DNA, 1036 bp, Zea Mays
gagaggtttgtatgcaagcatagatcaaaattggggagaggagcgagagagaacgaccgaaacagagagataatccagagagagatggcaaactgttttggtgacatcgtggacaattacaagttagatacaatgccaagatatgtcggcaaaacgaagactcgagaagaccgggcacgagaggcctcctatctcaataatgagaatgaaaagtccaagaaggctaaagagactggtacggcaatggagcgtcgacgctgtgcgtgatctacaaccagacgggcggaaccctgcggtacatcgacgacaaggactggctgggctacccggggccgacgccctacccgacggagatcgggaacgggcagtgggcgtccttcctccacgtccacaaaaccggcgccgcgtcggggtccatggccgccgtcgtctaccgcggcaaggacggcggcggctccgagcgcgacttcgcaatggcctggagcaccccctggggcgcctccaagaacagggcctactgcgagatcggcagcgtcggctccttccagtcgcagtgggacaagctctacaccaatctcaacaaggccgggtacaccaccaacgccagtagtacccactcgtctatttctgcagccactgccaagggcagctcccccgacttcaaagcatacgtcaagatcccttacagtgcatgatgtcggtcgatgctgtcaaatccgatccatcatggcatcgttctgtttgtactacttcttcctccaattaataatcgtatagcagcttgaaataatattgcatgcattcaagcatgatgcaaattagaaataatataccaatagcagcagcagcagtagcctctacactgctgccattgtaatatggaataagagagttctagtgctttggtcactcgcttgtaaggtaattagtaatgtttgagctagagtttctccggccgaaagtgaaaaccttatataaccttgttggtgagaatgattcacaacagtaaaggcaataatctttggacatctcctct

SEQ ID NO: 31095 - DNA, 3091 bp, Zea Mays
cacggtttcccctcctacttctccggcgcgaccgctggttcgtcccgtcggtctccgcgcgcgggggcggggccgattgggccgctgcggagcgggattctccgtccgcgtcccctacgcgtcgaggttccatggcgctctccgtccttcgtcccccccgcagtcgtcgctgcccgcgaatccgagattcatcgtgcatgcgcggcgcctggcggttcccgcgctccaaattgctggtcgaggaccagtgattgatcctgctaaatgtcgattgatgagtgtggatgaaaagcgagaactcgttcgtgatttatcaaagagcccagaaagtgctcctgacaggctccagtcatggacccggcgagaaattgtagagattctttgttctgatcttggaagggagaggaaatatactggtttatccaagcagagaatgctagattatctatttaggttggtgtctggaaaatcatctggtccagtggaacatgtgcaagagaaagagaaagggagagagaaagggaaagagagagaaaaagaatcaattcctgagcccaatacaactaaccaccatcagtcccctgccaaacgaccaagaaagagtgataacccatcacgattaccgattatcacaaacaactcagcagcatctgatgtaactgggccaactaataattcacggttctgtcaaaatgtagcttgcagagctattctcagggacaatttttgcagacgctgttcatgctgcatttgtttcagttatgatgataacaaggacccaagcctctggttgtcctgtagttcagaccaacacttacaaaaggatacctgtggtttctcatgccatcttgaatgtgctctaaaggatgaaagaacaggtattctgcagagtggacaatgcaagaaacttgatggtggctattattgcactcgctgttggaaacagaatgatttgcttgggtcctggaagaaacaactggtgatagcaaaagatgctcggcgattggatgtgttgtgtcatcggatttatctcagtcacaagatcctcgtctccacagaaaagtacttggtattgcatgagattgttgatacagcattgaagaaactggaggctgaggtcggtcctatatctggagctccaaatatgagtcgtggaattgtcagtcgacttactgttggtgccgaagttcagaaactttgtgctcaagcaatagatgctatggaatcattgttctcgggtgtatctcctgctggttcaagaatcccgcgaccatgtatggtaccaccaaattttgtgaagtttgaagctataacccaaacatctgtcatggtatttttggatttggttcactatcctatgcttgcccaagaggcaacttcatttaatatatggcaccgaatggctgttactgaagcttacctgacaaatccgactggcataatacttcccccatcgaaaaaattacctgtcactgggcttgcaccggctacaagctatatctttaagattattgctttcaaaaactcaatcgagttgggttcatgggaaattagaacgaagacaagctatcaaaaggatgatccaaggggttcaatgccaggtggtactagactaggacataatagtgagagcctgaaggcaaacagtgatggccagtctgatccttcctcagagggtgtggactcaaacaataatactgctgtttatgctgatctaaacaagtcccctgaaagtgattttgagtactgtgaaaatcctgagatcctagattcagataaagcgtctcgtcgcctcagcgaacacatcgatgacttgcaaaatatacagatggctgcagatagggtaacagaagtcactgagctggaagaatcgcctgggctctcagcctcagccttggatgaggaacccaacgcttgtgttcaagcagtgcttctcagggagccaaacccactaggacacaatcaaagaactgtagttcctagatcacagcatgcatctaatgtactgggtggaaatgagttggtgattgttggacctcgatatgctggttctgtgccacccattgcaacaagaggtctggaaaacagcaaggagagcggtggaaggggcttcaaacccaaaccttgtaacaacattttccaaaatggctcttcaaagcctgaaagggaaccgggcaattcgtcaaacaaaagaacagctggtaaaacggaggaccttggtcacaaggatagttcatctgaagtgtcctacgagtactgtgtaagggtggtcaggtggctggagtgcgagggctacatcgagacaaacttcagggtgaagtttctcacatggtttagcctgcgtgccaccccgcaggagagaaagatagtcggtgtctatgtggatacccttattgaggaccctgtcagcctttctggccagctcgttgacagcttctcggaggcggtatatagcaaaaagcggacgccttctggtttctgcatggacctgtggcattgaagcaccacaagcacctaccgtttgctttgtagggagcacacattcgggcccattcttttgttgcagatcgttgcattgattcttcattggaaatttcgctgaagtatttgacttgcacatcttcattgaaacttaacttttcaatgacagtaggttaagttaatgggcaatttctttttttctttttccgttctttacatttgctccatagtaggttaccgtgctatcatctgtaccgtccatgttaaccttagagcatcaatgagccgcatcgttcggtcagcctggggcatagtggattttgtggcgtgtggctgctcgaaggatgattgtcaggctggaccaggaatgcgcctttctgtgggatgaagcagattcgtatggacgttgtcagtgaaatggttgtgctgtacctggggttttgcattttcttgctgactttgttgggaatgggaggaatgacgtttaagatgcagaatgtctgccttattaattaatcttatgttgactcatacttctctatcaactgcgtttatggttcgctggtgttctgtctgagggcctccggttttgtgttgcgcctgtttgaat

SEQ ID NO: 31096 - DNA, 1343 bp, Zea Mays
ctcgaagcccacttctggttccggtggacccgcgtacatcgctaaggaacgcagcagctcccccgacaaccaccagataaagctgcaagctgcttatcttctcccgtcccataggttgctaggctcggccgtgtagagcagcaagagcacgccgcgccaagcaacaaagagggaccccgcatccatggaggtggtgggcggcgtgtcgctgaggccgtcgccagcgccggcgcgtatccggactaccctgccacccgtcgacgtaggcggacgcttccttctccgccgggtcgcggggcgccagccggcgaggcgcgcgctggtcgtggaggcccggggcggcaggggctggtcggagcggcagatgcagcagcagcgccgcgcgccgctgctgccgaaaatcgaggacgacggcaacccgcgattcgtcatcttcatccgcaccgccaatgtctacttctggtacccgctcaacatcatcacgggcggtacgacggcgaagatcatgctcgccgccaaggacaacttcctcggcaagtacatctacaaggacacgctcgccaggaacctcgccgccgtcatttacaaagtaatcgatgatcagcagcagctctttttttggcttcatcatagttcccacattcttaacggccatccaattttactactagtatttgcatagaccagaccatatgtaggctaggctaggctgcctagctaggcatccactcgttcttgaagttggagaaagctttaatgatcaacagctgaccgtgtttgctgtgtgtgtatgtatggaaaggacgaggacgtgatcatagacacagcgaaagagcagtaccgtgtgctcaagaccgaaaatcagtttcggtatggctacaaagttgtggagaaagggaacataaggtctgctctgacgacaagcaatgtgatcgaacttccaaagaaggacgagctcaaaaccgtggttgacaaggtgaaggacttctttggcgacgtgactgccggcgccaaagaatcctttgcgcagataacagggtctgctgtcagcaaggaggaagaggaagcagagagcaaagagaagttccgctccaagagacgaaagaagcagcggaagtcgaaggagggcctcaagacggagaaatgattcagtcagtcacacaagtaaagcaccggctgtagtttcgctatcgatgtccgagaactgttctgtaatttctccagcttccttttttttgtttgttttgtaaaaagacgtcgtgtaacttcattgcgactaacgtgtgctatgccttctcagtaaatctcacaaaatgtgaaggtactccctacgttctgaatca

SEQ ID NO: 31097 - DNA, 3385 bp, Zea Mays
aaaaaactcggattccacaccgtgtgagaaaaagagagggggaaggaaaaagggcggcaggcgaaatgcgcaacgggacggtgtgaaaagagcggttgctggcaacccaaatggtgggacttggagagagaaaccgcagcagcacaactgccacaagcaaagcaagccagcctgcgctgcgagagggaggaccgaggagggagagggagagagagagaccggacaggcgggcagcaagcaacgggcacgaaccgccgccgacctctcacaggcggaggagggagggaccgagggagagacgctctcctctctctctctctcacacacacacgcacagagacggaggagcaagggtcgtcgggggcggccgaggccatggacgccgccgcagccgcggccgttcaggaggaggcggaggcggaggcggaggcggaggcggaggggaggacagtgctggtaggcgtgcgcgcggacgccgagagccgggcgctgctcacctgggtgctcgtcaatgtggccgcgcccctggaccgcgtcgtcgccgtccacgtcgcgccgccgtccgccgccgaggcggtcgacttcgacgccatgctcgccgtctacgagggcttctgcaacctcaagcagatcaatctaaacctgaagatttgcaaggactcgtcggtgcgcaaggcgctagttcgtgaggccagcctgttcggggccgcaaaggttgtcctcggcgtcgccaagaagaggcgtgcgatttcgtcgtcgcactcagttgcaaagtactgcgcaaagaagctgcccgcgaagtgtgcggtcctcgccgtgagcaatggcaagattgagttccggagagagtcgagcgtccatccagatgacggtgagggtgacgccacgcgtgactttggcaccaagggaagtgaattggagaatttgtcaacggatcaggtcgagatcgacgcagatccttctagtacaaatgctgaagagtcaactgtcaaacagggagacgagatttccgagcttccaggtaagggtgccagtgtgctctactgtgttcttcctgagagaagcagcggttctgttgcaagtacatctagtaggcaagaccaagattcagtggatctgccatctgaaggggctggggagctatattgcttattgccacccaggaatggccattcagtcaggagcattggtgattctaagcgttcaaatgcgagccaaaaggatgataaaccagccaatccatcactggaaggagatggcgatctgtactgccggctgccgaggactggacgaccgggtaggaattctgggggatccaatcgttctgccggtataagaggtgcagttaggcgtagcagtagtttctccagcgatatccatctgagctcagagacatcacctattaagaaggatggctcggttagcatgactgccaccgaaaggagttcttctgctgtatccacagaagctgaggactcaccgaaatacaccgcacgaactgctgaaacaccctcgagctccccaatgtcgctgagacggatggtagaggggagatctgaccgctgtcacctccatagaagaatctttagacatcaaagaagttcatcttttgaatgggcaaagatctcaatggttcaatgggcgatgagacttccgagccgatacacttcggtccacccagatggcaaaccactgaaaccgggtgcaagtccaaggctgaactgtgattctgaaactgagtccactgcagctgttgagccagaatcaatgttttctttcgctttctatgatgtagcatggcctccaagtgaactggaatcactgcgagagaagtattcttcagtttgtaggatgttttcttatgaagaactgaagcttgcgacgtccaactactcacctgatatgttaattgggaagggtggaaccagccaggttttcaaggcacaacttgatggcggaacatttgctgccataaagattctgaaaccctcggttgatgcaatacacgagtttgttacggaggttgagaccgtaaccagcttgcagcatgagaacattgtagcactaaggggattcagcttcgagaactacaaccttgtgttggcatatgattacatgccccgagggagcttggacaaagctcttcatgggaagaatgatggcacagagtttcttgtctgggagaggagaattaagatagcaattgacatcgcaagagcactcgaatttctccatctcggcggtgtgacccagtctgtgatccatggagatgttaagtcttcaaatatcctcctttcagaggattttggggcacggctctgcgatttcgggttagcaaagcgagtgtcggcttcgactccccacctaacatgtactgacatcaccgggacttttgggtacatggcgccggagtatttttcacacggggaggtcaacgagaagattgacgtctacgcattcggagttgttctgctggagattgtttcgggaaggaggcccatcacaccagggagcgcgaagggtcaagaaagcctggtcggttgggcgaagcctttgctgtccagtggcgggatcaagcacctggtcgatccgtttctggggaacgattacgactgcgatgagatggagaggatgacgctcgcggcctcgctttgcacgaggacgtcgtggcactctcgacctgagatgtcactggtcctgaaacttctccagggggacgacgagacgatgggctgggcgaggtcggccagcttcgacgggtcagacgaggaggccatcgcggcgggacctgacctgaacatgcagtcgcacctgagcctcgcgctcctcggggtggatgcggacgacacgctgtcgcgctgcagcagcacggagcgcacctcggccgacggctactggagccggtcgtccagtttcgactagcggtagctgcgtgatggaactgatgcggcagagtagagtagtggtagtgtggttacgtacagcaggcaggcaggcaggcgattggtatgcttggtgagatggatgttcatatcaggattcaggtggttggaatgtggacagctgctgatttagtttagatggcagtgttgctttgctgatttggctaggagtcgagttctgttggtagtatagatctgaatctgaccttacgatgcaattggtttcgtatttgtattgttatcttttttttttcctttatcaagtcttcatgcaagaataggctaccaattggttgttggataggcttgtctagcaacaagcctgtaagataagggacttggtaggaaagaatctgcaggatgaataaacctgtgaggattaaattaattgccgttagcccatggtggccagccagagccaacttgggcttcaaggcctttcg

SEQ ID NO: 31098 - DNA, 712 bp, Zea Mays
taaaactatttttttgttacgtggagagaatcccacatgaattcattgattcaatgacctcgatttacataattttgtgatagacaatagattacaaacagctaacaagtacttcaacgacaaagagggaaagaaagcaaacacaacatgaacagacttgacgcgagcagaacaacaacaaccgaattcttgaggacctgaccatcaaacagcgtacttgtcggctagctcgtaccaatgtaaaccacactacctatcgcacaaacgctgcatagttgtctccctccattgcgcacatcaagggcagaaatccttgaagggatgagggaccagccaactaaggggggttaagagtgaagaagcacatcaattgaaacttgccaaagaacaaccatctcccttgaaattgacgacgagcaccccataaacatcacatccaagcatcataaatcgtcatccaactcccttaaagggaggacacctctaagtagagagggcaagatcataggtccacctggcataagaatgatgtcatcaccaataggagacgtatgacgaagcaaaggtgtgacgaagcaaaggtttgaatggccacgcaacagccacatctaatatcgtctgcaaggccaaggccaacaaagaagacaacaaataggcaaccataaggcgagcagggacgatatagggcacctcccgacgcatcgggcgtgac

SEQ ID NO: 31099 - DNA, 7495 bp, Zea Mays
cgcctccgcccggcgcctccctctgcctcctctgctccgccctgccgccgcaaggatccaaaccccgtacgtcgccttctccgccgcctttcttcccgaggaattttgctctctttttatggcactgtgcttttgagaaggcctttaattgtgctgtctgggccacggaacggcaatgtcgcagcttggattagctgcaactgcctcgaaggccttgccactactccctaatcgccagagaagtccagctgggactacatttccatcatctgcattgccgaggccctcaaaccgaaggaaaagccatactcgttcacttcgtgatggtggaaatgaggtatcagatgccaaaaagcacagccagtcagttcgtcaaggtcttgctggcattatcgacatcccaagtgacgcagtttcggaagtcgatatttcacatggacctaaggatcctagggggccaacagattcctatcaaatgaatgggattatcaatgaaacacataatggaagacatgcctcagggtccatggttgttgaattttgtgcagcactaggtggcaaaacaccaattcacagtatattagtggccaacaatggaatggcggcaacaaagttcatgaggagtgtccgtacatgggctaatgatacttttggatctgagaaggcaattcatctcatagctatggcaactccggaagacatgaggataaatgcagaacacatcagacttgctgatcaattcgtagaggtgcctggtggaacaaacaataataactatgccaacgttcaactcatagtggagatagcagaaagagtaggtgtttctgctgtttggcctggttggggtcatgcttctgagaatcctgagctgccggatgcattgaccgcaaaaggaatcgtttttcttgggccaccagcaacatcaatgaatgcattgggagataaggttggttcagctctcattgctcaagcagccggggtcccaactcttgcttggagtggatcgcatgttgaagttccattagagtgctgcttagacgcgatacctgaggagatgtatagaaaagcttgtgttactaccacagaggaggcagttgcaagttgtcaagtggttggttatcctgccatgattaaggcatcctggggaggtggtggtaaaggaataagaaaggttcataatgatgatgaggttagagcgctgtttaagcaagtacaaggtgaagtccctggctccccaatatttatcatgaggcttgcatcccagagtcggcatcttgaagttcagttgctttgtgatcaatatggcaatgtagcagcacttcacagtcgtgattgcagtgtacaacggcgacaccagaagattattgaagaaggcccagttactgttgctcctcgtgaaacagttaaagcacttgagcaggcagcaaggaggcttgctaaggctgtgggttatgttggtgcggctactgttgagtatctttacagcatggagactggagaatactattttctggagcttaatccccgactacaggttgagcatccagtcactgagtggatagctgaagtaaatctgcctgcagctcaagttgcagttggaatgggcatacctctttggcagattccaggagataagttttaaaagcaagcctaatgtttgggcctacttctcagtaaagtctggtggaggcattcatgaatttgctgattctcagtttggacatgtttttgcatatggactctctagaccagcagctataacaaacatgtctcttgcattaaaagagattcagattcgtggagaaattcattcaaatgttgattacacagttgacctcttaaacgcttcagacttcagagaaaacaagatccacactggttggctggatacaagaatagctatgcgtgttcaagctgagaggcccccatggtatatctcagtggttggaggtgctttatataaaacagtaaccaccaatgcagccactgtttctgaatatgttagttatctcaccaaaggccagattccaccaaagcatatatcccttgtcaattcaacagttaatttgaatatagaagggagcaaatacacaattgaaactgtcaggactgggcatggtaggtacaagttgcgaatgaatgattcaacagttgaggcgaatgtacaatctttatgtgatggtggcctcttaatgcagttggatggaaacagccatgtgatttatgcagaagaagaagctggcggtacacggcttcagattaatggaaagacatgcttgttgcagaatgaccatgatccatcaaagttattagctgagactccctgcaaacttcttcgctttttggttgctgatggtgctcatgttggtgcggatgtgccatatgcggaagttgaggttatgaagatgtgcatgcctctcttgtcacctgcttctggtgtcattcattgtatgatgtctgagggccaggcgttgcaggctggtgatcttatagcaaggctggatcttgatgacccttctgctgtgaaaagagctgaaccatttgatggaatgtttccactaatggacctccctgttgctgcctctagtcaagtacacaaaagatatgctgcaagtttgaatgctgctcgaatggtccttgcaggatatgagcacaatatcaatgaagtcgttcaagatttggtatgctgcctggacaatcctgagcttccttttctacagtgggatgaactaatgtctgttctagcaacgaggcttccaagaaatctcaagagtgagttagaggataaatacaaggaatacaagttgaatttttaccatgggaaaaacaaggacttcccatccaagttgctaagagacatcgtcgaggaaaatcttgcatatggttcagagaaggaaaaggctacaaatgagcgacttgttgagcctcttatgaacctactgaagtcatatgagggtgggagagaaagccatgcacattttgttgtcaagtctctttttgaggagtatcttaccgtggaagaacttttcagtgatggcattcagtctgacgtgattgaaaccttgcgtcatcagcacagtaaagacctgcagaaggttgtagacatcgtgctgtctcaccagggtgtgaggaacaaagctaagcttgtaacagcacttatggaaaagctggtttatccaaatcctggtgcgtacagggatctgttggttcgcttttcgtccctcaatcataaaagatattataagttggcccttaaagcaagtgaacttcttgaacaaaccaaactaagtgaactctgttccagcattgcaagaagcctttcagatctggggatgcataagggagaaatgactattaaggatagcatggaagatttagtctctgccccattgcctgttgaagatgctcttatttctttgtttgattacagtgatccaactgttcagcagaaagtgattgtgacatacatatcacgattgtaccagcctcatcttgtgaaggatagcatccaaatgaaattcaaagaatctggtgctattgttttttgggaattttctgaagggcatgttgatactagaaatggacaaggggctattcttggtgggaagagatggggtgccatggtcgttctcagatcacttgaatctgcatcaacagccattatggctgcattaaaagattctgtacagtacaacaactctgaggtcaacacaatgcacattgtgttattgaatgctgaaactgaaagtaatataagtgggacaagtgatgaccaagctcaacataggatggaaaagcttaccaagatactgaaggatagtagtgttgcaagtgatctccaagctgctggtttgaaggttataagttgcattgttcaaagagatgcaggtcgcatgccaatgcgccacacattcctctggtttgatgaaaagaactgttatgaagaagagcatattctccggcatgtggagcctcccctctctgcacttcttgaattgggtaagttgaaagtgaaaggatacaacgaaatgaagtatactccatcacgtgatcgtcaatggcatatctacacactaagaaatactgaaaaccccaaaatgttgcatagggtatttttccgaactattgtcaggcaacccaatgcaggcaacaagtttacgtcggcacaggtcagcgacactggattaggatgtcctgaagaatctctgtcatttacatcgaatagcatcttaagatcactgatgactgctatagaagaattagagcttcatgcgattaggacaggtcattctcacatgtttttgtgcatactgaaagaacaaaagcttcttgatctcgtcccattttcagggagtacaattgttgacgttggccaagatgaagctactgcttgttcacttttaagatcaatggctttgaagatacatgaacttgttggtgcaaggatgcatcatctttctgtatgccagtgggaggtgaaactcaagttggactgtgatggacctgcaagtggtacctggagagtcgtaactacaaatgtcactagtcacacctgcaccattgatatctaccgagaagtggaagatacagaatcgcagaagttactataccattcagctacttcgtcagctggtccaatgcatggtgttgcactgaataatccttatcaacctttgagtgtgattgatctaaagcgctgctctgctaggaacaacagaacaacatattgctacgattttccgctggcatttgaaactgcactgcagaagtcatggcaatccaactgttctagtgttcctgaaggcagtgaaaatagtaaatcctacgtgaaatcaactgagctggtgtttgctgaaaaacatgggtcctggggcactcctataattcccatggaacgtcctgctgggctcaatgacattggtatggtcgcttggatcttggaaatgtcaacacctgaatttcccaatggcaggcagattattgttgtagcaaatgatattactttcagagctggatcattcggcccaagggaagatgcattttttgaagctgtcaccaacctggcttgcgaaaggaagcttccccttatatacttggcagcaaactctggtgctaggattggcatagctgatgaagtgaaatcttgcttccgtgttgggtggtctgatgaacgcagccctgaacgagggtttcagtacatctatctgactgaagaagactatgctcgtattagctcttctgttatagcacataagctgcagctagataatggtgaaattaggtggattattgactctgttgtgggcaaggaggatgggcttggtgttgagaacatacatggaagtgctgctattgccagtgcttattctagggcatatgaggagacatttacacttacatttgtgactgggcggactgtaggaataggagcctatcttgctcgacttggtatacggtgcatacagcgccttgaccagcctattattttaacagggttttctgccctgaacaagctccttgggcgagaagtgtacagctcccacatgcagctgggtggtcctaagatcatggcgaccaatggtgttgtccacttgaccgtttcagatgatcttgaaggtgtttccaatatattgaggtggctcagctatgttcctgcaaacattggtggacctcttcctattaccaaacctttggaccctccagatagacctgtcgcatacatccctgagaacacatgcgatccgcgtgcagccatccgtggtgtagatgacagccaagggaaatggttgggtggtatgtttgacaaagacagctttgtggagacatttgaaggatgggcaaaaacagtggttactggcagagcaaagcttggaggaattcctgtgggtgttatagctgtggagacacagaccatgatgcagctcatccctgctgatccaggtcaacttgattcccatgagcgatctgttcctcgggctggacaagtgtggttcccagattctgcaaccaagacagctcaggcattattagacttcaaccgtgaaggattgcctctgttcatcctggctaactggagaggcttttctgggggacagagagatctctttgaaggtattcttcaggctgggtcagcaattgttgagaaccttaggacatataatcagcctgcgtttgtctacattcctatggctggagagcttcgtggaggagcttgggttgtgatcgatagcaaaataaatccagaccgcattgagtgttatgctgagaggactgccaaaggtaatgtgctcgaacctcaagggttaattgaaattaagttcaggtcagaggaactccaagactgtatgggcaggcttgacccagagttgataaatctgaaagcaaaacttcaagatgcaaagcatggaaatggaagtctaccagacatagaatcgcttcagaagagtatagaagcgcgtacaaaacagttgttacctttatatacccagattgcagtacgctttgctgaattgcatgatacttccctgagaatggcagctaaaggcgtgattaagaaagttgtagactgggaagaatcacgctctttcttctataaaaggctacggaggaggatctctgaagatcttcttgcaaaagaaataagacgaataattggtgacaacttcacgcaccaatcggcgatggagcttatcaatgaatggtacctggcttctcaggccacaacaggaagcactgctggatgggatgatgatgatgcttttgttgcctggaaggacagtcctgaaaactacaagggatatatccaagagctaagggctcaaaaagtatctcagtcgctctctgatcttgctgactccagttcagatctacaagcattctcgcagggtctttctacactattagataagatggatccttctcagagagtgaagtttgttcaggaagtcaagaaggttcttggatgatgatatgataccaacacatccaacacaatatgcgcatgctacatgttatttttcaagtacatacatagaaggatattgcttggccttgattgatcatgtctgatctaagtcgatcattattttcttgaaacttcctttcggacgtggtgctatggttgatgaatttggatgtgtgcgttctgccaggtgtaagcccaaaggtttatacagaccgagttaaggttaggaagagcacgagtgaacttgttctggttttgcagtggttaaggcagaaagttgtttcactgtagttctgagatgtattaccagcggcgctgtaattttagggtgtataatgcggatgctagtaaacaattgagtggttcattaaattttgaactcgaataatatgtttctgtaggcacatgtgacgtaccactacatgaaataaatgtcgctgaactagggcaccagagttttggtaggactaaggttttgtttggttatgggataaggtgagcatctccagcgttcccaaacttgaatttccc

SEQ ID NO: 31100 - DNA, 3121 bp, Zea Mays
gcgtatccctctatcccactgcgcgcccgtgagcccaacccaaccatgagtccacgaccacgaccactcctgtagtctagatgaaaagggagggcctgccgcctgcgcggctgcgcccggcacgcgcaaagcgaaaaagcgccggcgagcaaaggagagcgagggaatcgggttggcgtcgggtgggcagcctggcatcccattcctgccttcctccccgaagagccggacggacttcgttttctcccccctcacccacactgccactgactgcatgctctccgattccgctcccgcggtcccgaccccgcctcctccttcgtcgggctcgatgcggcggcgcctcgcgccggtgcttcttctcgccgccgcgctgctgctggcggcgcgcccgtggccagcggtgatcgcagcagattgtcctttggatttgagttggcccaactacggactgatagcttccgtgtgctcggaccaaaatggacactcaaagtgttgccgctacatcaatgctgttcttgcggtctcgtctgccatgtatgcaaacacaacaggcactcttggggttccggctcaattttctgattcctgcattgccaatatctctgatacattggtgtcaaaggggatactgcctactgccgcttcgttttgtggtcttgggatcaaaattcaagtgtcctatcagtgtgatgggatgaccaccatccttgagatgttgcagtctccgaatttcattgatatcacaagaagctgtgcaactacactttcagatgatatcacctgcaagaggtgcttaaactctggtctgtcgtacctccgccatcttgtcggggaacaagataatgtcaccttgaatacctgccgtgatgctgcttttgttgcacttgtgagtcaagggaatatatctaccgttgatacagctggttgcttttttagtgttcaggggcttagtgctcttcaagtgaacatatctggaccagctccaactggacttgttgcgccagatatttctcctagtccacttacggtgcaagttcctgtagtgccacccaagcatcatcgcagttacaagcttgttctgttcccagctattggagttttagtcactggtgtagcaattctactaatgatagtactgattttcctaatccgtagaaagaataaagaactcaaaaagatggaaggaaataaccctctggatgcatggagtttttcctgtgtcaagaaaggccaagaaggcaattccaccatttttggcagatttagttacaaagaaatgaagaatgcaacaaggaacttcagcacagtgttaggaggaggtgaaaatggtacagtattcagaggacaactaaatgatggatctgtggttgctatcagacgcgttgagagttcaccaaaacaaagtcacaatgaattttgtaaagaaatggaatttcttgggcggttgcatcatcgacatcttgttggactaaaagggttttgttcaacaagatttgagagatttcaggtgtatgaatacatggaaaatggaagccttcaagatcacctacattcgccaagtaaacatctgctaccatggaaaaatagggtccaaattgccatcgatgttgccaatgctctggagtaccttcatttttattgtgatcctccactataccatggagatgttaagcctagcaatgtcttcttggacaagaattaccttgcaaagtagtggcaatacaactcccagttgcacaccagtaaatgtcaaggcccaagcaactcctggctacgtagaccccgagtacatggtgacccaggagttgaccccgaagagcgacgtgtacagctacggcgtgctgttgctggagctggtgacggggaagccggtgatccaggacaacaagagtctggtggagtggtcccgcgagctgatcggcacggactaccggctccacgagctggtcgacccgtctgtggcggacgcgttcgacctggacgagttgcaggtggtggcggacgtgattcactggtgcacgcaccgggacggcgcagcgcggccgtccatgaagcaggtgctccgcatcctgtatgagcggctggacccgctgtccgggcggttcgcgcgcgccgtggagggcgaggaggggtactactactgccacggtggcgggcgggtgaaggggaagcaggcgggcgacggcgtgatccagttcagcggcgacgcggcgcggtcttggctgccgtcgtcgagcagcacgtccaggtcgcactgcagccgcagcgtgctgctggagtgcaactcgcccgagccgcagtcgtccccggcccacggcaacggagcgttcctggcttgatagcaccggtccgtcacccgtgttgcgtccgtttcatggtctgcactgcaccgcaggtctggcttgatggctctgccagctgccattttttgagaggaccttgtgataatggtagggatcgatccgtgcaccgttcatggtggttcgtgatgactgacgagtgacgactgacggatcctgctacgggatcgggagcccgtgcatggctgcatgagagtcatgtggagccagaggcagagagtgatgggagcacaactgtgctctgtgcaagagctgggctctggacttgtgggagagccggagaggcttgctcaagtttcctctgcgagaattttggctactgctccagttctacttgtacgtttcacttctgctttgctgatgcttgcatgatgtcacctgcttgaacgtccttgcctccttggggggtccattctcagtatctgtcaagtgagtccttggaactctgttatagactcttttgtgggccggcaatatgccaggcgccagaataattagacccagctatttgttagatggtggctgagtgttagagaagttttaggaggcttatcctccctggagcttatctccttaataatctcctaagttgttctctggagcttatctcttaataatctcctaagttgttaggccccggagctataagggtgcctcagattgtaatagggttttttatcaaaagaagtcgcacctgcgtgggcggttgcttgatcacaatggcgacccacacgcgccctggtgatcgtgttcctcag

SEQ ID NO: 31101 - DNA, 1367 bp, Zea Mays
cttgctcccagccaaatcattcacgtatccatcttcaagccagccgtctccttatccctacgacgccgctcacctgtgctcatcttccagccgccctctccgcccagcagcagagcacaccatcctctccactcggatccccaagccctcgcctccagctttgccacgacatccgtcccctgctcggacctccacccggccgcgtcctcgccggtggccagcgccgctgcatcgccattcctagcgtcggccttggcaccgcttccccgagcgccccagtcgagctcgcccatcctctgctctagccctttctccacgccgtagctgatctcgcccctctcctcagccatggacacgacgacctgcagcccttcttggtggccaagcccatcttcctgctcgcgccccctctttttccacctctgcgcgtatcagctcgtccaacccccatggcaaatgttctttccctccctgcagcagcaccttggtggttgtcgagcagcacgtcgcgcttgcgcagcctcggtcacgacgttgttcaccccgctaaccattggtgtcatacctcacgtgtcatgtgttcgccgaaatgcctaaacatgtagtctgtcgtcgttgtatccacagtcaattttagtcatggtacgctaatgatcgagatgcgaaggccagggtctaggttgaccccaagtggtgcaaaggatggcctacttcgagaggcgatgtcagcggaccaatctagaagattgatgatctctacataaaaacatgattacattgattcaactctgatctggttgtggaaactgagatcattgtaactcaaatgagagcttggcacttagcatatagatgccactagaaccaatctggaaatactgtgagatatagagtgataaaaggcattaattgaattgtgtatgcaactattgtggtatatcaatgaccttccgagaagatacaatggcgttcttagtagtaacgctgcttgatttctatagttggagtcatcacacagctaacatttgcactttaactgtttggtgaaatgcttgggagaaagaggccagcaagaatggagtcatggaacatcggcaggaggagtgcagcagcggcaaccgatgtatcccttgaacaatctggttttgacaagatgcaaatcaatctagtgtacattgtattccacacttgcaaagattgtttggctaattacaagattatttcagtgttttggtttggattaagagtacacttatgtatgaaatattgattggtactcatttatattatttttattatatcattattaaatatatatgtctgtgtatttctctttcaaattattataatgtggaatctcaaaaatg

SEQ ID NO: 31102 - DNA, 2886 bp, Zea Mays
ataatctcgagcgcatgccgtatgcgaaagaaaaaatctctcgtctgcagtccagcttggaccgtggggaagcagcatatcctttgcggccgcaagagacgcggcgtagaacaaaggagccgccaagacggcaaggcgccaaggcgaccggacaggcctaggcgaagcgggcgcagctcctgccggtggtgggtagtggccctagcaataaacatcttgcccaaccggctctcgctacgcgcctacgcttcgtcaacaccggaaccgcccccaccccgccccgagcgccaattgcaccgccgctcccggccaaaccggccaagtcaacggcgcatccacttctccttaccatcccggaggtaatcttgcgccgattcggtgccgatttgcgccatccgcgaccggaggctccgccgggtcttgtgttcttgcggggcgggggctcaggacaacctggcctctgcttgattggattcggggcgttcggcgcctccagctcgcgatctttcctgccggtttcgtcgaccgctggtcaacctggccggtcggtcccgggggctcttcacctccgtgctgcctgccaccgtcgctttagtcaagtctcggccaagattttagctatctccggtcaaaaggctttaccgattcttggattggtggcttcttgggggcgagaagccggttcctgtttcgtctcttgtgctccagcatgttctgtagcacaccggttccccatctccagtgaaggtgttcgtgtgctcttggttttgtgcctcccggaatcgttcccggaaagctacttttggccgctgcggcgatggcgtcgagcaccagcgagatggccgaggggaaggagaagctgaagaggtccggcagcttgggaagcaacgatacgtatgtgcgtgcagacaagattgatcttacgagcctcgacatccagctggagaaccagctcaccaagacctggggcaaagccaatctcaaatcccaggggccaaaggaggagtgggagatcgaccttgcaaagctggagatccgctatgtcatcgctcaggggacgtatggcacggtctaccggggcacctacgatggacaggacgtcgcagtgaagcttttggattggggagaagatggttttgccacagaggctgaaactgctgctttacgaacatcatttaagacggaggttgctgtttggcataagctcagccaccctaatgttacaaagtaaagctgttgatccttagcttgctgattattaccaaaatttgcccatgaccagttcatagcagtttgttggtgcatctatggggaccacagaccttaagattccatcaaacaattccaatggtgctgcacgtacaaatttgccagcaagagcatgttgtgttgtggtagagtatcttgctggaggaactttgaagcaatatttgataaagaatagccgacggaagcttgcttataaagttgtggtccagcttgcattggatttggccagaggattgagctatctgcactccagaaagattgtacatcgggatgtgaaaagcgaaaacatgctgcttactccacagagaaaccttaagattgccgatttcggtgttgctcgtgttgaggctcagaatccaaaggacatgactggtgcaacaggcacacttggttatatggctccagaggttcttgatggtaagccatacaacaggaagtgtgatgtttatagttttggcatttgtttatgggaaatctattgctgtgacatgccttacccagacctaagttttgccgatgtctcatctgccgttgttcaccagaatttgcgcccagacattcctcgctgctgcccaagcgcatttgcgaatgttatgcggaaatgctgggatgcaaaccctgataaacgccctgatatggatgaagtggtgcagcttttagaggctctggacacgagcaaaggcggtggcatgatacctgatggccaatcatcaggatgcttatgcttcacaaaggctcgtggtccatagatacttttcatggccattttgagacatgctggtgctgtggctattgttgttcttttcgcccttaaatgtagtagaatcagttcattagttatgagactcaatgtcggctggctaaactgcactttctaaaactcgctcgttatggcacttctctcatcgcttggaataaggtcacttgtctaaagaacaaaggtggtcttggagtgcttaatccgagaattcagaatgtggcccttctgatgaaatttgttcataagttttacaatagactggacattccttgggtccatatggtgcgggactcctactattcttcggtcagatcccccactgctctcataagaaagggcccttctggtggagagatgttacacaattactcacctacttcagaggatatgccatgcctcgtgtgggtgatggaagcattatcctcttttggcaggatgtttggaacaatcacgcccccatgacggctttcccctgcctctattccttagcaaaaaaaaataaggaatccacaatgctggcattcatcagtaatgtctttagaagataattttcacactcctctgtcatgcaggctcaggaatacattatcttttcatatatgatcgaatgctggaagctagggaagagacggataaatggatttacccttaggaaacaacaagttcatctcctcgaaattctataatatcatctttgcatccatcaatcctctcgcgattttttttatggatttggtctcatctttcggctgactgcctgactgcgtaacccaaacgctgtattaggattcccatcttttgcatatccttattggagttaacctaatgttggttaataaagttatgcgacaacttgt

SEQ ID NO: 31103 - DNA, 4129 bp, Zea Mays
gccctcactcgctccagtctctccctctcatggcctcagcctcagcctcactcgctcgctcgcaccaccagctttgctccagagtcctgactcctcctagccttctcctccctctctcccctaccaccacacaacgggataaaccccagcacgaggccggagctgctgctggaaccgtcaggccgtgaagagcctgcggttcgatctgctgcaagagctcctcgtcgatctcttctctgcgaggtttcggtctgaggtatggcgtattctggacaaaggcatgctggtgttgggagctcctcgaggccagctaatggattcaagggggcagccaactcggtggagttcctgggtagggagatgctgggaatgcgactgagggatgccaagcccgacacagatgatgaaagggagatgtggtcaagttcagatgtgactgatagttctagtaatgaagctggtcatgtaatagcgactactgttcacgggcgcaacggcctgcctaaacagtctgtcacatacatcgctgaacatgtggttggaactggttcttttggggttgtgtatcaggcaaaatgccgagaaacaggggaaattgttgccataaaaaaggtccttcaagataagcgttataagaacagagagctgcaaatcatgcatatgcttgaccatcctaacatcatcggtcttaagcattacttcttttcaacaactgaaagggatgagctttatctcaaccttgttcttgagtttgttccagagacagtaaacaggattgcaaggcagtacaatcgaatgaatcagcggatgcccctcatttatgtcaaactgtacacgtatcaggtctgccttgactaggtggtttttactaatcattcatgttaaatgctgttttttctttataattttttcgttcagttttaccattggtcttctagctatagcacttctttgcacactattaaaaaaatcttttctctatgcattttttggaatagtacaaaaaagcatcttagaagccctcgcacactattattatcatttaactgattttaaagaagagaaggggacagataccggaaaatgagggtactagtttggtagagttgtctaatggtcatgcgcatgccgcatgccacatgttccgcaatcaaccttacgcatcatggattctgcaggacattattttgtcatgttcattcatttgaaataagcttaaagcaatggagaaaacagagcatgggtccccatgacttcctctggtactgggtcctgccccctttagtcatatagggtcacaaatcaaaataatatacatgtttgacttaggtctattttggaccgtttctgtcttttcttaatatattgaaacgcagctctcctgcattttcgagagaagaaaatgtatgagtgtgtctgttccctgaaaactaaacatgttactactttaatgtatgtgctaccttgtagaactaaaattgtggcgacatcggtagcttcttggcatccatatttatgttttatcctttgaaacagaatatatattcctcatgttcttcaacagtagcactgtactggaagtatggaacttctattggagttgcctatcaatgattcacattgtttgtttccatgcagaatctaagataaatattattgagacataatggtgacagcttgtcaattatcctgcctttggaattattttctactacttgcttcctatatgtttagagtgatctgtttgaatgatcacttgggtttacgacgcgtgtccaccagacatttaaattcctgagtttagttgacgtagtgattttaatccattcttcacggactagtactgtctgtttattgtatgacttacagttagtgcaggcatgaatgtttgcatgactcaaatcttattttgattcagctgtattttgtcttttatgacagtgagaatatctgctattctgttttaatataattttgtttgctccatacaatcgttggagtcaaacaatttctagctgccttaccttttagtgtcatacccaatcgcagatttctgctttgcattaatttatctaatttgtcctgcagatatgccgagcgcttgcttatatacataactgcattggcatctgccaccgtgatatcaaaccgcagaatgttcttgtgagatatgattttttttcttttctataatgatttttgttgctttacatgtatcattcgcatttgttggatgttttgttgctgggatggtatgataacgccatagaatagcaattggtttttacaagtgggactgaatttttagatcatgtgtagcccgatgtcataattattggtagtttcacccaacatctacggcactagcagtttgaaattggaaatgtcaatccacgtgtgcattatttagtttcatatataggtgctatcccatgtgcatcattttattcctaggctgcacatatcatattttataccctgtgtatgctgtttttcttgtcaatggtatcttactatcttctcttgtggaacatttcgtcatcatctgttcttttataacaaggctggacaaaaaaccatgctcccagttccacagatgtcaattggttctgtacatcccactagtgcgtaaatgctaaactaattcaaaatttatttgagcaaactgtgagcctcggaaaggagcatggaagatcaatgcaactagctagcttgttaacccaccatgactccataaccgcatagattagagattgtttgaagaagcaggagaaactgaaactcaattgtagagtatgtacgaaacgaggtttccataattgccttctttttgtctcctttgaatgctgaggtagctactgtttagctacttgaccttttctttacctcgggaatagcagattacatatttatgatgagtgatgctttttgctaatacttctactgtaggttaacccacatacacaccaactcaaaatttgcgatttcggaagtgctaaagtattggtcagaggagagccaaacatctcctacatatgctcaaggtattatcgagcaccagagctcatatttggtgcaacggaatatactactgctattgatttgtggtcaacaggctgtgtcatggcagagctgcttctaggacaggctctgtttcctggagaaagtggagtcgaccaactagttgagatcatcaaggttttgggtactccaacaagggaagagatcaagtgcatgaacccaaactatacggagttcaagttcccacaaattaaagctcatccgtggcacaaggtttttcaaagaaggcttccacctgaagcagtggaccttgttagcaggtttctacaatactcaccaaatctacggtgcactgctttggaggcctgtatgcaccctttcttcgatgagctgagagacccaaacactcgtctacccaatggtcggcctctgccgcctctcttcaacttcagatctcaagagctaaaaggcgttcccccagaagtcatcgatcgccttgtcccagagcactcaagaaggcagagtttgttcatggcgctaaggacctagtttttgccgttctttttgcccccttttttcccaccgtttgccaccttgagggaagcttgtaaagctatagcttctcctttcccctcgtccttactttcctcccctctctttcttccgagctttgtgtggatgagagatccttgagatacactgctagagctgtgagttccaggatgtgaggttcgagtgtgtgtgatgtgcagttgtcgcctttgaggtcggagatttcagttgcagtgttgtgagaggcttgtgaagcttttttgtctacttttcagtgcttctctggcttgaagttttccttcaattcttgtgaactggcttcaagatttggcttcgtgaaccctgtgtgcgtgtaaaagtactggttggatgctgctgcaccaattctggaaaaaaaaagcttacaactaaacacctacttatgttttgtttagccaaattcagtgccttcctgttatgcattgcggttcaagatcagatgaatttatatagggtctgattatttagccaaattcagtgccttcctgttatccatttcaatatggaagagttcaac

SEQ ID NO: 31104 - DNA, 3825 bp, Zea Mays
tcatgatcctgtccatctcatcccttccgcacatcgcctcctggcacaaaccccgtaacacgcttctgcggttatatccagcctaatgcctgcagacattttgaggctttataagcgacagaccggtcccactcgctctatcgtcatctccaccaagtcgaaaaaaaggaaaggggcaaatcagcggcggcggagcaaaggaaagcttttggcagatagatggtggataaggtgaaggtggttggtgcccctggaaaaaggaagaatgccttttgcggggatagcttcggaaggatgactgcaggtggtggcgctggtgcttggttgcctagggtttcaggccagccggctgacttggaggcggcaagtgtaatggctactgagagtgctgtcagattaattggtggaacgggagctagggactggagtaagggatttggtgcattcgactcttcagtgggtgccctttcaggggaagacttgggatttgtagataatgatgctggggtttatgggggctggagcaaatctgttccaaatcgcagtggaagcgcgccacctagcatggaaggatctcttgctgctcttggccatctcattggccagcagagtgggagctttgaagctagtttggcaaccttggataacataactgacagttccaagtctgaggagcaagtacttgctgatccagcatattttgagtattatggctccaaggtgaatctgaatccaaggctccctcccccacttatttcaagggagagccgccgattaatgaaccgtgttggcaaggccaaagagtggagggtggtctctcaagataacagcaacaaagactctatatacattcctcgatccacattgtcaactcacaaagaagaacctgaggatgataaatctccaagattggatttaagttcagtggaggatgcccagattatctccagtgcatccaactttcagagccaggattttatgctggagagctttcgacagagtgctgcttctttgcctaacagttcatcttctaacccttcaaatatcaatactggtgattctatgcctgtatattctgacataaatttgtcagttgatgctgtcaagcaatcagacttgaactcctggacaccaaaaaggccactgaaaagtactgttagcaatgatgtttcatcgctgcccctttccagttcatcatcatattctggtagaaaacctggtatgcaaacttctcagcaagaaaaggcggctgtagacaccaaacatggaaatgttgtgcttggcagtggtgcagctgtttctgaacttgataatgtggactccagtatgaacaatttgatgataagtttggatggccatgcatcctcacctgtcaagcagaagtggcaggacaatgtcttgtggcagtatggctcctttctcccagcccaaggtgatcctactcaaggaatccatcttccccatgtaccttctattgataacctgtctcatgctcagctcaagttacctgctggtgacatgcaccagtttttaccgcagcctagtatgacaacacctttctatacaccaaattcgtttggaaacccttattatccgaatttgcaccctggtaatgcttttccaacctcaattggaactggagggtacgctgtaagtggttccattttgccaccttttgtggctggctttgctccccaaggtcctcttgctacacctctcgacagtcctatgactccaagctttagtggtaggccatctggattttctccagcagggaatcttacagggggaacagagtttatgcagtcatataaagtatacggacaacctggggctggtatgcagccatccattcccgattcgaactttattcatttctttcagcatccctctttatttcagtatactggtggaaatcaatacaatacaatgggtccaagatttactgttgtgaatccaactgaaagctttgatccacaaaagatgatacatcaagctgcatatccatctgatcagaggcttccacttccaagaactggctttcctaattctcctacatccagaagaggagggactgttccaaattatcaaggcatatcatcctatgttggagggccgatgacttatcctacaagtccagtgtttcagggacaaaccttgcctggagtattgcctcctgataggagaaatgaccctgttggatttcagtccccctcaagaaacatcaccgatagtcctgggattcaaaggcagcgagacagacagaagtttgatgaatcaaaaacttgctctttcttagaagagttgaagtccaacagagcccgcagggttgaactatctgacatcacaggtcgtataattgaatacagtgctgaccaacatggtagccgattcattcaacagaagttggaaaattgcactgccgaagagaaggcatatgtgtttgcagaggttcttcctcatgcttcatcactaatgactgacgttttcgggaattatgtgatccagaagttttttgaacatggaactcgtgagcaaaggagggatcttgctaccaagctcgttggtcatgttttgcctctgagtcttcagatgtatggctgccgtgtaatccagaaggctcttgaagttatggaacttgaccagaaaatagatctagttcatgagcttgatggacatgttatgagatgtgttcgtgatcaaaatggaaatcacgttatacaaaagtgcattgagtgtgtccctacagaacatattggttttgtagtatctgcttttcagggacaagttgctagcctttcaatgcacccatatggctgccgtgtaattcagagagttttggagcactgcggtggtacctcacaaagccagtgcatagtagatgagatattgcagtcggcgtgcgtccttgcgcaagatcagtatggcaactatgttacacagcatgttctagaaagaggaaatgctcatgagaggagccaaattattattaaattggctgggcaggttgttaccatgagccaaaataaatttgcatcaaatgtgatagagaagtgttttcaacatggtgatatggcggagcgggatctcttgatcaggcagattgtggagcagacagagggcaatgacaatttgctggcaatgatgaaggaccagtatgcgaattacgtggtccagaagatactcgaaacatgcaatgagaaccagcgggaactcctggtcagccgtgtcaagggccacatgcaagcattgaggaagtacacatacggcaagcacattgtaagccgagttgagcagctctgcggcgacggaaccgccgagccggattcttgaaatgaacccgcctaattcttcccaggccaggggtgtgagggtgtcttgttcttttgctcagtccatcagtggagaaagcagaacagatcaagtccacctctggtgcttccaaacagactaacaaaactgtcatcgaagattgtataggtgtgactcgcttcaggatagtcttgaggttctagaacaggaacttagtggtgtgcatcagtgtatctatgttagggtgtgcctatttacagaataacagtggttggctagctgtgtgcagaagggagtttagcgttatggtttgtatgtgatacatattatgcctggtaatgtatttgctttcttgcatcgccagttgtggggtaaatgcaatgttcacgcattgtcctgatatctcgttcagttcaagttgcgttttctacatggcaatggaggccagctgcatcattttttttggtttggtgaaaaaagaaaggttgtaccttcgcaccagttaggcatgac

SEQ ID NO: 31105 - DNA, 3478 bp, Zea Mays
cctggctgtaaggggtcatgaaccattttggctatcagatatcaaatcagatcgtcttcctcgctgttatcttcttcttcaacccttcttctacctctcttctctccgatattcccttctaggtgctaacatttggtatcagactagcgcaatcctgattgtcatccgcgttcgattgctgtggtcggaatggaatccgcgatgcagcagattttggaagctttgggccagatggaggagcgattgacggcaacgctgggagccagatgcgacgcgatcgagcaacgcagcacgacaaccgtggcaaatctgaggggcggccgcgtagggctggacgctggcgcacgcgtggtcgtcgacaacttctccttcagagtcggagtcagagtttctcacctcccttgctgcccaggctccctcggccgaggaggccatggtcgcggtcgcggacgcggggagccccgcgaggctcaacccgctccccaacaccgacgcagaggaggaggaggttctcaccatcacgcccaccaagtgttcgacaatatacctcaaccgcggcatctactccgtccgcaacccgatcctccaccgtcagcacctactccgggactgcgacggcaaccacgtcgacatccttcctacctccgagttcgacgagggtcccatcttcgacgaggagccctgcttccaccgtaacctcctggattcagatccagactctccctacgactgggtcgtccccgtcatcgccgtccacagcagcggctacactgagatgtcccacagcgaagccgacaaggtccccgcgaccgccgcgctacccaacctgcgcgagaagatctgctgtcggttcgtcgataggacgaagctgtccagccatgtccgcctcatccacttctccctaccgtcgccggaccaggcgctcggcatccccatcggcacgcatgtcttcgactgcaccagcgttgacgggaagccgtgtatgcgatcgtacacgccgacgagcaaggaggacgaggttctcgccactacgcccatcaggtgtttgacgaattgctttagcatcatacagtgtcgtttcttgcactcgtgcaattgcagaagggatgcagtgcagcataggcaatcatggccaccgcctgtacagtatgggatactgggtgatggtgttcaagtctggcttccgccttggccaccacctgtttgggaattctggctgtcactgaagattactggtccacagatgatgcattcggtaggatactttggattgccagttatgccagcgacatgtattacaatttcagagattgtgtctggttcaagcgagcaaatatttcctgaaatatttctacaaagcttacatgagtgcagagtttgtcttagtgaaaatactggcagaagtttactccagctcccatgccaccatttgttttgcttgatgtgtatgaagtctaattgcagaattcatgtgatagaagcggatttaacccaggtctggttaagagaagatgcagttgcttacttcaaaaatatgtttgatggtggcctgaggccaacctcaaatgcatttaacaaagttatagatggctgggtgaaggttgatatgctcaacgaggcccatgggttctttgatatgatgcctgaaaaggacatagatgatgttacagtggtcattttctactttggaggacaacatgtgggctgggaaatgaagacagaatggttgtctaatggttggctatgtttggtatgtggtgcatctgatactcaagagcttcctctacatttcattaaacttgcaaaggatacgtacacatctgactgcatgttcaaaaaaatcggatatggcactgtgagtgaggctttggtttacatgctgtccttactatttgttcgaagagattattgcaacgaggaaccattttttaggaatgtgcttgagcattatcaatgtggcgttgagatgatacggagggatttatttattggccattggaaacattatcttcaaagtgctataccacttcaaccctgctttgatggtctcataaatgttggcaagatttgggtgaattactgactctcaactgccctgctgacagagcaatggtgctgctgatgtaccaaattgagttgagactgctcaattgggcctgggaagacgagtgtgttttcaacctgtgtctacttggattacacagtgctgttcatagcagcctagccaatgcttataaatcctggttgataacaatgattcaccgaacacactcaattggccaagatcatttttggcataacgtggataggtgtgtggtgtgtggaattaaggatagatgctgtgcaagattggcaaagctagttttatctgctacactgacacaagattctggcaagctttctcaacttgaattgcaccatccattgttgttgaatactcagtcaagcggcttgaggacaagccgcatttcaagcagtggggaatgtcagcatatcatcttctcctcaagtcaaagatggtaccagaagaatacggacaatgctgctacgacgacgatgactatacatggagtatatgaagatggaggcatcgcgggaaaaggcacaggcgtgccaggagagcgggctcggtgtctaatgaaaactagcgtccgtctagcttgggctggagtgggccttgtaaatgttggcaggtcgattggtcgtgtggaccgagtggtcgtgtggttacaagtaacacccaaaccctggctgtaaggggtcatgaaccattttggctatcagatatcaaatcagatcgtcttcctcgctgttatcttcttcttcaacccttcttctacctctcttctctccgatattcccttctaggtgctaacaccagcttggctggccgcatcagcatcgcttgaataaataccgccatctgtatgaagtgaggaggtgatgccaagcagatgtgtaaccatttagaatgcttgtggtggaccaactgcggacaagctgggaagaaggcacgaacatgtagcagctctctatcatcgattgcggttgcggcttgcaagcattctactcggcacaggacacgtaccgagtgaaagcaactgttcctattgccgtgccggtaagtactacactgctactctccttttcccacgagtttgaccagctcggccttggcagcttccatgaccactgggaaatcaacctccaaatagcggcccctgccaaccaaaattccagcctgtgagatacataaactggtagcaaggaaaaatatatacatgagagggagagaagtggcgggaagagaccagaagtggttcttggaccaggtggcagatggaaaagccgggcttgatatgccatgcataatcctagcaacggcccttggcgtgaatttcgcaaacgaattgcttttaaggaacacctgtggtacagttaaaagtgttgtcatagacgacaaaaaaatcatgatgga

SEQ ID NO: 31106 - DNA, 2746 bp, Zea Mays
ggggagggcaggggagcattggtagcagcagtattctttcccttcctgctcgatgcatccctttcttctctagcctcgcaaagtcgcactctttgggtgttctcgcctcctcctcgggcgacgctgccgccggcggagacagagttcacccaaacctatgaattatggctcatatattgttcacctccaaaaatcactattgaagaggactctaaggggagagcattatgtaaagctgtatagctaccgctacttgattaatggttttgctgttgtcattactcctcggcaggcagacaagctatccgggagaaaagaagtagcgaatgtgatgctggattactcagttaggacagcaacaactcatacccctgaatttcttggactgccacaaggagcctgggttcaagaaggtggtccacaattcgcgggacagggtgttgtcattggcctcatcgacacaggaatagatccaacccaccctagctttgcagatgatctatcgactgatagttatccagtacctgctcactactctggcatttgtgaggttacaaatgattttccatctggatcttgcaatagaaagctcgtgggggctcagcattttgcagcatctgcaataactagaggagtcttcaacgcatctcaggatcttgcttcaccatctgatagtgatggccatgggacgcatacagcatccattgctgctggcaatcatggaattcctgttgttgtggctgggcatcaatttggaaatgcaagcggcatggctcctcgtgcacacattgctgtctataaagctctttacaaaagctttggtggttttgctgctgatgttgtggctgcaatagatcaggcagctgaagataatgttgacattatcagcttgtccattactcctaatcggaggcctcctggactcgcaacattcttcaatccaatagacatggcactcttgtcagctgtaaaagctggcatatttgtggtgcaagctgcaggaaatactggtccttcccctaaaagcatgtcttcctacagtccctggatatttactgttggagcttctgcccatgacagggtatacagtaactatgttgtgcttggcaacaatttgaccattcaaggagttggccttgctcctggaacggatggtgatcccatgtataatttagttgctgcaccacatgcactgaagaacaatacagccagttgtaatgaaatgtcccttggggagtgccaagattcgagtcacctagatgcagatttgataagaggaaagatactagtgtgcagctattctataagatttgtgcttggtctttcttctgtgaaacaagctctagatacagccaatgatgtcagcgccgcaggagttatattctatttagacccatttgttcttgggtttcaactgaacccaactccaatgcacatgcctgggcttataataccatcatctgatgactcaaaggtatttctcacttactacaatgactccctagtgagagatgggacatcaggtcaagttgttagctttggcggagttgctaaaatattagggggtctaaatccaaattatggaaattctgctccgaaagtaatgttctattctgctaggggtcctgaccctgaggacaacacactgtcaaatgctgatatcttgaaaccaaatctagtagcaccgggaagttccatttggggtgcttggagttcagttggattggattctgctgaatttgctggtgaaagtttcgcaatgctctctggcacaagtatggctgcgccccatgtcgctggcctcgccgctctaatcaagcagaagtttccttcttttagcccagcagctatagcttctgcactgtccacaaccacaactcttagtgacaggcaagggaaaccaatcatggcacagcgaacatacagcaacccagacttgacgcagtctccagcgacatcttttgatatggggaatggctttgtcaacgccaccgctgctttagacccggggctcataattgattgcagctatgatgatttcttctcctttctttgcggcataaatgggtctagcccagtcgtgaaaaactacactggcaacagctgcgtggcctccaccatgacaggagcagatctaaacctaccatcaatcaccatagccgtgctcaaccaaacaagaaccataacgagaacggtgatcaacgtggccgctgacgagagctactctgtcaattacagtgcccctaatggaactgcagtttccgtggtgccgacgcaatttttcattccaagcggacagaagcagctcgtgacctttgttgtgaacgccaccataaacagctccactgcgagcttcgggaacgttgggttccagggtaacaaaggccaccgggcgatcatcccattctcggtgatctccaaggttgtatacagttcctgatgactgatgagccgagctgatgcagtggatgcaatgcaaatgcaaatgcaaaccagggcctgactgatccagcgtatgcagtgatgacttgactgcatggaggtggagcttgcctttgactagagaaattttttgttggttgtggcgtgtacattctgaagcatgttgatgtaagtagctgagtgattaaccagtaactgtaaagagaatgtactgccagatatccagaatgggaaatccttgtgcaaccagaatgttaaatagcactctgttggggtttgatttaccgatatgatgttcgtgcga

SEQ ID NO: 31107 - DNA, 3162 bp, Zea Mays
cacgcgcacgcccgttcccctccctacgcgcgcgaatcacgcgcccgccgcacaggcccgccgccatcgccgattcccctaccccgcggatcacgcgcacgcccccacccccccaaccgcaattcccctccctacgtgcgcggatcacgcgcccgtcgccttgcccctacgaatcctgccgcaaaacccacctaccggcgccactacagcacacccgccgccatgccgctccctacgcccgcaacgatcgcctccctacgcgcgggtgaccggcagcacctcgtctctctcgatgtgccaatggcgccgcctccatcctacccagtctccacctctgtcaccgcgttcgtcaaggaggaggacgccccaacccctttggtggcctccccgatggcgccgcctctgtcctacccgacctcgagttcattgagatccagaaggagcaggcgcaaacttctccatgcacgggagatccatggaggcatcgcaagcccagatcccgctgtcgttaggagctaatggttggtgctcgtgtggcacggcaacgcgacgacggagcaaatcggagagcctcggtccgccctccaatatgagttcatctccttcctgctactccattgcctcttttggactcaattcactaaaatctccttctgtaattactattggccggagtggtacattatttgtgaattcctgataataaaaatctcagacagaagtcacaagcaagaaacataaaagagtcccccacgcataaaaatatggaaatgacatggcatcgagtccatgctccactaagtttccatcggtatataaaagcatgagcatccatgctcagtacacattcacacccatatcatgcatatatggattatgagaaagtacatcgtttggtattgtttgtatagggtgctctgttaagttcatgtcagtaaaagcgtaggagttgtctcattttgagcagaacaattaatttgttattaggcacgagtctttgtttagggttatgtctcatgaagtttggtacaattctaaatgttgtaaaacacaataaatcattttctaaatgagatatgtttttattgccgatgcgactgtgatgcatgttgttcattgatttggtaatggttagagcttgcagtcagttctaggtaggagttgggaaggctcaatacaccaattgtaccccaaattcatttctgattttagtgctatatatatgtgagaccaaatgttttttttctaatgggtcccatagtttgtgataacctatctgtgccacttatacacaagacattgtacaacactattggtctagaattttatttctcacatgatgttgcatattttgctttgcaatatagtcagacaaattgtgttgtctatgaggatccctttgccctgcacatttcatcactgtttggcactttggagttccatagttcatgtttagcagtggcaggatctaggcataagcttttctaaatatgtttaaacgctagatctgacaccgatgttcactagcgaatttagttcctccttgttaaaaaagtgaaagtatattaaatacatcagcttttgtattgaatatttcattatagtgtgccactatgccatctacaataagtcgtagatcactttcacttgcatgagcattcactgcagtcctcaactcatttatttgctaattttggtcctctagccatctagcatattctatgtcaaaagtcaacgctcctgcaacaagtttaaggcaattgtcaaagataattaattctgtattccactttttttgttgattactgatgctgccatttgctgtttgtattttttttcaggtacaaggttttcataaatccgagcattagtgatgtcctgtgcacaacaacaatagaggctctttcaatggggaaattcatgatctgcgcaagacatccatgaaatgagtttttcatgtcattttccgaactgtttgacatacaagacttcagaggagtttgttgcgagagtgaaagaggcaatggatagagaaccccaacagctaacccctgagcaaagatacaacctttcatgggaggcagcgactgagagattcatggagtactcagaccttgacaaggttctgaacaatgaggctgctcagcctaaacaaggtaggaaaagaaagaataaaagaacctcacagcctaatttgttcgacatcatggatggcggtctagcgttggcccatcgatgcttaaccggcaatgaggttctcaggctggcaaccgaagccattcctggtacccgggactacgataagagcaatgtgtggatatgggtctcttgcctcctcaagtacaacaccctgtatatggctggtgatgactgatgagcacccaaagctaatcgtagaaatgtgtagtacatggacatcaaaagttcatgactccagaagactgtcagcacaatattgtctgcttttgccattgaattagagaaacatagtcttaaaaatttaagagcatctctggccgcagagggcgcgcctgtgccaacgacggaagcaaagaagctggcgtcctccatcgcgaggtccaagcaggagatcacagaggacttctcgtcgattggcaggacatggcccccgcggcggtctaagaagagaccaggtgcaacgacaactcaatgaggtgaaggatgaggtcccatgggccatggtccatccactcagcgttcttcagatgttgttgagactttgaccacaacaattgaataaacatgtgcttatcatgaactattacatgtggtacaatttccttttgtgcttttctaattactagcgggaatgtttagcctctacaaaaacaataggaatgagtttctgtacacccgtggctatgtttgaattgttaatagtgagactgagagagtggtatggttaggatgttagatttgtgcttccagtgactgattagtatctttttttggtagctggtatgtgttagttttaccataagcttaaagtttaggtagaatgaagtggatgtgttgtgccaaattaaatgaattttcaaatgctcctacccgggctctgctttgtgttttttgaactcctttgtgatgttgaacaattgtgcttattagttggtaatttactgatattgcattgtcagtcca

SEQ ID NO: 31108 - DNA, 2245 bp, Zea Mays
ctctctggttgtattgctgctactacaagcactcgggggattggattggagcatcttcccagcaccacccacgcggaagccatgaccattcagttgctccgctgacgactcctctgacgacagcacggctgcgctgacctgcaggcctctcgcccacgctgccctgacagggtaaagtcagggggtggcgtgtgtgggtgggggggggggacaatcaggtgaataatcatggacagaagagctggggcgatcctagtgttcctgctcgtcgtcctggtctgggatgtggcggcggtcgccgagaccgagcctggcagcgtgcggctagtacaggaggcgccacataggaaggtggtggaggatggggccaaggcggggagggtgccggtgtcgaccgtcgcgtggtccacgcttgccatggccgcggcgacggggttgggagcggtgcccttctttttcatggagctcgaagcgcagtgggctggcctttgcaatgggctggcggccggggtgatgctggccgccagctttgaccttgtgcaggaagggcaggtgtatggcagtgggagctgggttgtgttcggaattctgagtggaggtatatttatttggctttgtaagaagtttcttgagcaatatggagaagtaagcatgttagatataaaaggggcagatgcaagtaaagttattcttgttgttggaataatgactcttcattcttttggagaaggctctggtgtgggtgtttcctttgctggctcaaaagggttctctcagggtcttctagttactatagctatagcagtgcacaacataccagaaggcttagcagtaagcatggttctcgcgtctagaggggtgtccccccaaaaggcaatgatgtggagtatcattacatctttaccacagccaattgttgctgttcctgcattcctctgtgccgatgcattccagaaggtgcttcccttttgtactggtttcgcagcagggtgcatgatatggattgttatagcggaggttcttcctgacgcttttaaggaagcaactccatctcaagtagcttctgctggaacactcgctgttgctttcatggaaacattaagtacggtgcttctgggatttacagatggcaacaatgtggaagacgcatcaggcttcttagtatcacttgtgtttggactcggtccacttatcggtggaattatactcgtcacattctctcttgggttcagcatgccgcaccctcttctcaccggtgtcgcatccggcatagctttccgtctcgcggcatggagacctgtgcagctcctaatgacctcaaaaatgggtctcttcaccaccctcttcctcctcatcggaggttccctggcctaccacgccgccacatcaagcatcctccggttgttcaatcgcaaaaggtcttccgtgaacgtgatcgcgtcatcctccggcctctctctcagtgccctcacagtgcagtcccttcttgcctgtggcgccgtattccttcacgcatatgctgaagggcttgcgctcggtgtcgcggctcgcaaggcctatggcctcggccgctacatggttctcccagcctccctccacggtcttccacgtggcgctgccgcggcgagctgcgtgtatggtgccacagatagctggcgtggagcccttgccgctgccgctttgacagggctcgcagcgccgagcgccgccatcagtgcaatccttgcgaagatcgactatgatgggcttgactactggatggtcatagcgtgcggggctctgatccccagctttggccgcgtcttcaggcgctcactgcggttggacgtgcggaagagcgtcgttggcctgctggtaggtgttgccttcgcctccgtgtgcttgatgtcgactagattcatctgtctgcacactccttactgtaactcggctccagaagccgtcacataactttgttgctgccccgtgctgttgtaaaacacatgtaatactagtgtaatggcgatacaaaaggaggatgtggaagggttacgttgcgtcgaagagatctcttacggcgatacaacaaagggaaatggatgttgaacagaatttgcctttttcttgctgtcacttgtgtaaaattattcccaaacattgcctgaacgatagcccattcagccgttaacctcagtcccatttgatcattttctcctttgaaaaaggctcgtttttttcccagctcctgtcgccagaccgaacatat

SEQ ID NO: 31109 - DNA, 4751 bp, Zea Mays
cgtctcccctcccggcgaaggaaggaaacgaggcacgccctgacgcccacgcgaaagaaagttgacgcccacgccccacgcgcccaggaacaccaccggtgacgcgtgatcagactcgagaaccaatcccccccgactccctagccgccgcgctaaaatctacacaaagcctcgcaaatctggcctgatctcgcgcccccgatctcgcgctcgttcgcagcccaccgggaggtcctccagcctcccgccagatctcagcgtcgttcgttcgcttttagatttggtggggtaagggaggggaggcgggatgagcgcgcggataaaggagatggtgcgtgtggccacggcgcggctgggcggtgagcaggtgggggctggcggggtttcctcctcgggtatcgcgcgtcgggagtccacggcgcggctcggcggcgggggtacaagcctccggaggcagccgcagccgatggcgccctccgtgcgcaccgtctgctgcaacgaccgcgaggccaacgcccctgtcgggtacaagggaaattctgtgtcgactacaaagtacagcatcctgactttcctacctaaaggattatttgagcagttcaggcgggttgcaaatctttactttctcatgatctctatcttgtctactacacctatcagtccagttcatcctgtcactaatgtcgttcctctaagtcttgtgcttctggtgtctctcatcaaggaagcttttgaggattggaagcgtttccagaatgatatgtcaattaacaatgcacatgtcgatgtattgcaaggtcaatgttgggaaagtactccatggaaacgactgcaggttggagatattgtgaggatcaagcaagatggttatttccctgctgacttgctcttcctatcaagtacaaaccctgatggtatctgctacatagagacagcaaatcttgatggggaaacaaatctgaaaataaggaaggctttggagaaaacttgggactatgtaattcctgaaaaggcttctgagttcaaaggtgaagtgcagtgtgaacagccaaacaattccctttatacttttactggcaatcttatcatggacaagcaaactatacccctctcaccgaaccagttactcctaaggacaagcaacatatttggagttcctaagattggccgcattgcattcaccggcggctgctccaatacaccggcgccggctctccaggactccaccagcgttgtctccagaccagcaccggtgagcaatgacgaagaggacttgatgactggtgctggtcccttccttctcccccttttctatcttattatcagtatgtctacactctgcggcgcctggtcggtcctccgggacgaccagctggtcgctcgacttgaaatcagtggtggtaaaggttatgatgaattccatgaatgttccctcaaaaagaagtacattggaaaaaaagctagacaagcttatccttgctctttttgcaaccctctttacaatgtgtgttattggcgccattggaagtggcatatttattaatgaaaaatacttttatcttggattgcgtgggcatgtggaggatcagttcaatcctaaaaacagatttgtggtgaccattttaaccatgtttactctgataactctatactcaacgatcatccccatttccctttacgtgtccattgagatgatcaaattcatacagtgcacacaattcattaataacgatcttcatatgtaccatgctgagagtaacacccctgctttggcacggacttctaatcttaatgaggagcttggacaggttgaatatatattttctgacaaaactggcacacttacaagaaatctgatggaattctttaaatgctcaattggtggagaaatgtatggaactggcatcacagagattgagaaaggaggagcagaacgggctggaattagaatcgatgatgatgagggcaaaagatctgctaacgcggtccatgaaaaaggattcaattttgatgacgctagaatcatgcgcggtgcatggagaaacgaacctaatcctgaggcttgcaaggaattctttagatgccttgcaatctgtcatacagttcttccagagggtgaggagactccggaaaagataagttaccaggctgcctcacctgatgaggctgcacttgtgtctgctgctaaaaattttggtttcttcttttataggcgtacacccacaactgttatggttcgtgagtcacatgttgaaaggatggggagtatacaagatgttccatatgaaattctgaatgttctagaattcaacagtacaagaaagcgacaatcggtggtttgccggttcacaaatggaagactagttctctattgcaagggtgctgataatgttgtatatgaacgattggctgatggaaatcatgatatgaaaaagatcagtagagagcatctagagcaatttggttctgctggcttacgtacactttgtcttgcctatcgggatcttagtagggagcaatacgaaagctggaacgagaagtttgtacaagcaaagtcatctttacgagatcgtgataagaagcttgatgaggtggctgaattgattgaaaaagaccttatattagttgggtgcacagctatagaggacaaactgcaagaaggggtgccaacctgcattgaaactctctctgcagcgggcataaaaatttgggtgttaactggagataagatggaaacagcgattaacattgcatatgcatgtagcttggtaaacaatgacaccaaacagttcatcattagttcagagacaggcgctattagggaggctgaagaccggggtgaccctgtggaaattgcacgtgttattaaagattcagtaaaacagaatctgaaaagatttcacgaggaagcccggcattctttaattagcacccctgaaaggaagttggctctcattattgatggtagatgcctaatgtacgcactggacccaactcttcgtgttgatcttcttggattgagtctaagttgccactctgttatatgctgccgagtttctccgctgcagaaggcacaggttacaagcttagttaggaagggtgctgagaaaataactctcagcattggtgacggtgctaatgatgtgagtatgattcaagctgctcatgttgggattggcatcagtggccaagaaggaatgcaagctgttatggctagtgactttgccattgcacagtttcgttttcttactgatttgcttcttgtacatggacgatggtcttacttgagactgtgcaaggttatcacatacttcttctacaagaatctgacatttacactaactcagttctggttcacttttcaaactggtttttctggccagcggttttatgatgactggtttcagtctctatataacgttatttttactgcgctacctgtaattatagttggattgtttgataaggtaggattattcttacttgtttatggagttgtctcctgcaattgcactaagctctgagtcgtttcaggatgttagcgcgtcactgtcaaaaaaatacccacagctttacaaggaaggcatcaggaattcattcttcaagtggagagtgattgcagtgtggggtttctttgccttctatcagtcaatagtgttcttctacttcactgcagctgcaagtcggcatggtcagggttcatctggcaagattcttggcctatgggatgttagcaccatggcatttacttgtgtcgtggtgactgtgaatctccgccttctcatggcatgcaactctataacgaggtggcattacataagtgtggcgggcagtatagtggcctggtttatgtttattttcatatactctgcaataatgacgtcatttgacagacaggaaaatgtgtattttgtgatttatgttctgatgagcacctttttcttctatctgacaatcgtacttgttccgatcatcgccctgtttggggatttcctatatctatcgtaagatacctgatttctgtggaattattacgacaagttcagcttttttgcctgaccatgtcaaccatctctgaccctgtgttctcaggatccaaaggtggctcttcccctacgactaccaaataatacaggagcaacacaaggatgagccacacgagtacagcagggtgccactaccagagaccagccacctaagcccagaggaagcgagaagctacatgatctcgatgctcccacgggagtcatcaaagcacactggctttgccttcgactccccaggatacgagtcgttcttcgcctcgcagcaaggcatcggcgtgccacacaagccgtgggatgtagcccggagagcgagcatgaaaccgcaacgagcaggaaaatcctagtcgggcgaacacctctccgctgtgtaaagtcttgtatatctggtttcttgaccacaggagtttttgtataggtagcagtactgtagcccttttttcgtgtttgtcacccatatgttgttttgggatgaaaagtaggcaacggtccgtttggctgttaaacaatcatgtagggatacttggtagataaaaccaaaggggtattggacatgcagttaggaattttagtttctggcgttcattgcgtgatgtagtcgagttgattggtcggcccgccatgcaacttaaatcatgttactattattggaggcctgtgcattgatcatatcccattttatttcaatataagaacacatcctactcc

SEQ ID NO: 31110 - DNA, 1814 bp, Zea Mays
aggcgctggctggctagctgacaccgaggagccggggcggaatccgtccgctgcagcacagccgcgcccgggggaaaccgccaaaaccccgtaaaaagtccaggaaaaaacaagcccaaagcgggcgagtgcgcggccgcgggcaagcaaccggccacccacctagctcggctccgctcagcggcagcaccgcaggccgcagcagcacggcatgggcgcaaacactaaaaagaagggagcggccgcgcctccaccccaaacccacctcgcctcctagtcccccccttcgccttctctcccgagtcccatcggagcccggagctctctcgcctcccgcgaggctgtgtggtgaggcgcggacgagatgaacgagcaggggctcggtggtctcggcgggggccgcggggccgtgcaggggcacgggcgggaggcgatggcgctcttgcagcaccagcagcttcaacagcaacggcggcagctggaggaggaggatgaggtgcggcgccagatgttcggcggggtggcggcgttcccggcagcgctgggccacggccagcaggtggactacggggaggacgccggcgggctcggggacagcgacgcgggcgggtcggagcccgagccaccgccggagcggacgcgcggggggtccggcggcggcggcggcaagcggagccgcgctgccgaggtgcacaacctctccgagaagaggaggaggagcaagatcaacgagaagatgaaagcgctgcagagcctgatacccaactccaacaagaccgacaaggcatccatgcttgacgaggccattgagtatctgaagcaactgcagctccaagtgcagatgctgtctatgagaaatggtgtttacttgaaccctccatatttgtctggcacaattgagcctgcacaagcatcacaaatgtttgctgcagttggtgggggcaacattacagcgtcaagctctggggcagtgatgccaccagtaaaccaaagttcaggacttcaagtatttgatccattaaatcctccacgagaccaaccactgtcttttgtattaccaaatgtagacaaaaccattcaagaagctccctttcacttggaatcatcgcagttccaccctcgaccatttcgaatgcctgaatcttctgagatgatgcttccaggtgaggtagtggcaaagcaccagctaacttcaattcaaggaagagttagtatgccaggaattggtatgaaccccattaggcaagaatcatccactgtaaaagctgatcagtttgatggttgctcacatagcaaagagtgactacgagatatgtgccacaaaatgcatgacaagttcaggacagcttaggaaatggcaaccgatgaggaccgaaggcaagatgacacagttcagtaacccagctgacagcctggcacgcaggcttcccctttattttcctctgttactgcaatagtaacttaaatttttaggcttcccctttattttcctctgttactgcaatagtaacttaattttttttaggcttcacctttcctttttgtttgaaaattagcagggcagtattaattaatagtacaaaaccatgtatcaccaagatttcaggggttgaaacttgaaatgccaatattcaccaagctttagttttttttcaaagagtaatttgcagaggttgtaatgcactatagcctatagcagacttaacaagcactacaatagaagacagcatcagcagagtcaattactatacacctacaagggaacacaacccatgaagagagttaacaacaagaaggaaacttgtgctgtaact

SEQ ID NO: 31111 - DNA, 993 bp, Zea Mays
cccgtccgtgcggcacttcgtctatagccgctgtccgccgtcgagtctagctacccatcgcgaagtccctgctgtcagcctccgcacatgtcctaaactgtcatagccagtttgcctccatctcgtggaggcgttgcgctgccgtcgagtcctgatatcgatctggttgtcatcgaagtgaagcttagtttaatgctcgccaaggtttcgatcaaagattttattcggagactgtcgacgttctcgcaagttttaaatcggatttaatggacggtacgttaattaatcgcgtgatacggaagacgacccaagtcgacaccaagcgtgggctaatccgcaggatgaagctaatggaccaacctgaagatggttaaatcaagcaagtgctcggtcgagagatactcgtcaagtggacatcgcctaacaaacactaacctttggttactcaggtctaaccttgtgctgttgtgatggtgttaagtgccggtgggctcggccttcttataagtctaagtaacccttctatacttcttattgaggatggtcatttgagctagcatatatttcaaacttatacttttgtaaccactccgataaaataatgtaaaatttttgtaacttgtaaaatttggtagtaagaattccgctgcaaaaaggttggtgtatgtgatttgtgttacttaatcccgcggttctggttgttcgtggtttatccgatgtccttgaggcaatcggacggatcctgttaagttatctgatgcacatgcatagcagtctgaggtctttgagacaagaacaggtgcatgtgggcccaataacttgggaggttctgccacagttactggcattgtgatttttccaggtgctacaatctgccttcctccgaagccacaaaggggatgtatggcatcatggatcttgtcttcgggctcttgcatctgtctgaaggccttagcaaatatgatatcagctgcactgcctgtatcaaccaaa

SEQ ID NO: 31112 - DNA, 2527 bp, Zea Mays
atggagggggtgcagctacgattcaagcagagggccgctgaaacacaacatggcggcaggagaggagggtggcggcaatggagaaggggcgatgacactagagaagggggtggggcgctagagaatggtgcacgtgcgactgtgcgctacgtaatgcgtgtaccgtattggtacaggtagagcaaaacagtgtttgtgttgtacaaatggtgagtcgttccatgtaccagagaccggattagaggcccaaaacaggtataactagtctaccataacccctagccggacgactaatcatgagtagtcgacgactaggatgactaatcgtttgctagtcgctctagtcgagtcaaagaccctaattgagcttgcactagcgattagtcggacgacttaaaaaccttgctctagagtctagccattgttctttgcaaggatgccagccccaaagagtgttgtttcaacctccagcacaaccattcctcctgagatgttaaagctcaagtctctggccatttctagtctatgaaggatcccttttgccattgacaattgtcttgagatgtgcccaacttttttctggctccaggattgcaactgctgtgatagtctactcaacttatctgcaaaacgttggagagggcatgtagcttcatccgactgagaccatgaacttgccacctcatctatgaagccatcgagcaccaaaggacagtgatccgagatcaaagaagcagtgctttgcaataaacagtccagaaagatgtcctcccattcactggtatacaagaccctgtccagccgaaccaaggtcggggaagaccgtttattcgaccatgtaaagcgcctccctaacatcagtaattccataagctgaagctcattaataagcctccgaaaccgacacttcatagctctatccagattaccattatttttatcttctgcccggcttataagattgaagtcaccccctatcacccaaggtccctggcacatagaacgcaccaaacggagttcttgtaaaaacaaaagcttcttatcatccagatgtggaccatacactcccagtaagccaccagggtgaggcattgtgttgatcaaactgtcataaacctcattatggtttgcagtgtgctcactcagaattttgccctgtggcttttgcatcctatacaatcagcaaattcatgttgcagattgtcctgtttctgttaaccaagacttgtgcgcctgggattattagcgccacttctttgtgatgcgctagtaacatctgggcagagggaactcacagtagggtcaaatatgagaaatgctcgccaatgaattatttctttatctatatccatcaggaacaggtatgcgaccatgtaattgtcaggctatttcatggcagtctaaaacgaattgctaaaccgtctctcgcaagctttagaggaagtcagttgctaaacgtctcttcatcacaggttcagatttcgcgatctgggcgtacaaccagggctgcctgcctgcttgcctgtccctctttacccaatgcaatccaaggttttgttaaagttaagcaggcctccagtgctgcaacaattagagagacgctgatggtgggtgggatggaagggccgccgcatagatccagggaaagagagacgcgtttgtggtccatccatatgactggagagcctgaccctgacgccaacggcaagcagcagtggcggcatccagatcctggcgcaccgactgcacccgcccgtccggcaccttctttcggcggcagcggcactccgcgcgacacggggccgtgtccgtgtgggatgggatgggatggaatggaacacttctgggcggcttctggccgccagaagctgaaaccaaacgcccaacttctggcgcggcttctgggcgaagcgattgggtacggatccctcctccctatgccgtccgcaccgtcttctcctcgcattgccgcgtttccttcacccttttcctctgtccgtatggttgccgcagtgacgccgacgcccttgctccgtcctcaaggttccgcgtcgtcccaaccatcgcgtctgcatcttcgtaagattgtcgtatcacttcgagttcaaggtgttcggttccaagatcatctgggattcgaggacttcggttgcaacctccagttaagcaaaggtaccgtgccactcaatttgttgatgaattatttgtcaccatacatgctgtgtatttgttccaataacgtggatccatggcttgttttagttcattctttgtcagtacacctgaacaatgagtcgacggttaggataagacaacacagacattgtttatggggggatgttatttttcaatagagaacagattaccaattattgttcctggttaactacaatccattgatatgttgtatccctcatattaagggttcagggataccctccatgattgccaacctcattatctttatgattgtatattgaacccaaatttggtagagtatctgaatggatgtaagttaattgtcgta

SEQ ID NO: 31113 - DNA, 3102 bp, Zea Mays
ccacgggaagacagactgagtctgagagagagagagagaagagagagagagagagcacacgcaagacgagcgtcgccttctccgaatcccctccttgccaaacacgagctgcctaaccaaatccgtccacgctgtctcgtcccctcggcatcgcagtctcctacccaaatcgtcctcgtttcctcctccccgaactgacccgctgttgccgacggctagtaggatgacgaagctgacctcggagctactgcggccggtggttccggcggcggcgctggacgaggcggcgctgctgcgctacctggtggccaacgtcccgggcttcccgggccccgcgcccgcgctatcgctgacccagttcgggcacggccagtccaaccccacctactgcatccacgcctccgcgcccggcggggggcagcccaggcgctacgtgctcaggaagaagccgcccggggccatcctccagtccgcgcacgccgtcgagcgcgagtaccaggttctcaaagctctgggggatcacacagatgttcctgtcccgaaggtttattgtctctgcacagatgcaagtgtaattggaactcctttctatataatggagtatctggaaggaataatatatcctgatagcgcgttgccgggggtaactccatctaaaaggcgggctatatatttgtctactgccaaaactttggctgctatacacaaagttgatattaatgccattggattacaaaagtatgggagaagagacaattattgcaaaagacaggtagaaagatgggagaggcaatatcttgcatccactggcgaagggaagcctgcacgttaccagaggatgcttgatctagctcgttggttgaaagaacatgtaccagaagaagattcctcaccaggaccaggaacaggccttgtgcatggtgattaccgccctgataatctagtttttcatccaacagaggaccgagtaattggcgttattgattgggaactatctactttggggaatcagatgtgtgatgttgcttatagctgcttgccatatattatcgatgcagcacccagtgcaaggacttcttatggagggtttcaagatactggcattccagatggaattcctcaactggaagagtacctttctatatactgctcttttgctgcaagaccctggcctgctgcaaattggaagttctacattgctttttctttgtttcgtggggcatctatctatgcaggagtatatcacagatggactatgggtaatgcatcaggtggtgagcgcgctaaatttgctggcagggttgctaacgctatgattgactgtgcctgggacttcataaatagagtaaatgtcctgcaagaactgccttctaagggttctcaagtcttaggagcatcgtggcaagaatttcacagagaggaagaaagttcaacttctgaaaagaatcaaggaaaatttgttcctagtgaaaaggttatgcagcttcgaaagaaactaataaagtttatcgaagatcacatatacccaatggaggctgagttctacaaacatgcacaatcaacctcaagatggacaattcatccagaagaagaaaatcttaaagcattggcaaagaaggagggcctatggaacttgtttattccgtgcagcgagagctagaaagctattgtttgaagaccattctcaaatttcccttggaagttcgaataatcttttgctgggcgcgggtcttacaaatcttgaatatggatatctgtgtgagattatgggacgttcagtttgggctccacaaatatttaactgtggtgcacctgatacaggtaacatggaggtcctgttgaggtatggcactaaggagcaacagaagcaatggttagttcctttattggaagggacaattcgttctggatttgcaatgacagaaccacaagttgcatcttcagacgcgacaaatatagaatgctcaatatccaggcaaggagatttttatgtgataaatggaaggaagtggtggaccagtggagctatggatcctaggtgcaaaatcctgatattaatgggaaagacagatttttctgcacctaagcataagcagcagtccatgattttagtggacatcaacactcctggggtgcagataaagagaccattgttagtctttggttttgatgatgcacctcatggacacgcagagattacatttgaaaacgtgcgtgttccagtaacaaatatcctgcttggagaagggcgtggttttgagattgctcaaggaagacttggtcctggaaggttacatcattgcatgaggctagtaggagcagcagaacgtggcatgaatctgatggtagagagggccttaaacaggaccgcatttggaaagaggattgcacagcatggttcctttttatcagatcttgcaaagtgtcggattgaactggagcaggcaaggcttttagtccttgaagctgccgatcaactcgatcgacatgggaacaagaaagcacgtggtatcctcgcgatggccaaggttgcagctccaaatatggccctgaaggtgcttgacatggcgatgcaagttcacggcgcagctggtgtctcgtctgacacggtcttgtcgcacctatgggcaacggctaggacactgcggattgcagacggccccgacgaggtccatctcgggacaatcgccaagctggaactgcggagggctaggttgtaactcgagggcgatgtacagctcgcccgtcttgcgaatgaataaagaaggaacatcacccgtcgtcatttaacgtccatgtgaatacttagatgaataaataaatcctactttcagtagcagttactcttattttcaataaaccatatataatatcaatctttaataaatcatatcatttactcatcttcattaaatttatccatcttcaataaaccatattatatatgtgtacatatttacctacacacacacacttattctaagatactctaaatcttgttgagtgatttttttcttccaaaaaaggactcatgtttgtaatatgttattgtaatactattatacatataataagtatcagcgtatgcgaaggtcacgattg

SEQ ID NO: 31114 - DNA, 2594 bp, Zea Mays
ccatctccaaacaagcgagtcggttagatatttcctcaagccccagtcagccgcctcctctccctcccacagctcctgccgccgcctctccctccgtcggtatctcccacctcgcaatccactcccacctcccccctcgcccctaaaaccctagctaaacccaagccgaaagaaacaatggctctcctcgcctaagcgagctcgcgcccgccccttgctggccatggcgctccagctccgccgcttcctcccgcacggctacggccagcgacaccgcgctgtcacccacgtgctatcaccgccgccgccactcgcgatgcttcagttcgaggtgtttcagagatattcttccgcaccctggcccttgtcacctttccgcccttgtgaaatgtgtggggttgcattcaggagcaattcaacaaggaaaatgtgctcgagaaatatttttggggttgcatcacagcccaaaagtagcaccttttttactactggactctctggcaaccgtagctctgtatgtttcagagcgagggacagccgtggaattgctttaaagactaataatattgttaattcacgaccattctcaactatatacagtaaaaagctaaggtttcttattaaaaataagacttcatgcaataatctaaatgtgagaagggaagatggaagtgttgcacatagtttgttttgtagatctgagaaacgccaaagcacagttgctacgtgtagcaccattgctgacgaggcttcaacatctactagtaacagcagcaagagtgttactgattctaagactgacactgccaagatgaggcgttcaagaggaagcaaaaaagaagttgatggagttatgaaagataaggaagtacataccaagaaaaagagaatatcttctagaacttgtatagctgcaacaaagacgactgagagttctagtgcgaagcaagaaaacaagaagactgataattgtaaactgaaaaagggtactgatagtcctaaagagaaaaaagtgaataataggtcaaagtcaaaagcaaaggtttctgcttcttctgtatcttctgaagctgagatttgtatgaaatcctctatcgatggttctggtattgagaaaaagccactggtgccattgtatcctccgagagccaaatcagtcgtggttgtggaatcagccacgaaagcaaaagttattcagaattatcttggggacatgtatgaagtgttaccaagctatggtcatgtgagagatttagcaggtagatcaaaatctgtccgccctaatgatgacttcagcatggtctgggaggtgcctgctgctgcctggacacaccttaagagcattaaagttgcactgaaaggagcagaaaatttaattcttgcatctgatcctgatcgtgaaggtgaagcgattgcttggcacatcaaagaaatgcttgaacaacaaggtgcattgggctgtgatgtgactgttgcaagagttgttttccatgaaataactgagaatgcaataaaaaaggctttaatgtccccaaggtatattgatatggacttggtcaatgcttatcttgcacgccgttcccttgattatgtaattgggtttggcatatcaccacttctgtggaggaagttgcctggttgccaatcagctggacgggtccaatctgctgctttggcccttgtgtgcgatcgagaatctgaaatagaacagtttaagccacaggaatactggacagtacgggcagacttcaaaatgcaatttgcagatctgtcaaatggcacatgtattccatttcatataaagcatttgaattcaaaaaagctgggtcaactttccataccctctcaagaagaagcgcaagctatagaaaaaaggattcattcttctaagtttgaagttttaggtgttaaaagaagtaaaattcacaagaatcctccaatgccatatattacatccagccttcagcaggatgcagcaaacaaacttcattttactgcagggtataccatgaagattgcccaaaagctttatgagggtatcaatctttcctcagaagaaacaactgggttaataacatacataagaactgatgggtttcatatttctgatggagccgcagaagacatccgttcattagtcaaagaaagatacggccagaagtacgttttagaggacactaggaagtatttaaagaaggtgaaaaatgctcaagaagcccacgaagcaattaggcccaccagtataaggaggttgccatcatctttggttggaatacttgacgatgattctctaaaactgtacactctaatatggaaaaggacaatggcttgccaaatggaagcttctagaactcagatgattcaagtggatgttggcactcctgaaggagagatgatttttcattcagctgcatcaaagctagacttcaagggataccaatctgtttatgaggacactgagggagattctgtgcatgaggataactttgaggccttgtcaaaattaatggttgcggttaaggacttggtgtcccctgttaacgtgcatcttggacagcactttactaagccaccatcacgttattctgagggtg

SEQ ID NO: 31115 - DNA, 4136 bp, Zea Mays
aggctgagtgaaggatgctttaaagaatttcaaggttatagatgttagtggaaaagaattcaaattcacctgggcatctgaacgtggcgaattgtgtgatatttatgaagaacgtcagagtggagaggatggaaatgggttgcttctggagtgtggctctgcttggcgcaaggtgaatgtgcaacgcattttggatgaatcaacaaagaaccttgtgaaaatgcgctcagaggaggctgaacgtctctcaaaatctcgaaaatcaatcgtgctggaccctgccaatccatctgtcaagagtcaggccaagtcaatggctgcagcagctgtagaaggcaatccacggaggatgcactggaagcagaagaatgaattttttaagaagaataaagctgctgttatcaccccaaccaaatcagtttcgaaggtcaagttatctaacaatattcccaaagggaatatctcgagttcacctgcaccttctcctgaacaacctggagcaagcaatccttcatttcctgttggatcagatgcaaataatgaagtcacaacaccttttgatttgaacaaaggggaaaacagtaaacatgagaaatcgactgcaagtaagatgtctaacaaaggtataaatcgccgtgcaagttctcatgctgcaaatgtggataataatacaaaagaagtgcgaagctacttgatatctgtgctctcaaaaaatccaaaaggaatgggcctaaaggccttggagaaagttgctgcagatgcatttccaaatgcatcaaagaaaatagagagcatcgtcaagaatattgcaaattaccaagggcctgagaggtatgttctcaaaccagggttggaggtagaaagctctaaaaggcatgcatctgaaggagtaagatccatcagcgagaatattgaggaatctgctccaagcctaaagattgatgatcctgatatatgtgagaggattgacattgtgggctccccacttgctgtaacagatggaaaactcagtaatgatagtgaaggtaaggctggaacttccagtgacagtggaagtgacagcgatagtgatagtgacagcagtgacagtggaagtgatagtgagagccaaagcagaagtgctgcggaaactggtagtgggagtagcagtgatagtgacagtgatgcctcatcaagcagcaaggaaggatctgatgcaattgttgatattacaagtgatgatgacaaagcaaatacagcacacacaaaagtagtagatgaccttaatttgtcttcatcaccaagagatttgacaagacttaatgttgacgatgaacaaattgacattggaacaaatctggactacaggagtgcatcaccccatattgatctgaacaattttaatactggcaatgatgatgcagcagcagagggctttagttctggcaacctgaacaagccatctgaaatgccgggaagcaagaacatgacaaacaccagaatggattctatcggagttgataacaagcacaatgaaatgtctttcgtggacaaccttttcgatgattccatgagagcagccagtgagaactcacccaagggggaagctggtcaattgacagtgcagcatggcaataagagaaaatcaacatctaaggatgaatcaaaactcgtcccagtgaatattgccaaacccaaattaaaaaggtcttctggtagtgagaactccacagcaaagcctgagagtgccaaaaaggccaaacctgacgtaacatcaccaataggttctttatcagaacacaaaagaagtttaccccctgaaaagcataccaatgataggttgaacaaggagacggggaatgttagccgtgatgcttcacgagatagcagtcctgccatgaaaggaagaccttcagctcctggaaatttacagaggatagatcagagcccaaatttacctatcccaacaatgcattctgagggaacaaaaggaaatgctgttaaatcaagttcaaagaaaaaatcagataagatgcagaaaccatggcatggtattgatggtgactttggctcatgttattcacatggtgtagatcaccatgccaattttgatggctctgatgattcttccacaagaaaaaggagtagacatgagaatcctcttattgatgataaaatgcttaagcattcgaaggacactaatgctaatataaattccatgaatttaaccaaaagttccagagaaattgttgtgcctgatgaggtaactgcttttcctgaatctaatgaaagtaatggtgagccatcaaattcacaaagagataatgttgagaaatcaccttatggtaaaaaaaagctccagagagagctttctgatcttgagttgggtgaacttcgcgagacttctttggaaaatgatgatggaaggataaggaagcaatttgagagaaatagttcctccaagtcgcttgatgctaaactaactggtgtaaataacttctaccccagtataaatgacaggaagactcctgtaaccgtctttcatgataagaggaaaccttcacctcaagaatatggaaatagaggccatgtaaaccaggaagggtttcagaggaaggcagcagtgtacgcgtttgatgataataggcctcaacaaagagagaattttccagagagcctgcatttgccaaagattgataattcagattctgagaacataatgtatccagataggtcaggagaaaaaacaagcaaaagggaaactaggatggcacatagtggaatgctagagtatgctgatatgcagaagaagaaagcaacctcaaggcttccacagaacggtactaataatgtcatagtgtctcgaatgcagaaatcaatatccacatcagataatgaggaaagaagtagaaacaactctttgattgagacaaagacaggtagaaagagaagagacagttcttcagatgatgataatttatttttctccaagtatgataaagatgcaccagaactcaaaggtccaataaaagatttctcacaattcgaagattatgtgcaggagtacaatgagaagtatggagtctattcttacttgagcagtcagatagacaaaactaagtcagattttttaagggttcaggatgatctcaatgttgcgaaagaaagagacaaggaacagtattataacacggtggaaagactcagagacatgtatcatgaatcaggagcaaggcataaattgatgaagaaggtcttccttttgcttcatgaggaactgcagattattaagcaaagaattaaagatttttcagaggcctattgaaatgagtcactcataacatgtgagttaagctctaactgtcacttgcaattgtgtttcggagactgtcgctcatcgtaaggctgataatgtctgggcatgagcattatgctttgcctttgtagaagtttgcttgtcttggaaagattcagtcaatggcgcatatcacaggaaacctgagagactccgtgatttctggaatcacatcgtgctgaatttgatagtaatcacggtgaagtggaggcaaggacagttcaaatatcaatgacgttgttggacacctccgcagccccgcacgggggagatagcagaagaaatgattcatcactcagggaagaggtaatgtcgggaagcgaggaggccttacctcagcagttttgcagctagtttggcactgaactgtaaccgggcggttctctttgtagatgttctgtatcttttacccccacccccagtgaagggcgcgatctctccttccctggcattgtacatcactttgtattagtgtgattcatgtcaaactgaagtaagttgctagctgtgtacatatatatagagccggtagagaagttttgaagcgaggagagacaaatctgggacaatttctttttaacgcgtacatcaattcttcgatgttgcagttcagtttctgaaatatgcatatgctctactgtatattggaccaagcctgaagaacaattccagagcatatgaaaatttggatctttaaactggctctcaaactatttagattctcaaaataggtaggtattcctcaacagatcctgtaaaccatgttctctgatttttatataaagatctgtagtttttaaaa

SEQ ID NO: 31116 - DNA, 484 bp, Zea Mays
gtgaagctcagttcaatgctcgccaggtgttcgatcgaagattttattcggagactgtcgacgctctcgcaagctttgagtcagacttactttggttgagaaatccctgatgttcgtgagaagcgaggcctataagcgctctcttgggactcgaccaaatgtctaaattggaaaaccatcatcgccctcgcggatatcgaatccattcgatcttggtaagccaatttattatttcggctaatcgaattggattaactagacttgctagtcgtaataattctagtgtttagcagatgtgtcgtgtttgtgttagatgtttgctaaaatacctcagcccctctggtaatgtaatcgtgtgaaataaatgcgtaatatggtgcaccttaggtctaaaatgctggataaaggaaatatttaatttagtgggacttatgttgcataataattaagaatagtaattctagaagttaatggaatgatttct

SEQ ID NO: 31117 - DNA, 2857 bp, Zea Mays
ttccctgctccctctcccccaatcctctcttgtagccacggccgcatgctcgcgcgcccgcgccgcctttctacttccaagtgcagctcgcctcggcttgccagcgccatcttttcttcctcccactccctcacctgaccggtctgattctgggtcgatgtcggtcgccatggtccgacccatggtcggaggatagcggagaccagtgaaggccttgcgcagaagagtggcggggaggagaagcgacggagaagcgcgctgccgcgctcacatggccgaccaaggtacttgatcgttgttgatgacatatgggatgatgactcatgggaagcgatcagatatgccttgaaggacaataattgtgggagtagaatagtcatgactactcgtaattccggggttgtcacgaaagaagaagaggtttacagattaaaacctctttctgatgaaaactccaaaaaattgttctacaaaagaatagagagtcaggaaggagaaagccttgacggtgaactatctagtaaaatcatacacaaatgtggcggcctgccattggctatcattgcaatagctagtttgttggctgaaagaccatgtgaggagtggtcaagagtgtatgactcgattggtcttgggaataatggtgacaatacgacaaagatactgtcatacagctactatgatctgccttcttatctcaagccatgtctgttgcaactaagtattttttccagaagactatctcattgatacaaagcgtctgatatggatgtggataagtgaaggcctagtccatcttgagaaagagggtagcctatttgaggttggagaaaggtacttcaaggaacttgtgaatagaagcatgatccagccgatacagggaaaaaatagctggtttgaagaagagttccgtattcacgacgttgtgtttgatctcatccgtaagttgtcgaaagatgaagacttcgtaacccttttggacagcaacagacaacattcatgtccggatagtttaagaagagagaagaaaacaggagtgcctcgttctgattggaagcaacgtcgactggttatcctaaatcaacgtgtgcattccagaggtgttgaggtcagcatggacatgccagaggtgttgaggacacttaacattgtacactgtaacgttacaattatggccccacttcataacttcagagtttgtcgtgtgctatgtctagtaggcagctatgtacccatcagcctaaagcatctagggaagctgttgcatctcaagttcctacagatatctgacacgactgttgatgagcttcctaaggaaattgggcacctgaggtctcttcaggcactgatattaggctatactggactagacgagctaccatcgactgtttcctcgcttactcagttgatgtgcctgacagctagcgggttcaaaaggttgccagctgacaggatggggaacttaacgtccctggaggagctacggttagagagcatagttggtcagtgtgccgcccaatccctagtggcagagcttggcaagctaacaaggttgagggtggtcagcatcaccttttcagaggagctagaagagagtttgcaagaagcactggtcaaatctctgttcaacctgcggggactccaggaactatcgctttcttctaaaatgtggcagcagggaagcactatgtggggagactgggagccaccaaggcagcttcggggcctgatcgttcaaggcattgtcttctcacgacagcctcgatggatcaaccgctcctgcctgccacacctctgcttcttatgtctgatggtgcacgctgttgaagcacaggacctagataacctagggaggttgccagagctccggtacctcaagctagagggtgtcatctggcctccaaggtatgctgttagcctggacaacttcaagaatctaagattttgcgatgtgggtacaacgctcgagtttcatatgggcgccatgccgaggcttgaagagctgcaatttgaagtttatgcagggtactggagttgggaacacaatggtgtgctgttggagcagttcccaacgaaggatgtgatcgaagatcttgacttgggcctggataacttgctttcacttgagcaagtaatagtcaaagtcaactgcttaggtgctactgctgcacaagtgcaggagctggaggctgtggccatgcgtgccgtggaaaatcatgccaaccgtccaaccataaaaatggatcgattatatgaagaaaatatcttatctgatgaaaagctggaggctctgcttcagcagcacattcaactagaaggcggcgtgctccagctgaaggataaacctgacgctttcttcatcagccagctacggttgtatcgacatcttcagaaagccgttatttcctacgactgtgcgggtgccagcatgtgtgaggtgctgaaagtggaagcagcttgtagacatgcagccgaggttcatcctaaccatccaagtattgaactgatcagaacaaataccgatgaaatggcctcctcatctgaccatcctagcacagagcccaggaattgatgactcggtttgtccaatccttccaacccaacagtaggtaaacgtgagttgtttaagtacggaagagacaggtcctgttcagccagatgattacaagcattcgcagggcttgttagatttgtggttcttagtctaaaatcacattgaacagggagatgaacacaagtgatgtagtttatgtgttatctacatttgtctctatttttttaagatggtcatatatttcctcgaaagtgaccttgattgattatgtgtgaagtgtatttttttaatgacatgggtcat

SEQ ID NO: 31118 - DNA, 1309 bp, Zea Mays
tagcaagtactactggtttagtggtgtgcgtttttcgagcacggtggaggagaaggcaaaatgggtcttcgaaaagctcaaaggacacaagaagtccctctctgatctactgcgcgagcacaacctccctccaggcctcttccctcgtaacatcatctgctatgagtacgacgaatcgacatcgaagctgatggtgcacctgtcgaagccctgcgaggtgagcttcaaggattcctccgcgatacggtatgctcctcgcgtcaaggcgactctgtcccgaggcaagctttctggggttgaaggcatgaagaccaaggtggtggtgtgggtgaaggtggctagcgttagcatcgacagctacaagtccgacaagatatgcttcctcgccggtgtgaagaagctgaggcagaaggatgcttatgaggtccctcgtgaagccgtctctgttgatgagttctgagctcgattgatttcccttatccgtagtatcattcgttcgtagcatttttttgggtcccatgtcatcggcaattgatgtgctgcggttttgtagatttggaatcacatggatctgttgtgcctggcagaagacaacccgttcatgttatctgacgagacattcacatgtgtgatgtttcagtaatgtgtacatttagcatgtgttctggttctgcattggttgctcctagaattcatttcttcatgttttactgtaatacgtggtattgggctattggccgagttgcacagtttgttccgacaggtaatcctatatagctatctccagcagttgtatatggatctgtacctatatttagttcgcaatgtctccaacaacatacgctatcacatccgataagatagcggagccacccagcgtcctctatactggtctgcttcgcctgctaaacactgtgcccgtacctttctcatttaattcacttgatttcatgtgcggggatgcgatgtatgcgtatgtgtggtgtttcatgtgcggggatgtgatgtatgcgtatgtgtggtgtacgacacgagacgaggtcacaaggatacgatggtgatggaggaatgtttagaaattagttgtaataatgaaaaaatatgtaaataaataaataatttatttttatgagtcgtcaaaattactgttaatatagttggcgaaataaaaaaaacaatgtatttaatgaagtctgttaatacggtagatatagaggaccgaatttagaggacgctgcaccattcaagctagtagcggaggacaaaacaaaataaatgtaagactagtttgtaagggaaaaaaagaaaa

SEQ ID NO: 31119 - DNA, 3620 bp, Zea Mays
cgctgatctgctctctaggcggctcgctcgttactcgttcgtcttaccgcctcccaacaaacagcgagcggcgcgacctaagccgctctgcgcccaccggccagccggggcggagagggaccgaccgctcctccgttcgaagtgccggtcctgagtcaccggcgtcgcccgcatccgctgctcagctcgcccgccagcctggtggcgatcggcatcctcttttactccagaaaaataaagatcttctcgcaaaagaaaaaaaggaaaaaaaagagaaaatgtcaatgcactgcaatggttgattctgaaacttggatcagatagacactgatactcattctactcatcaaataagcgttgtcagatcacggtgctacacacactggttcagtgaatctgcaggtgctgctcatatggaaacatacactactgatgacgctcttacgctcatggggtttggaaagttccaagcacttgtccttgcatatgcaggaatgggctgggttgcagaagccatggaggtcatgctattgtcattccttggaccagtggtgcgggaagagtggaatgtctctccccaagacgagagtctgctatccagtgttgtgtttgctggcatgctaatcggagcttgtgcttggggctttatttccgacagatacggaagaaagtaaggatctgctccagcaaactctttatgtttcaatttacaggccttggcttcttaaggcaggcaggaataatttcaagtcctttaggattcacaggaaactgatttcatttctcactagtctgaagatattggatctaatcacacctacgtccaaataaccaatacagttttgacagtggtcgtggtactggtattagttttactatgtgacctgtggttggaatcagttcactgagtcaataaaccaatgagtcatttcagttagcgacctcatgtagtgaatcagcacggtaaaaggcaagcaatttgttcttctctttcgtctagtttgcacctctctcttttatcttccctcttgctacctgtaaaataataaaaccagagtgggatgcctcataaacggccagatttgcataaacaatttgataacccccagcactgctaaatagtgattttgccttcacaaagtcaggacgattatggttttcagtatagggtatagtttgtactagttgtcgttttagctcttttttatgtctatattcaaatacatgaagatgaacctagacacatatataaaacacatacatcaagtgttgtatgaacctactaattaattaaaacgaattttaatctgggacagagggagcattggttataccctattttttactatgattcttctctatgtttgatttgtgccaaacatacatgaaataaaccttgtattttttgtcaggactgttttattgctttcgactctgcttactagtggattgggtcttctaagtgctctatctattaactacttgtgcttgctggttcttcggttttttgtcggcataggagtgggcagtgggcatgtattttcatcttggttcttggagttcgttcctgcaggaaatcgtggcacttggatggttattttttcctttttttggactattggcacagtcttggaggcttcacttgcatgggtatgacattttgctccttcgctagaactcaactgtttccctttttcatcctatggtttccttataggtcatactgtatatataatctttttgaaaggaatgctactagtaagttgcagagataatacattatgcataactttgagggtcttgctttccttaattctgtgtaggattttgttcaagcaggcctctgaaaccggaattcttttttggaatgctccttgtcatgagtaacattgatttttttctgcaggtgtagtatatcatgactgttcacaaccatatttatcactttatcagttgcattatccatttgcagtatactgtcattatttctgtagcaatatttaagatatctcaatgtgtgatgcctgcctgatgatcatacttttacctacccatctgaactctgacttttctgcatctaataaaaatgtctggaattcagtaagttatgtttggatttggtacacatctgacttgtacatgtacacgttttcagataaaaaatgctcatttttatttgcattgcaggctgtactatcagcattgagttggaggtggttgctggcattgtcttcccttccatgcttcctcttgcttcttttcttcagaatcacacctgagtcaccacgctatctttgcgcacaaaatagaatgactgatgcaaggtttgtcctggagagaatggccattgcaaaccaagcagctcttcctatgggagttctcacataccaccaagaaacaaaaactgaatgcattactcatgtttctgaggatgaacatcttattccagtcagagagaaggaacatacagataggaatgctattagttccaaatctggtgctgttgctgtattgcacaagctattatcacataacttgctcaaatcaactctacttctttggtttgtttactatgccagttccttcgcttattatgggataacattgctgacatcacaactaagtgatgtgaatagaagctgtaaatctgatctggtctttgaagtgcaccaaaataatggcaatctttataaagatacttttatcactagtttagcagagatcccaggcttgattttatccgctttgcttgttgatcggtttggccggaaagctactatgtcgtgcctgatgtttgcatgttgtgctttccttgggccactcgtacttcatcagaatgagttgctgacaactactcttttattcggagctcgtgcttgtggcaccggtgccactacaactttatgtctatatgcccccgaggtgtatccgacatatgttcgctcaacaggggtcgggatcgcaaccgccatcggtaagatcggcggggttatttgccccctcgtcgccgtgggcatgctgcggagctgccatcagatggaagcggtgctggtgtttgagctggtgctgttcctcgctggggtctcctgcatcctcttccctgtggagaccaagggccgagaaatggactgagcacgcacggtggtggtagctcagcacatttgggcatccagatgggcttgtggttcatcttgattctgtataaacacaactctactacatccgcgacaagcttagcggatatgcaaaggggtgtaaacaggagctatagtaattacgagaaagaactggcaatgagcaatatttgtaacaggattattgttatagaacttcctcatcatcagtcaggaggtaaataaatatgtgaagttaaatagtaaccatgtggtggacagtgattataaacgaggatattctcgtggtgctggatatgcccaacgtcaattcgttgcgggcaacacacaacctaacgcgtgcctccaaacagctatcaattaattatcattacttgtacatggtaataaggttgtacgcgtgtccccccaatctctatcagcatcatacaatacaaggttgtcgtcttcctgaattcgctttcagttgcgtgagccgctttgctc

SEQ ID NO: 31120 - DNA, 256 bp, Zea Mays
agtaacagtctcccatcatactccttttatcaagtttaggttatggccatgccttgttcatttcatcgggccataatctatttggctctctacttgtaaccgttttgacaggtagagtctctttgtatattatcacccttgcccagtctatttatgttgtgcgagatttcttattggttatgtttgataatggtgttatgactaaaaccggtggtgccgtgacgaaaccgagggccttctgtgtgtgcgcacacat

SEQ ID NO: 31121 - DNA, 2006 bp, Zea Mays
cgccgctggctgcccggctgccccctcacctcgcgtgctcgattcccatctcccccctccctgcgcacagccgcacaccagtaccaccaacaccattcaacagacgccgccgccgccgccgccgcccctcatccctgtcccgtcccgtcccgcgcgcggccgccgcatccgtccgggcctcctcgtctccccagccccgctgccgccgggttcatcagcagaagctgcttgctccgccgccgccgccctcttcctcctctactggttgtgtctcccaaatatcttgcctttttgttgcattggactcttctgtggttagaatggcagcacccaagcccatttctcgtcttatttctcacgtcattcttgatttggatggcaccctcttaaacacagattctgttgtaagtaaggtagtaaaaccatttattctaaagaatggaaaaacgtgggatagcaagaaagctcacaagctagttgggaagacaccttatgaagctgcagctgttgttttagaagactatggactcccttactctacagaagagttcctctcgatgattactccgatgttcagtgagcagtaatgcaatggaacttctatgcacttgtattttttttccagaagtcacactgaaatgctatatgtagaggcctagagggggttgttaaatgtgtttgactgtatgactgctagctcgatgtgatccattggttattctttgactgtttgtagatgtggtgcaacttaaaaccacttccaggagctaatcgactgataaaacatttaaagactaacggggtgcctactgctttggcttcaaactcaccaagatgtaacatagaagccaaaattttcttccaacaagggtggaaagagtctttctctgcaattgttggtggagatgaagtagagaaggggaagccatccccgaatatatttttggaagctgcaaagagaatgaactgtgctccttcaaattgcttagtaatagaggattccttgccaggtgttacaggtggaaaagctgcagaaatgcatgtcatagctgtaccttcaatacccaaaaagactgctgagttcagttctgctgatgaggtgatcaattccctccttgatgtgaggcctgaaaagtgggggttgccaccatttaatgattggattgaaggtaccttaccaatagaaccatggtttattggtgggcctgtgatcaaaggatttggccgtggttctaaagtactaggaataccaacagcaaatttacccgcggagaatttttccgacgtagtgtcagaacatacatcaggggtatactttggctgggcaggactttcaacgcgtggtatatataagatggttatgagcattggctggaacccatatttcgacaataccgagaagacagtagaaccttggctgcttcataatttcggcgaggacttctatggcgaggaggtgcgccttgccatcgttggctacataagacctgaggccaactttccttcgctcgagagcttgatagagagaattcacgaggatggaagagtagcagagaaggcactagacctgccaatgtatgccaagtacaaagactcgccttatctgagaaacccttcgaagcacgggagtagtactaccggtgggacccagtctgagatggattccaagtgacaacccccctacagggccactagataatatgttacttattttctctatggtaaatgcgtcggtgttgatgcagaaacaattggactctctgtgagctaactcgcttcttaattttcggaagtagatagtattcctcgaagtggtgtttttactttgtaatatagaaaaaaataaagtggggttgttgaaacttgagagtcaaattccgagacgttatgcacgttttgatttctgaattaatcgattggtatcacttgtactgtttttatacgatgatgcttgaaccattcatttgtcattttaatttgatatacttgaagtcaacaatatgctt

SEQ ID NO: 31122 - DNA, 1557 bp, Zea Mays
ccgattctcctttcttgcccgcctcacttctgagttccgactctggagcggagcggcagccaaatctcgaccacgtccggcaaccgcgccccctcggctttgcgcccacaccaagccaccctctgttctcctcttccgtggcggactagcggcgcactggtgtggtgctcctccaagctctggtctgctccgcgccccgcctccccgtcgaccggcgactttggccccggcccccgggctaggaagcgagttcaccggtggatccgcgcgtgtccctccctgttacctgcgggtcgccccagccggccacccgcgcccccgcaccctactgacttgggcttgctgtatagcacggaccagatcaagggtcgtcgtcgaccacggagaactgtacatcactcttcgaattcaaacgagtatggatgggcaagaaattttcttatatctatgaaggcagacctaagacaaactcaggtttattcatgcagtccctctttctgcattgtattggtcatttgacttctcaaagttcactgcaccaaagattggctgggctatactgcctttactgtctgtatgagtgccagccatacaagccgcagttcaagatttacttgtctcttgaggagtgcaggcaactgaaggatatcgttgttatggcgaagcaaaatggactgcagctcgtgcctgcacttgtcaaaaggatgctggataaagacatgtttttgtttggctacatgaatttgatcaacgacaacggggacaagcaggtcgaggaattgaccgcattgcagaacaagcaagtaaaatttgcatgtgacaagttatttgcaaatagccaagcagaaagatatatgcacatggacttgggtgctgagttcgagcttgataccatcaaaaaattgtcaaaggagtatgcagaagcaaaggaactggcccttgcagaggcaagccaaactgtcgaagttgaagatgctaagcacctccttcagagtgagaggctgttgggcgacaagatagatgaagtcgtcaaagaatgggatgtccagaaggaggggttctacgagagaactggattatcctcatcccctggtgaccagctcatggcggtcgacaacgatgaatcaggagctcaatgtcacaaggatggatcctgtggcgatcagctcatggcggtcgacaatgatgaatcgggagtacaggatcacgaggacctcgacgacgacgacgatggctttgccgagttagaactgctgctagagtgaagaacatatacaagtctgtaaactcttactaccgccgtataaccgtgtaatcagaacaccgagagatgtaatcctcgctcgtctttactaggctctcctttttagttgccagaccttctgttcatctacactggctgcagtaactgtacattgaaataatccagttcgccagcctatgcgggggagagaaaaaagaggtgaccttgagtaaaaatgtacatgaacagtgacgagaaaaaacgctggctgcagtaactgtacattgaaacggtagtgtgccagagtaaaaaaa

SEQ ID NO: 31123 - DNA, 908 bp, Zea Mays
gtctgctttcgttataaggtttaaactaaggttagtagtgatgtgtaaataattgttgccctagcaacgtcactttgtggaatcagtctgttttgctttccttttaacagtggaaagctgcaaaagaggagcttcgtgatgaagaggaagatgagcctgaaactgctctagaggcattagaaaggaagcgacaaaaggaaatagaggagtggcggaaacaacagatagcttttggacatgctcaggaaaatgccaattttgttcctgttcgtggtgattggcgtgaccgtgtaaaacgcagaagggctgaagcaaaaaaggagtcaaaagatgacattgttgttgcatctttaagtagttccaaacagcataaaggatctcctgatctagcagagctttccaagggtcttcctactggttggcaggtaagtattctcgattgtatcatatcagatgctaacatagtgtgctgtgtttaaggtagcttccgctgcagcttccaagaatttgatatctattgcaagtttgtaactgatacaaagaagtgaacaatcgtgaaacactggtcatgagtgcaccctctgttcctgtgcatacttggatgagtctactaagcaggtctattatgggaacagtctcacgtctgagacgtcctgggagcggccaacaaatgaatgaagatctataaccttggtgtgcggtcaaccgaacgatacaagttgatttgttaatgtagttgatgctgttgaatgggcagcccaattttgtttggcagccaaccccatcctttagagaagaacaaaccacacctcaccaggagatggctgattgtttcattgtcttggtcacaaggcacaaaatttttgatgggataggttttgcttggctaacctatctgcaaaaaaaaa

SEQ ID NO: 31124 - DNA, 952 bp, Zea Mays
atcaattccgcttcggcactagaccaccactcgccgacgccgctcctccctcttctgcttctcccagcgccgcccgcccccgccgttccctcacacgccgcccgccgcgcaagagccgcgacctcgtcacgtctgcccgctggtgccgtggccccgtcgacgtccgcccgcacaggactctccgagtgtgggattgagccgtactttttttttttgagcacactttcatagtgttggataaggagctcatagagggagagttcgtgccgggcaacccgcacattgaagctatggttggtgatgtgaacatatatatgaatgactctgatgatgtgcagatcgcggagatagagattatgatagctgaacataagagccgtgggaagggtattggtcaagaagcaatcttactgatgatggcaattgcagtagagaaatatggaattcacacgttcagggcaaaaattagcgaatcaaatatggcatcgcttaagctcttcaggaagttggtgagcactctcttttgtcgtcttctcgtctggtcgctagtttgcttgatcagaattatatttctttggtttggatacagggcttcaaggatgcttcatacagtgtggtgttcaaggaggtgactctggaggcacccgctgactcactcccgttgagatttcctctgaccattggagactggtgacgtctgacatgccccaagctaattccatgcagacgacacaagaagctaatgctgtttgtctgtactatctgaccaaaatttactcgggctgatattgtatgaaaaattgaataaaacagttgcacagttgtgattcaattgcattagaccagtcgggtttttcatgtcactattttgaagaccccatatcttataaacaaatgtagacaagttttatctcataaattttttttatcgtatctctcatcatcaataata

SEQ ID NO: 31125 - DNA, 2061 bp, Zea Mays
acacgaggccacgaaaccaaacaaagaaaaacccgtgggccgtggtcactccgtccgcacggcgactggactatactgctaccatgaacctcgccgtcgcagccgcactgccgtccgtgacgccacgtaccggcgtcgtgctcccacggagcagtcgccgacactgcccccgcggggtcgtcccacgcgcggcctcgagctccgtttcctcctttacctccccctcagcagcggcggcgcccatctacacgcccacgccgcaggaccggtctctccggacgccgcatagcgggtaccactttgatggcacggctcgacctttctttgaaggatggtacttcaaggtgtcgattccagagtgcaggcagagtttctgctttatgtactctgttgagaaccctctcttccgtgatggtatgagtgatttggacaagttgttatatcgcccacgctttactggtgtgggagcacaaatccttggtgcggacgataagtacatatgccagttctctgagaaatcaaacaatttttggggaagtaggcatgaactaatgctgggaaacactttcatttccaataaagagtcaaccccaccgcaaggggaggtgccccctcaggatttctctaggcgtgttttggaagggttccaagtcaccccaatatggcatcaaggtttcatacgtgatgatggaaggtcaaactacgtgccaaatgtccaaacagctcgctgggagtacagcactcgtccagtttatgggtggggtgatgtcaaatctaagcagttgtccacagctggttggcttgcagcttttcctttctttgaacctcattggcaaatttgcatggctagtggcttgtccacaggatggatagaatgggatggagaacggtttgaatttgaaaatgctccatcttactcagaaaagaactggggcggaggttttccaagaaagtggtattggatccagtgcaatgtcttcccaggagcttctggtgaagtttctttaactgctgctggtggattgaggaaaattggacttggtgatacctatgaaagtccttcactggagacattgcacaagggagaagctgactagagcacatgcttcaggcgtgcatcggggtgtgaggggcaatggctagacggtggtaaagagatgagggagaaggtattggaatacattatgagggacagttttttgaatttgtaccttggactggaacagtaagctgggacattggactgtggggtctttggaaaatgtctggcgagaacaaaactcatctggtagaaatagaagcaaccactgcagaatcaggaactgctctgcgcgctcctactatcgaggctggactggtaccagcgtgcaaagacacctgctatggagatctaaggctacagttgtgggaaaagaaatacgatggtagcaagggagagatgatactcgacgccacaagcaacatggcagcactagaagttggcggaggcccctggttcaatgggtggaaagggacaactgttgtgaacgaggttgtaaataacattgtgggcacgccagtcgatgtagagagcctcctcccaatcccatttcttaagcccccaggcctataggatcaccaacgaatgtcacaatgaagaagtatcacggatatcaatgttgatcatacagtaaaactgtgcccagttcaataataattcatgatttttacttgttttttactacaatccacaaactatctgccgttgcatgtgcatcgacatcattgttagctcacagttttcccttctttttcgaaggcgggatgattttcacagaaccttctattgttggggtagactaactatttcaagactgatagaccgaactctgaatatatggcaaaatgggacatgaatctatagtagggtcaagagttgtggagccccctttctgctgatgttgcgttgtattgcaacatgggtcaaaaagttgtaccagaattattgtcatgcccttttagcctcttttgagatgtgacgcaatatggatcttgtaaggctgaaattacgcagtcctcttg

SEQ ID NO: 31126 - DNA, 1865 bp, Zea Mays
gaaataaatggcgcctctgctccaacgcaccagtaccgaaccagccgcaggccgtgtctctagagaggaaggagaaacctcagcgccgccacgacttcctcctcgggccataccatttcggcggtcgtataaatccacaccaccccgagcacacaaaagctctagagctttgcctgcttcacagaccaaccaaactaaagcagcggtggtcgcgtcgccgccgcgtactcgcgtgcgtgccaggaagacgaaccaccagccagcccaggccccaggccaacacgcacgccgtcgctacctggcgaggaaggctgcctgcctgatggtccaggacgaaggctcgtcgtcgtcggtcacatcgtccccgctgcacaacttctccaccatgccgctccacgcgtcgcccggcggcgcgccggccccgacgccgccgtggctggtgcgcgagctccgctccgacgagcgcgggctgtgcctcatccacctcctcctcaaccgcgcgccgccacttcctcgacctctgcccgttcctccgcctcgcgggcgccgccgccaaccagtccgtgctggaggccatggagtcggagaggatggtgcacgtcgtcgacctcggcggcgccgacgccgcgcagtgggtcgagctgctgcacctgctggccgcgcggcccgagggcccgccgcacctccgcctcaccgccgtgcacgagcaccgggacgtgctgacgcagacggccgtggcgctgaccaaggaggcggagcggctggacgtgccgttccagttcaaccccgtggtgtcccggctggaggcgctggacgtggagtccctccgcgtgaagaccggcgaggcgctggccgtcacctccagcctgcagctgcactgcctcctggcatccgacgacgactccggcaagcaccaccagggcagcggggaccacaagaggcagcggagcccggagtccggggtgtccccgtccacgtcgcgcgcggacgcgttcctgggcgcgctgtggggcctgtcgcccaaggtggtggtggtgacggagcaggaggcgtcgcacaacgcggcgccgctgacggagcggttcgtggaggcgctcaactactacgcggcgctgttcgactgcctggagtcggcggcgccccgcgggtcggtggagcgcgcgcgcgtcgagcgctggctcctcggggaggaggtgaagaacatcgtggcctgcgacggcgcggaccggcgggagcggcacgagcgcctggaccgctgggcggcgcggatggagggcgccggcttcgcccgcgtcccgctcagctactacgcgctgctgcaggcccggcgggcggcgcaggggctgggctgcgacgggttcaaggtgcgggaggagaagggcgccttcttcctctgctggcaggagcgcgccatcttctccgtctccgcctggcgcggccgtcgcttcgactgatggaggaacgcgtcgacgccttcccgtatttgtgcggaggaggagacgggccgcccgtcgtggcgttgcgcgtcaggtggccgtcacgcacgttggggcttcttttggtcgttttgtgtgttcagtttacgccgtatctagttagatttcaatcaggtttgttcatagtgtacccctgccgctctccaatttggatggatggaatctcatgcttgtttggatcagtcagtccttttagatctgttaatgtaacaactagagctgcttaacagctactatctcactcggtcccggtcccggtcctataacaagcgtggtaatgtacttgtggagtttcaaattttctgacaattatggacatttgtaacaaacacttctggagtttaaaatttgatggatggattagatttg

SEQ ID NO: 31127 - DNA, 1629 bp, Zea Mays
caagtttccaaatcaaaaattttatgaaggaaaaattatagatggtctgaacgttaaggactataacaatatttatctcgatgtgcatatatatggtccttattcattcatccatgttgaagatggtttcgaagaaaacaataaacagggcttaaaaatattgttgaagctgctgtggtagccaatattgttggcagatttgcggaagcatgcgccgagcagaagaagaaaaccaacgttggtatagtatctccatatgcagcccaattagacaaaataatggtgggaatataggctttgttgattgtgttatgagaactaatgtggctttgacaagagcaaagcactgcatgtggatccttggacatgaattcaacatggtatgatttagtcaaagacgcgaaggatcgtgaatgtttctttaaagctcgcgatgatgatttttttgctagaacaatggatcagtttagacttatgcaaaactcacaggtgacagacaatgtttcacgatggaacattgaatgccagtgtgctccagatgcacaactcacatgtgacaaccatgctacaataccagacaaggctccagatgcacaactcacagatgaagaagcggctgcactagaggaagaagaccatcctcaaattgaccttctggatggtttgcggcgcggaggccggctgcggggttccggggcagcgcgtctcgcggaggtgcgtagacgacggcggagcggcgtcctcacctccatggcgtcgctgtcgagcaagcaccacgtcctaatccaggtgctgctcgcccgcggcccgctctctgagcgcgacttccacgctttcatcgatggcgcctttggcaagaacaccgcattaggaactaagcggttggcttcagaggacctggccaatgactgggataataaaaggctaaatccaggaaatgacaattatccactttcaacaggagctgcaaataatttatttttgggtattgagcaaggagctggaagcagcaatggccagtctgcctttcccaagtttgacaatgggagctcagtggcattaccatctgggcagggaatgtctggtcttatgggaaaagggtgcaaaactcagaaagaatctgcagttcaccctggtgtgttatagcttgctgttggattattttgttccaggatatgttgctgcctgttctagctccttcctcaaggctgcggtttgagttttttcgattctgcagtgtttttgctgctctaaaatgtttgtctcgatatttcattagtgcttgttgaagttccccatttgtttatggtataagcgcttgaataaaatgtttctggaaagtaccggcctacaatctggattttggcaaaataattgaattagttgttgtacaatgaggcaaattgtcttacgttgtacttgatgaactctggagtattatcactcgtcgggttgaaaaggggaactatacaatgtaatttcagtacagattattattttttcctgagaactccagttgtgctgttatgcgagttttgcccattcagaatacttttgatgcattcatcagaattcggctgttactttttcatcttttatgcccctttgcatctattaaattgcccttaa

SEQ ID NO: 31128 - DNA, 2247 bp, Zea Mays
cacgtacatccatacgccaccccagctcctctttgtccttcagatcagatctctcagaagagtagagtgcctgccagtgccatgtcgctgccagtcacacagcccattgcatgagcagaagggcaaggaagcttgggagggtgtaagctgaggatcggtgacgtgcaaatgcggccacggggaacctctctgcaacaaagctccgcatctgctctcggcgacggcgatgcggcgctaccgaagaagaagaggaaccggccaggcaatccgaaacctgatgcggaggtgatcgcgctgtcgcctcgaacgctgctggcgacgaaccggttcgtgtgcgaggtgtgcagcaagggcttccagcgggaccagaacctgcagctgcacctgcggggccacaacatgccgtggaagctgaagcagaaggaccccaaggacgcgcgccggcgggtgtacctgtgcccggagccgacgtgcgtgcaccacagcccgtcccgggcgctgggcgacctcacggggatcaagaagcactactgccgcaagcacggcgagaagaagttcaggtgcgacaggtgcagcaagcgctacgccgtcgagtccgactggaaggcgcacggcaagacctgcggcgcccgcgagtatcgctgccactgcaacgccctcttctccaggaaagacaacttcatcacccaccgcgctacctgcgacgcagcagttcgtgggaccgcccagaagccaccgctggtcgccggcctctacgtcggctcaggcagcgatgataggctcgggctctccgacgccgccgcccagatgcatggcttcgcagatcaaggccagtcctcttcagcagcagaagcctcacagtttgaccatgtcatgccatcgtactcgggctcctccatgttccgttctcaggcgtcagacttctcgttgtctttcttcctcggcggcggcactcctcttatcgaacaagacctgtccgacaacggtggtgatctctccgaaggcagccagggccctctgctccatggcaaggcgcccttgcatggcgtgatgacgcatctccccgagcagcagtatcagccaaacagcggcaacgccaacgttaacctcctggacattgggttcttctctggcaacagtggtggcacgtctggcagccagggccctctgctccacggcaaggagcccttccatagccatgacctgacgcaacttcccgagcagcagcaccagccaggcagcagcaacgcccgcgtcaacctccctaaccttggggtcttctctggcaacagcggtggatggcccggaagcagccatcaggacgcgcgccttgtcatccaagaccaactcaacggcggcagcagcagcaacaccgagcatggtaacgggatggcgtccatcggaagccacttcggcggaggcttcgtcccttccctgcacaactcatctccgtcggccgggctctcagcgacggcgctcctgatgaaggcggctcagatgggctcgacgacgtcgagcaccacccacaaccccaacggccccagcgcgctgctccgcgcagccggcttcgcaggcactgccagcgtccgggagactagtagcagggcagcggaagaagagaagtctcacgaggcatatttccatgatctcatcatgaactcactgccattaacgggaggaggcaccggcggcctctcagggttggcgggcgtggacgacggcaatgtgagcacaagggacttccttggcgtcggcagggacgacgcgacggcaccgcagggcctccacggcatgggcgccccgaatccgacccagatgaaatggtacatgtgatggatcaggtcggaaacgcgaaaagaggaagacaacaagaagatgcaagctaagaagggagtcaataaacagaacagaagatcgtgcactagctagtgagtggcgatcagagagatcgagaaaacttaatctagttttgtttcgtggattagttcacttttctcatatgccgcccgccatgattgatatggctaatagtaacagggctgcaagcaatgcagctgctgaacttgttcattgcttttatttcggtacaattttgtggtgtttttcaagtgttcactgttttgggttggagagatggtggtggtctctgcagatgtcgagttcattatgtagaggccggaccagaccagaatttaagcacaatgttttgcaccgttactgcttattattatactagttgtatgcccg

SEQ ID NO: 31129 - DNA, 682 bp, Zea Mays
tgttgttgcgtaaacgtatctgtgaaagtacatgttttgggtgtgtgggcagctccatcatccatggatcagcctccaggatgtcttcgtcgaactttgggggactagacggcgtgctgctcgagggcgtgtgcgtgtctgataggaacacatccgagttgttgtcagaccattctgcggcggtggcggcggcatcagcatcaccagcttctgcatctcgggggatttctggattgggttcgactttggtgtcatccacttcgtgttcctcctgtgcagatgtatcattggagagttgacctccttgaaagttcggtccagaaccagaagcctcaggttctggagaagaatgcacactggcaagagaagaatggttttcagcaggttctatgtgatgaatctggacagttctgctgctgtttccagctgatgcgctgctggttcctgtttcctctagagatggctgaaggcatcaccaaccttggaaaggctttctttctcctcgctagataaccctgatttgtgaactgctgtgcctatttccatatcagaaaatataacctacaattatcaggaaaacattatgtgtaagtaactgtatacaaaggtgaaatggcacaggcaatttaacacaataaaatgcaaaaattatccaattacctcaactctgaagtccacagga

SEQ ID NO: 31130 - DNA, 2573 bp, Zea Mays
gtttcggaaggcacaaacccgcatctctcctgatttggcataacctcgcgcaactatcacagcacaggcaaccctgaggcccagacctgatctcgccggcggcgagcttgtgtccatggctgacggggccgagatggacgaagaggctatgcgggccttcttcccgctctccttcggaaaggcggctccgcggcccagctctgctacctcctccgcccactccaacacccttcgcaagcctcaaaaccctagtaaccccaagccttccgcctctaccgccgcggacgacgatggggccgctatgattggtcctcctcgcccgccgccggcgcccgcgggggaggaagacgatgaggacggcggcggtatcatgatcgggccgcctcggccaccgccgccctccgctcgcggcgagggggacgacggcgacggcatgattgggccgcctaggccgccgccagcggatgatgaagacgtcgatgatgatgaggacgacgacgaggaggagatggaggatgatggggagggtggattcaatcggatccctcttagcaacgaaattgttctgcgggggcacaataagggtatgaattcaaagcttcagtcattcagacaattggaaccatttgagggccatcaagttcgtagcctaagttggagtccaacgtctgatcgattcttatgtgttactggttcagctcaggccaagatttacgacagggatggacttacactaggcgagtttgttaagggtgatatgtatattcgtgatctgaagaatacaaaaggtcacatctctgggcttacaggtggtgagtggaatccaaagtcaaaagaaaccattttgacatcatctgaagatggctccatgcgtctctgggatgtgtctgattttacaagtcagaagcaggtcatcaaacctaagctggtacgaccaatgcggattcctgttacatcatgtgcatgggaccatgaagggaaacgaattgtgggtggcataggggatggttctatacaggtctggaccataaaagctggatggggtagcagaccagatatccacgttgagaaaacacacacagaggatattactggggttaagttctcaacagatggacagagccttctgtcaagaagtatggatagtactcttaagatatgggatttgagaagaatgaaaactcctttgaaagtatttgaagatctgccaaatcactacgctgagacaaatgcagcatttagctcagatgagcagcttatttttacaggaacatctattgaaaaagatggtgacaatgggggattactttgtttctttgatagaaagaaacttgagcttgtatcaagggtgggaatttcagcacattacagtgtgataaggtgcctctggcatccaagaatcaaccaggtgtttgcaacagttggagacaagaaagaaggtgggactcatatcctgtacgatccttctattagtcaaaggggagctcttgtatgtgttggacgagcaccaaggaaaaagtctgttgatgattttgaggtgcaacctgtcatacacaatccacatgcattgccacttttcagagatcaaccaagtcgtaagcgtcaaagagagaagatactgaaagacccactcaaatcccacaaaccagaagcacctgttaatggtccaggttttggtggaagagttggtactacaaaaggcagtttgctgacacagtatctcttgaaggaaggtggtttaattaaggagacctggatggatgaagatccaagagaagccattttgaagtatgctgatgctgcggagaaagacccaaagtttattgcgccagcttattcccaaacccagccgaaacctgtttttgcggagtctgattcagacaatgaagagaaataaccatgcgcctggttacctaagctagcatgcacctgcattctgttttctgacagatgtctcttgatgagcttgttgcacatgccctgtaacctgcttttcaacagtggagaaacaaaagagcatcttcaagggtcttgatgataggagctctgccccttcattacagatggatatgattagtatctacgacacttcagcactagagctctatgatttgttggatgttgtacccactgtatgtacttagtcctgaaacagtggccaatctatattatactctgttctttcttttttatttgtcgcggtctagtttaaaaatgaactagcgggcgacaaatattcaagaacggaggtagtatatgaggtagtatatgacttagacgtaactttagtgcaccgaatgtagtcaacctttgtttgctttggagaatgaggatttgttgttctagtatcagtctctttgatgttcctaatgggctagttggaagatattttgaggattttgaaaggcaaatgctgtttttgtgtggtttgggctgtacggtccaaacaagttgtgaaacagtggcgtatcagccttgttattactatgatccaacaagccaatggtcctggatatagcaagatttggataacacaatcctgaaatatcattgctatctattttctttaataa

SEQ ID NO: 31131 - DNA, 3323 bp, Zea Mays
aaaagggtaaaacctggaaacaccttggagcaccagttacccaccctaccttcaaaaacaatcgcctgaacctgaacaaacgatctcacgagtgttctcataggaggaaagcgagagaagcaagcaagcgagaagctggagcagcgaacaccaagaattcggtgccgaagcggaggcgaaggggaggaggacgaagggaagggcagtgaccgaagagcgagcgcgccacgtttgatctgggtatattatgagtgttccaagactaatgcatcatctttgatggtgtaccaaaaaaatggttgttaacatcaaggcctcaacgagctagcctgagacaagaacactggaaccatggtttcaaaatcatattcaaatctgctagacatgaccccaggagatgggtttgactttcgacgaccttttaagtctcttcctcgtgttgtaacttctcctagcattatatctgaccatgattgggattccataagtgatggtgattcagttggttcagcattttctatcgagaggaaaataattgtcgccaacttccttccgctgaattgtacaagagatgaaaccggggaactgtccttctcattggatcatgattcactactcatgcaacttaaagatgggttttcaaatgagactgatgctgtgtatgtaggcagtttgaaggttcatgtagatcccagggagcaggaccaagttgcacagaagcttctcagagaatatcgatgcatacctacttttctcccatctgatctgcagcagcagttctatcatggcttctgtaaacaacagttatggccactttttcattatatgcttccaatttgccttgacaagggtgagttgtttgatcgcaccctgtttcaagcctatgtccgagccaacaaactttttgcagataaagttatggaagcaatcaatacagatgatgattatgtttgggttcatgattatcatctcatgctgctccctacattcttgaggaagaggttacaccgaataaagattggtttcttccttcacagcccttttccctcttcagaaatatacaggactctgcctgtaagggatgaaatcctgaagtcactgcttaatgctgatctgattggtttccaaacatttgactatgcccgccacttcctatcttgctgtagcagattgctaggcctgcattatgagtcaaaacgtggttacattggaatagagtattttggccgaacagtgagtttgaagatcctttctgtgggtgtccatgttggtcggcttgaatctgtcttaaagttgcctgctacagttagtaaggttgaagaaattgaacaaaggtataagggcaagatactcatgttaggtgtagatgacatggacatcttcaaaggaataagtctgaaattgcttgcactggagcttcttctggacagaaacccaaagcttagagagaaggttgtccttgtacagatcatcaatcccgcaagaagcacggggaaggatgtgcaggaagctatcacagaagctgtctctgtggctgaaagggttaacacaaagtatggttcttcaagttacaagcctgtcgtcctaattgataatcgcataccgttttatgaaaaggttgcattctatgccgcgtctgactgttgtattgtaaacgctgtgagggatggcatgaacttagtaccatatgagtatactgtttgccgacagggaaacgaggagatcgacagagtcagaggccttgacaaagacacccatcacacaagcacacttattgtttcggagtttgtgggttgctccccatctctgagtggtgctttcagggtaaatccttggagcgtcgatgatgtggcggatgccttgtgccgcgcaactgatctatctgaatctgagaaacggttgcggcacgaaaagcattatcgctatgtcagtactcatgatgttgcttactgggcgcacagctttgctcaagatctggaaagagcatgcagagaccattacagccgaaggtgttgggctattgggtttggcctgaatttcagagtcattgctctttctcctggcttcagaaagctttcttcggagcactttgtttcttcttataacagggcttctagaagggcaatatttctcgactacgacggcacacttgtgccccagtcgtcaatcaacaaggctccaagtgaagaagtcatctccattcttaacaccttgtgtaatgatccaaagaacgttgtgtttatcgtaagtggacgaggacgtgattccctcgacgagtggttttctccatgcgagaagctccgtctagccgcagaacatggctattttatcaggtggagcaaggaagctgcatgggagtcgagctattcgagtccgcggcaagaatggaagcacatcgctgaacctgtcatgcaggtatacaccgagacaacagacggatcttcagtcgagtcgaaggagagcgctctagtgtggcactatttggatgcagaccatgatttcggttccttccaagcgaaggagctaaaggatcatcttgagagggtgctatcaaatgagcccgttgttgtgaagtgtggccattatatcgtagaagtaaagccgcagggagttagcaagggtcgtgctgtcgacaagctgattcaagcactggccaacaacaacgggaaggcacaggatttcctgatgtgcgtcggcaacgacagatctgacgaggacatgttcgaatgcatcaacggtatggcctccaacgatgtctcatcgaccacagtaccggaggtgtttgcctgttcggtcggccagaagcccagcaaagcaaaatactatgtggacgacaccagcgaagtgatcagattgctcagggatgcaacccgcttctcatcgtcgcagcggagggaggacgtcaacgccagccgcgggcgtgtgaccttcagagacgcactcgattacgtggactaggcaccagcagcaattcttagttactcgaaatgattagctgcggagcttgtaaattccgctgtcttctgtctgccaatggttttcgttctagagaattgtagtgtagccgacatcgacatggatcgtcgtcaccgatacacgaacagcggaaatatgagttgaagttcgccgtttcgaggctcagaattggtacatttatagaattgtagtgtaggcaattttttggtagggaatagtaattggtacatttatagaattgtcaattgtttttcttctaccgctgataatactatagcttcgctaaattaatattattgtttcacttagcgatgaaatatatttagcaccactgatattgatcaacg

SEQ ID NO: 31132 - DNA, 2076 bp, Zea Mays
caaactttcagaggaaccatgaactggccatgttccccttcggcagatttgctctggttattttgcttccagtcagaggtccaaaatatcaaagggatgcagaaagatgtggttgcatgatggagtaccttgcctggaaattggcaggatacacaaacatagttgtactttacttgatctcgatgacattggactgcaaatatatgcacaacaattgcctcatgcacacacacataatggggccgcgagttgtagctcaaccatcgtctctggtttctttctaggtggagatggttaaaattgctggtcacttataattaccagcatcttatacgtcattgttgttcatcgccaacttattcaagtttgaaagtagaacactgagaagatggctgagaaagagaatattctaatgcagagatatgagatgggaaagttacttggaaaagggagttttgccaaagtttaccatgctcgcaatgttaagacttcagaaagcgttgctatcaaggtgattgacaaagataagatcaagaagtgtggtcttatggatcaaataattcaagagatttcggtgatgaagttggtaaaacatccaaacattgtccaattgtatgaggttatggctaccaaaaccaagatatattttgtgatagagtatgtcaagggaggagagttgttcaaaaaggttcaacgtggaaggttaaaagaagatgttgctcgtacatatttccaacaattgatcagtgctgttgacttctgccatactagacaagtttatcatagagatctaaagcccgaaaatcttcttcttgacggaagtcacaacttaaagatttcagactttggtttgagtgcacttccaaactgcaagagaaaagatgggttactccacacaatttgtgggactcctgcatatgttgctccagaagtaattagtcaaaaaggatatgatggtgcaaaagctgacatatgggcttgtggagtgatcctctatgtgttgttggcgggctatcttcctttccaagacaagaacatgatggacatgtataagaaaatttgcaaagcagaactcaaatggccaagttggttttcttcagatgttcgaaagcttctgcggcgcatccttcatccaaaccctaatagacgaatatctattgaagaaataaggactcatccttggtttagaattggtcttgatgcaagattgtttgattctacaacgagagattatgtgcctagtgacatggatttggctttgaattccttaaatagcaatatggtcgagtgtaattcagcggcagagaaactgactattttgaatgcttttgatatcatctccctgtctaacgggtttgatctctctggtatatttgagaactcaaacaaggagtctaaatttatgtctaccaacacagctatgacaattatcacaaagctaatggaagttgcaaagagcctggatctgaaggttataacaaaaactggtggattgttgaatatggaagctgccaaatcaggaataaaaggtgtgatgtctataaatgctgagatatttcaaatcacaccaaattatcatctcgtggagatcaagaaaatcaatggtgacatccttgagtatcataactttatgaaccaaagcatgagaccggcactagaagatattgtgtgggcatggcatggtgaacaacctgacgagaagtagactcatcaactttagataatcatcaacctacaaccttagatattgtggcagctttaatgctattagaaagtgtatcaggcattcaggccaaaaaaatgtcatgggacttaataatattacttatatgttgtttttattctcacgttcatgcagtggaatgttctttctgttgaccaatactactggaacatggtttctatctcaagggaatattttcataatcaattactttgattggtgaaaaaaaaggtattagagaatgggtgaacctaatagagctgctttattgtatgaattttccgtggtaacgttagctagaaagttctttactctagtaatttattaagaaagtgatgtctgatgtgttgtag

SEQ ID NO: 31133 - DNA, 1866 bp, Zea Mays
ctggacttcacgattcagccttgtgaactacccactttccaattcgacatcttcgccctcgaatcgagcttccctccaccgaatcgagttcctccatccaaatcgagctcattgccgccggatcgaggtctgcgtggatcgagctcgagctttggagaaggagaggaaacgggggacgggcacggggggagcaaggcaaccaaacgggtggagggaaacacgccaaacaggctcctcgatcgttccgggctcgggctgccacccgccattcggtgtcccctccttgacaggtgcccgagccgcgccgagctccagcctcatttccacggtccgcgccggcactcttccctctcccgatcgtcctcctcgtcgcctgccgcctcttccttcttcccactccactagcttcaggttggactgcacaacgtggagcggagatctatccgaacacgggattgattcatctggtgtaattctgaagttaccttggaagtcctttgcgcttttgactggtcgggttgcataggccattgttgagaggtgatttggcctaagaatgggggctccaaaacaaaggtggacttctgaggaagaggctgctcttagagctggaatagcaaggcatggagttggaaaatggcgcacaatattgaaagatccagaatttagttccaccttatgctaccgctcaaatgttgatctcaaggacaagtggcgaaacatgaatgtgattgtcagtacatcgagttctcgtgacaaggcgaagtctgcattgaagagaatacgaactattcccaagaataatgagcacaccatggcaattaccagagttacttctgatattgatgatgagattgttgacgaaaagcctatagtatcattgcctagtgaagcaaagaacacatcaagttcgaagaaatctcacaggctagataatattataatggaggctataaagaacttaaatgagcctacgggatcacacagaactactattgctaattacatagaggagcaatattggccacctagtgattttgatcacttactatctgcaaaactgaaggacttgtccaccagtggcaaattgataaaggtgaaccggaagtacagaatagcacctagttcacccaattcagagcgccgaagccccaaaatgccactgttggaagatgtccaaagagagcctgtcaagatatggagtgatgatactaaaacccttaccagatctcaagttgatgctgaattggcacgtatggcaaccatgactgctgaggaagcttcagtggcagcggctcgagcagttgctgaagcagaggccatcatggcagaagctgaagctgcagcgaaagaggcagaggctgcagaagcagaagcccaagccgcacaagcatttgctgaagcagcgtttttgacattgaagaacagaaatgctggaaaattgatggcctaaggttgatcctacttggactctcggcctcgcggctgttctgaaacggcttttctgtgccatgtagatttgtacaacagtacgtgtttactacacttcggtttaaagcagctgccccggtgagtgtatcaccttatgttagtgggagccatgtgaaaactccagcctccagcgcactagtagcaacaatagcagcttgccacaacgccattcagaaaactgggtggcataaactcttccagtgtcaaatgtttcgctaacgatttgcagtattgcattgtgcatgaacagcctttgcattagtgcattattgcgctgcctgccaacagtcggcccgtttgctgaaaacgtttgtccggtggtgcactggcgctgataactacatattctcacaatattaaattaccagtttcaac

SEQ ID NO: 31134 - DNA, 3767 bp, Zea Mays
ttgggctcaagtgggtattcaaagtcaagaaggatgaacacggtgctgtggtacggcacaaagcacggctcgtcgcaaaaggctacgctcagcgccaaggaatcgactacgacgaggtgtttgcaccggtcgctcgcttggaagcggtacggctgctgctggcgttggcggcgcaggagggatggcaagtccatcacatggacgtcaagacagcgttcttgaacggtgacctccaggaggaggtgtatgtgcagcaagcgcctgggtttgctcaacctggacaggaacacaaggtatatcgactgcacaaagctctttatggtttgcatcaagctccccgtgcatggaataaaaaactggatgaacaactgggtgttctgggatttgtgagatgtccatctgaggctgctatctactgccgtggaagagatgcggagagactggttgtaggtgtctatgttgacgatctggtgatcacaggcactagcagcagcagcatcaggaagttcaagacagaaatgactaagatttttaagatgagtgaccttgggttgctatcttattacctgggtattgaagtgaggcaggaagaagctgggatcaggttgtctcaaggaagctatgcaagaaaaattctggagaagtgtggtctagaggactgcaatccctgcaccgtgccgatgcagcctaagctgaagttgagtagggaaagtgatagttcaaaaatcaatgtgactgaatacagaagcttggtagggagcctgagataccttgtgaatactcgacctgacttggcatattcagttggatatgtgagtagatttatggaggagccccatatggatcatcttgcagctgtgaagcagatcctgaggtacatagcagggacaagagattggggcctgttctattcaaggagaaatggagggagtgatgagctcttgggctatagtgacagtgatatggctggcgacttggatggcagaaagagcacatctgggatccttttctttcttgggaggagtccaatcagctggcaatcaactaagcagaaggtggtggcgctatcaagttgtgaggcggagtacatcgctgctgctactgctgcatgtcaagctgtttggctggcacgactgcttgctgaaatcaggaactcagagacaagcagacctttgctaagggtggacaacaagtccactatctcgctgattaagaatccagtgcatcacgaccggtcaaagcatattgataccagatttcatttgattcgggagtatgaaaattcagggcaaatcaaggtgaagttcatcagtactgaagaacagctgggggatattctgaccaagccactcggcaaagtcaagttccaggaactctgcaccaagattggcctaagcctagtggtgctcctcctggccaaatgggagcaagctatcctcgcatgtttctggtcctcctgctgcttcatggagccagtgctgctttgaatcctccaacagcagggccaaaatggcagactctgagcggtcgtccccctcaagtcgtagctcgaggaggattctctgcgaccgcataggcttctgtaagacagggctgacccttgataactcgacgactgtcgctgagatcttccccaagatggacaggacgtacaagctgcagggagaggatgtccatggctggttctccctagatttcaccgcggagcagctggttcagaacgtcactttgatccagaacatcttttctcgcccgagcacattcgatgcctcctttgggatgtacacgctcgatgatgtcgttgaactccacccccctcaaatatggctgaatgtagagtacaattcattctttatggagcacaagttaagcagcgaggactacatactagagctaccaaaagattttagcctcacgtacatctcctcgccggagattgggttcctgaaaagcttgagtgggaagctcaggaacgccaagacaaagctcatcttccggttcctcaacgaagacgtcgaggagccttcgaccaagaaaacgtacggggagctcctgaaagatctgaagtccatcaaggagtttgcagctggcgtccttgtgcccaagacgtacatctggccactgaaaaaggaccagtacttggcgccatccaccagcttggtcaaggatgctcatgccctcggcctggaagtgtacgcctccgggtttgccaacgatatcatcttgagctacaactacagctacgatcccactgccgagtacttgcagttcatcgacaatccagacttctctgtcgacggtgtgatcacggacttcccgcccaccgcatcaggagctgttgcttgcttggctcattccaagggcaatcctctaccacctcctggaaaggacaccaggccgttgatcatcacccacaacggcgcgagcggcatgttcgccggcagcaccgaccttgcctaccagcaggcgatcaaagatgccgccgacgtcatagactgcacggttcagatgtcaaaagacgggacggccttctgcatgcagtccgctgacatgtccagctccacgaccgcgtccaccgctttcgcgtccaaggcctccactgtccatgagatccagaacaagtccggcatcttctcgttcgacctgtcatggagtgagatcgcgaccttgaagcccgacctcatctccccgtttgctcaggcaggcatgaaaagaaatcctcaagcgaagaatgccggcaagctgatgactgtgccccaattcttggacttggccaaggccagcaacatcaccggtatactgatcgaaatagagcatgcttcgtacctggccaagagagggatcggcgtggtggaggcggtgtccagcgcgctgaccaaggcgggctacgacaaggagaccaagcagcaggtgttcatccagtccgacgactcgtcggtgctcgcggcgttcaagaagttcacgacgttcaggagggtgctcaacatcgaggccaagatcagcggcgcctccaagccgtcggtggatgacatcaagaagttcgcggacacggtgaggatcaaccggaactcggtggcgcaggtcaccgggtacttcatgacgcacttcaccgacacggtcagtagcctgcaggacgccaacctcaccgtcttcctcggcgtgctcaagaacgagttcatgaacctcggcttcgacttcttcgctgacccgacgatcgagatcgttacctactcgtgggcggtgctggccgacgggctcgtcacggactaccctgccaccgcggcttcgtacttcagaagtccatgcagtgacatgaacctgaacctgagctactcgatcctgcctgcacaacctggcgctctggtgaacctggcagcccccgggacgctggctccggcgggagcaccggcaccattgctccaaccctccgacgttgtggacccgccgctgcctccagttaaagctgtgatcaccgccgacgcgccagcgccagaggcggctgacaatacctcctcggcgtccagctccaacgcggggaatggcctcttgtgggctgccatcgttgccctcttgtccctgagctttctgcgctgatcccttcctcgatggcttccattgtactcccgcatgtccccctcccccctacatcctcgaatgtgctgtaacataatgttccttaaatagatataacctgtcattaacctgcacataaatacaggtcagaaaaagtttaccctgcaccaattcatgattggatagtggatact

SEQ ID NO: 31135 - DNA, 4840 bp, Zea Mays
ggagcaaggaaatggaaattcgggagcccaccaaaagctttcgtcttcagttcccaacacctgtattggtctattggagagagaaaaagggagagtggaggaagaacacgcgagctcgtaaaagtggcagggtgggggatgggatcccattagcgcagcgcaattaggcgcgccctcggctaaataaaagaagccaaaagaattgcgcgcggcaccggaaaggcgaggcctttgcgctcgcgcaccgtagaaatcgttaccggcaccgccaccacgcccactcgagcaagccgccgagcacccagcgagaacctcccactcctcccagtggctctctgtcctctcgcgccccctcgcgtcctcactgccacttgaaataccggtgggcacacgaccgctccagtgttcaactgctccgggctgtgatttggtgcgacttggtgttgttggtggtggtgctacacgtcttggcctctgcttcctcggagggattggagccgtttgaactcaggagcttgctgctggccatggtccaagggttaggggatggattgaggcgtggggggagaggagcgcagtagcttcctcttcttcttcttcttcggtgcgcgggtctgggctctcgggagcgagcatggcggcgggttgggattgcgacagggtcagctgatcctagcaattggacccgacagaccattttattctgtgatctcatcataattgaagcccccactgatgaaaagctgttaccttggttgctttcttgagtactggtcaccagatagtagcatgttctcttctgtgtgattaggcttgattgtggactgacactcctggtcacttatctcttgtgatcatccagagtatatcatctgtcagctgatcttttctctatggaatcgcttccctttatgaaagtatccttgttttagggcaaatctcctttggcaaacattgttcagggtgcatcactttgctggttatcctgagcatattctcctcgtcgaatgaactatcagcagcgaagagacttccaaatgatatccatcaggaaattctcatttagtttgatggaagtttcataaggtttcgtaccatctgatttgctgggcaaatctcctttggcagtacttattaatagctcttttgggggcaaatctcctttggcattagctttaagatttctcactgggcaaatctcctttggcactagttctacctttagtttcacatcgctcttcgggcaaatctcctttggcactaaataccaattatatttactatttttagtaaatctccttccgctgtgcgcactagcatctatatctgggtaattctcctttggcattatcagtcaagtgtgctgcctgcctgcacataacttatacgagaatatcaagaagtgattctggaagaaatacttggccagctggtatattgaccttctggacatcaatttgcatattgttccttgttcttgagattaccacgttacccaagcagccacaccttactaagaaggtaggtaattatggagtaacatttcttaacaaggttgtcttatgccgtatcaataaccaagtgtgacgttgcagggtttgaaatcatggatttgtttacaattgactcggatagtgagtcatatactgggaccagtgacagtgaagaccaagaatgtgaatttacatatagtgaccatgcccaaaacatcttgtccagtctggatgagagcattggcaagattgataattttttgacttttgaaagggggtttctgcatggggatatagtctgccctgtttctgatccctcaggtcagctgggacgtgttgttggtgttgcaatgtttgttgacttggagacaagctcaggtgacataattaaagatgtaaacagcaagaagctatcaagagtgagatcttttgtttccggtgactgcgttgttatggggccatggattggacgagtgataagagcatttgatcttgtcacacttttattcagtgatggagcaaagtgtgaaatcctgttaagggattcggatgtactgaagcccattcctcctgttctttttgaagatgcaccttacttttattatcctggccaacgtgtgaggatagtcgatccgtcagtttccaagtcagcaacatggttatgtggatcatggaggcccagtagagatgatggtattgtctctcatgtcgatgtagggctggtgcatgtgaactggatcacatctgtaaccaatgtttggggagataaatcatcaagtcctccaaacattcaggacccaaagaagctcaccttgctgtcatgtttcccttacgctaattggcaactaggtgattggtgtgctcttatgactgacaacaatggatgcctctggatggattctggcaagtcttgtattcttagtgaagaccagaagtgtgactctcatgcacacatgtattttgaaagttatggttcagattgttctcaaacatttgttgttgccaagacaaagagcactgttgatgttctgtggcagaatggaactgtatctcttggtctagaaccccaggcattactccctgtgagtacccttggtgaccatgatttttggccaggtcaatttgtcctagaaaaactgactgtagaagatgctgcaagatgtccgcgaacggcaatagtgagtgatgtggatgcactggagcgaacagtaaatgtaaaatggattggtccagcacatagtgacattgtcagctatggaagtgaccctgcagtggagactgtaagtgtttatgagctagtagagcacccagatttctccttctgcactggcgaggtcgttatcaggtcagctatgaacatagacaagtctgaagcagatcccacaaatgggtcattggcaagcaaagaatcattggttacctcctctggcttcttatcatgcaccggaaatgtacttgggtacaaggacaatggaattgaagtgcaatgggctaatggtgttatatccaaggtgcaacattttgagataattggattggacaagcttcttgataatagttctgtagaatcaatgaatgaggaacatacaattggtgattcattagacgaggctgagcaggaggaattgaaccatgagattgctctggagtctactgaagactgcactggctccttgtgcaaagccactgcttttctatttcccaagacagcttttgacttcctgacaaatgtggctgctagtttgtttggtattcatggttctccatctccaagctcagttttggtagatcctcgatatgaaattgtgaagatggcagaaatgcagccatgtgcagaagaaacaccaaaagaagaacagatagtgaagtttgtggcgcagattgacaagccaattctctcttcagaagatgccatctcaaaaagattcgatgtagtcactgactgtttggatcatcattttgtgaaggaaaatggccatgaaagtgttacaagaggttggttgaagaaggtgcgactggaatggaacatcctgcaaaatgacctaccagatggtattcatgtgagagtttatgaggaaaggatggatcttctgagggcttgcatcgttggggcacctggaacaccttaccatgacaatctttttttcttcgatattttctttcctcctgattacccccatgaaccaccttctgttcactatcactctggtggtctccgcctgaatccaaatctgtatgagtcgggaaaagtgtgcctcagcctcctgaagacatggacaggcactggtaacgaagtgtggaatgctgagagctcaactgttcttcagctgctgttatcgcttcaggcccttgttctcaacgaaaaaccttacttcaacgaggcgggatacgacaaatttgtgggcaaggctgatggagagaagaactccatcacgtacaatgagaatgccttccttctgtcatgcaaatccatgatgtatgttttacgcaagcctccaaagcattttgagacgttggtcaaggagcatttcacctgccgtgccccgcacatcctggatgcctgcgaggcttatcttgggggcgatctcgtcggacacgcgcacgacaaagcatacgtagcagaggacggcaacaagaactgctcaaccggtttcaagataatgcttggtaagcttctgccgaagctcgttactgccttctgtgaggccggtatcaccagcgaccggtaaaaccagcgcaagcctgctctctgctgcatcagcaatggaattgggaccctttattatattgcgcgtgtatattcgatgcttgtgtattccaaataaaatggcgcctggtttgtgtgttacttgtgcctgtcttgtaaatgtgaaacagtatatacagatgattgctgaactgatatgcttggtcttgtaaatgcggaacggtatgtacgcatgattgctggtgtttatgttgctaagctgaaggcagctaaacactcaagtgtttgggtttgggctgtcttctgcggtcagtgtgaaataaaatgtaaatgtgtgttgttcaatcgttttggactattggcatagcagctgtgtattcatatatttgctcatattgcaatctgaaatacgaaggcaaggggatccattgttgccgtgctgtttatcttgtatatggatgtgctggattgatttttatttttattttttaatacaatttattgcgcaaattacataaatatctcgaaaattcacactaccgaaaaccataggttgtcatggggctaaataacattttggggaaaaacaccataaataagtgaaataggtaatgtttaatttttaacatctatttcaaaa

SEQ ID NO: 31136 - DNA, 616 bp, Zea Mays
attgcagtagtacgccatctgcgtgcggtcgtgtggaactgtagtgctggacatcctcgccttccagccttctcgaaaatcgaaaccctagaccgcgcgccccctcgccctccggccttccacgtccgatccgatccaaaatgcataagctaggcagaggaagccgggacaaggtgcaacagttcatggcaattaccggcgcaagtgagaaagctgcccttcaggctcttaaagctagtgattggcacttggaaggagcttttgatgttttctacagccagccacaaattgctgttgctaatactcgacatctggaagagctctacaacagatataaagaaccagatgctgatatgataatggtggaaggcatatcacagatctgcaatgatttacaggtggatcctcaggatattgttatgcttgtcatatcgtggcatatgaaagcttccactatgtgtgaattcactcgccaggagttcattggtggactgcagtcaataggagtggattcaatagagaagcttcaggcgaagttaccttcattgcgagctgagcttaaagatgatccttgttcagctaagggatgtaccagtaatggatggtttcatctgcc

SEQ ID NO: 31137 - DNA, 1538 bp, Zea Mays
cctcgatgaaacaaaagtatgttctgtctgccaggtaggtcccgccggaacggatcccctgcttcttctaccgaaatcgttgcttccgacgcaccagggccgcgcgccgccggcgaccttgccgtggcccttctacaaaaccgacccgcgccggagctccgccgtcggatgtggcggagacggcgtcaatggcgtcctcctctgctgccgagtccagctcccgcctctctgatcgagcgaggaggtcggcgctgggactcagattcatggtgctcctgatgcacgtgctgttcgttggcgctgtcttcatcctcgatccgaccctcgactggcgaatccacggggagccgtggtatatagggttgtatggagtgcttgttctgctcacgctagtgcaatacttctatacagctggctcatgtccagggtatgttattgatgtaatgagagctggttccatgatgcatgcaaccttcgtcaacactgctgctctttcaaatcaaattcaagaaatggaaacataaattctccgacgagtcgtgctcaactacagaaacttagcacgatgactcctacatcttcatgggcacagatggttatggatctttatcctccagggtcaagcagcagggattggacttgcacttactgcaggattgttcaggtggtacatatttgaagaaacaatcttgtgtatctggactgctgctctctgcatcgagtcattgtgtttagatgtggacaaggcctggtggaaggactttgttggtgttatcctgttggcagcgcttatccttatcctgatattcctactactattgtggttatttcattcgtacattgctctaacaaatcaaacaacctacgaaattgccagaaggaagcgaatattctacctaaggggagtccctgaaagagttcttccattcagcaaaggcatatgcagaaatctctacgatttctgctgttctagccagaagggatatattctggaagctgtgcccccaagtgaagagctggaagctagagctgcccgttacacgtgccgagatgtcatttgctgtcgttgctgctgataggttgtaccatagcattctgcccgtatagcccagttgcgctgttctctgttcaaggttaagttaatggaagcaaattttagtgacctgcgaccgttagatgcccccagagttcattatttgtgcatagtcatttgtacatttcactcagaaaaatgtgcgctctgagatccagttgttcacattctgtatggctttgaattcaaataggttttcaggacagagaactgatctgtacttcagttttttagtcgaaatgtgtgttggtaatttattttaagattttcttatatttattcctagccatatattttatatttatttatcttgagggcttgtgttgtaacacccactttgtaattgctaggaataataccagtagaggaacaatttctctttatgagagttggatctttatgcatcatcttatgtgaacatcatgcccaaaacaattaataaaaa

SEQ ID NO: 31138 - DNA, 1716 bp, Zea Mays
ggaaacggactaccagcgctgagccgttccgtttcttttcaatcttggcgttttgtctccattcaatagggaaagggatgtttcgcttgaggctttcctttgtgcctgtgtcttctctgtagctttcaagagaataaaaatttggagcttctctcgcaccagcgtcctttccttcttccttggtttcatgctgacaactagggctgatcttcaggacggcctgttcttggttcggttcctgagagcgattgatagacggagtttcttctttaggagtcgtgcactatgggtaattgctggtttaaggggaatccatactttaacagggtttcttccaatgcaaccaaagcagaatctcccaaaattcagagcccctcggagagaactgaaaaggaggattgccagctaccatccaacccgaaagaggcaagattcgttactaggcggtggtggatttggcagagtctacaaaggttttatcaccaaggatctccgcgaagggttagagatagaagagcccacaagagttgccgttaaggtccatgatggtgacaatagcttccagggccatagggagtggctggctgaggttatatttcttggacagctctctcacccgaatttagtgaagttgatcggctattgttgtgaagatgaccacagggtccttgtttacgagttcatgcctctaggaagtgtggagtctcatttgttttcaagggttatggtgccacttacgtggtcgatcagaatgaaaattgcgctcggtgctgcgaaaggacttgcttttctgcatgaagctgagaagcccgtcatctatcgggacttcaagacatcaaatatattactagatgaggaatataatgcaaaactatctgactttgggcttgcaaaagatggaccagttggcgataagtcccatgtttcaactcgtattatgggtacctacggttatgctgcaccagagtacattatgacagggcatctaacggcgatgagtgatgtctacagctatggtgttgtactactggagctcctcacgggccggaagtcactggacaagtcccggccagtcagggagcagatgctggcagactgggcactcccattgttggcacagaagaagaaggtgcttggcatagtagacccaaggcttgccgaggactacccagtgaaggcagtgcagaagacggcgatgctggcgtaccattgcctcagccgcaacccaaaggctaggccgctgatgcgcgacatcgtcgcgactttggagcctcttcaacagctggaggagacccctggagacagcgtggcagtgacacttgaagggacttgaagcagtgttccattcacagctcacatcacagtcacacacagctctggaaaactcgggtgccacgtacttaactatgcatgataatagtagctagctagtgttcttgatatgcaggatgatttcttgattgtttaattaatccatggagacagtagctttgttcagcagaaagttagtgtgtatctcagtaggacggttcatgtgtgtgtatccaggtgttcagtcctggcgtagcgaactccctggcatttcggatgcgggcaagtctgtgcaatctgtatttgcaatgcttgttgcccgcagaggaagcttgcttaccagtgtttgtaacctagtattgtgcagttcatgatctatgcatgttgaataatgtagaaataaaa

SEQ ID NO: 31139 - DNA, 1916 bp, Zea Mays
gggcaaaccgtattgttggcttcgcctagggtctcccttctactgtcgccgcaacctgaccaacctcccttctactgcccgcctagggtctcccttctactgccgccgcaacggcgcaacctcccttctactgccgccgcaacctcccttcttcgagtcccatccgacctagccctgcaacccgccggacgacgagcagtgaggcccgcggccgagatggaccggtacctgacggtggagcggccacggaacgagtcaaccatcgaagagaacgggatccgcatcaccgcgcagggcctcatctgcaactatgtctcctacgctacctccctcctccaggtgcctgggcttgtcctcaccatcgccgtcgtatcgtattgtacttaggatgcgctgttctgttcgagtcccgtccctgtcgattcgaagagatccccagcaacgtgagggaggtgttcctgaccggccccacctccaagttcggcagggccatcgcgctctacctctgcaggaagaagatcagagtcctgatgttcacggtgtcgtcggagaggttcctgaagatccagagggaggcaccgccggagtaccagcagtacctcgtgcaggtgaccaagtaccaggccgcacagaactgcaagttgatcatagttttgcatgaactattggcgttggctatctaaaaggacagaaaggcagacatgagcaacagatcccgctccatgggctgaaactgggattcgtgatggcgcccctcttagtcgtgtgtagggcgagctgctgccatggtggctttttcttgcgggtgtgagctccgctcgccgccggtcttggacgccgtggctaggctcctaccacccctccctccacccgggactccacgctgccaccgccacacgacagtacgcatacactcttcttcctcccctcgctctggatggctggcgtccgctccctcagcgcctccgcccatgcccggctcccgcacttgccggctccccgatggagatgaatgaagaaaggaagatctgcaagaataaagtcgaggcggaggcttggtttactggtcttagtgccttgatatgtcgaagacagcatggatcccaggtccaacatatagatggaatccggattgctggacttcctattgatatggtggtgatgcatctgctgctgaagctgaaggaggctcagaaaaatctaccattgaaaaagagctagagcagcttactagcatattgcctgatcttgagaagaagcttgaggacctgtctgaagcaaacccaagcgctgacatggatgagatggtgaaggcaattgtgtccagggtaactgaagtgatgccaaaagctgcatcttttacttcttcccaaatagcaacctcaagcaatggattcgactcctcggttatgtctacgacagcgacaactggaagctctggaagcactgtgaactgaccttggggttgtaggcagaggcgtcaaacgagctagcatcaagccgatctctgccaaacctgttgctaagaaacctgcacttgattcaccatctctccaaggtgacaacagcatcaactctgaggttgtccctgcgacgcagactgatgaatccagctaaagctctacatttgaaacgaacgctttctgacgggggcacggcgataacacgccttctattctagtatgcttagatagattcaatgttagcgcaaacgactgatgataagtttttcagttagtattttaatttggatttagagtacacttatgtatgatttatttgacaatgcttatttatgagacattgaattgtacttatctatattacattaaatatgatgttattaaatatgtgtgtatgtatatttatcttttaaattattataatgtgacatctcaaaaatgattataaattga

SEQ ID NO: 31140 - DNA, 284 bp, Zea Mays
ctagccgagttgtagttcggtggtttgagtagcactcctcgggtcctgggttcgactccttgcgtgagcgaatttcaggctgtggttaaaaaaatcccctcgtctgtcccatgccaaagcacaggtctaacgcccggtcccggtcgcggtcgtttcggaggttttctcgacctgcgtgagaaggtcttcttcttaatataatactcggggattgtcttacccccacgcaggtcgagtttttaagtatacacattagaaatgtgatagcttgaaaagtatagagg

SEQ ID NO: 31141 - DNA, 262 bp, Zea Mays
aaagagtaaaggatggatggatatgtttgctcgcagtctcaaactctaacacgccttgtatccgagggagcagaaggggaaggagtccgagaggttgaagaatgatgcacataagctaaatggagtcatcttcagtcatatgcatacctgcataactgaacaaaataggaataggtagtcgttcatacatgaagatgatgcagtcatctgcagacctgaagaatgatggtcataagatgtacatatacaagcaaatgcataa

SEQ ID NO: 31142 - DNA, 3075 bp, Zea Mays
gtcgtctccgttacaacgcagacactgccgccgctccgcgacagtaactctgctctctctctctctcgcatggcgtactcctcgagccgcgggacgaaaccctaatggagaaccggcgccgccgccacgcccctgcgccgtagactcccctcgccgcagtgagccccgttgcaagatttagctccgcgtcgcacagcttcttgcaggatagcgccagcgcttgccgatccggtgggaaaaaaaagtgggagcacggagcggcctcgcctcggcgggggaggcgcccgccatggggagcgacctcaaggagatgaagtacaggcggaggatcggggtggaggagcggccgcaatgcagcgacccgaggggcggcgcggactgggccgcgctgcagcaggaccccgtcgagctgctgcgcaagctggacgagctgagggaccagatcacgcgctcctgcaacgtcgtcgtcggccagccgcgggagcaccgcagggtcagccgccgtgcggtctccatgctccccgagcatctcgagccaccgcctctgccagggtaccaccgctcccgctacggtgggcggtatgggcacggcttgccgccaccaagcccatacgcaccgccacgccctgaacatggggaaaggtatgcgaggcagtctagtgggcactaccgccagtaccctcccaggcactgcgagaacggtgggatggggcctgggacctaccatcaccatgggtgtgcctgtccgcactgtctgcatgggcagaggactttcccgcaggaggagaacatcccaatggcgagatacttcgccgggcagcacgaatcataccggttggagaggtcgccttctgtttcatccgattatgatcgtgggtctgtggcgtcatcactttactctcatcggtctgtatcgaagatgagggcagagtacttcaggaagaaggcagaacatatctgccgtccagtggatggtgccgcacctttctctgtatgcagttcatgttataaactactgctgatgcctatggaaaaatgcgtagggaggaagcagaatcggtttcaatgtgggtcttgttgtcagataattagtttgaagcatcaggaagaaaatggtatcccctttgcacttgcaccatcatcatccttacatgcgcctgaaatggagcaaagcacaagtgaccagatgaggcaagattctgtccatcagcgccatgaggatttcaattttatgttcaacaattcaaatgatcattgcgatatgcaaaacaacatggatttcaccgatgataattcacttccttcgaccgcgagtaatgacaggattgagattgacaaagagtgtgggtcaactagaagcattcagtcaaaagctgagggtctctctttctctccaagtaggtctgtagacattggtagcccaaaggatatattgtgcgagagggataaagacagcaatgtggagccttcctcagatggtccacttagtccacgatctccaactttagaggacaaacttgttgacccgttgtgtgcccaggaaaaaggtaacgatgaggacgatcaaggcacggcttacagatcgaacctaacatgcaaaggagaatatgatgctaacgacgagtatgatggggacgttagtacaagaagcaaaccggagagcaatgtaaatgacaaagataccactgaaggcgaaacctcatgcagaaattacaaggaagacaactgttgcaacattgaagatagtagcaaaacatacgagcagaatagtggagaagatgacaccagtagtctagtagatggaaatgagaagtatgagtctatgaatactaaagacgatgatagcagccctggaggtgaggacacatgcaataggtatgagccaaaggttgaagacgatgaaaattgtgttcttggagctgagagcattagcaacaattgtgatgaaaataataaagatgccataaaaactggaagcataagtgagagacatgaagagctgataattgaagaagaaaatgagaaattgcagcaggcatttattgaagatgccaattcccaagcagggagtggttcatcaattaatgagcggacgaattctgggttttctcgcggttcatcagaggctgggttagatgaagatcagtcctcaaccgaaggcagagaagaaagctggtcctgttgacccaggttcatattggtacgactaccgtgctggtttttggggtgtcatgggacgagaatgtatcggcattgtccctccatttattagagaatttaattatccgatggccagaaattgtgccggtggggattctggtgtttttgtcaatggcagagaactgcatcaaagagatttagatctacttgtaggaagaggactaccacggacatctggaaaatcatactctcttgagatgtcaggaaatgtaattgatgaagacactggaaaaaaactacgcagtcttggaaaacttgctcctacgattgagaagttgaagcgtggttttggcatgcacgtccctgaagagtttagatagctggttctagtacaggatcttggttttgctaataatacactcttcaaagctgacaatggggtggcaaacgtgtggcttctgcgggacggtggtatcaaatctcagatttcttggactggagctctggaagcagcagtacttaagatccttggtgtgcggcgaaggttgtctggcactcaagaaaccaagataatctggtctaatgacttgactaccaatagtacccctcctgctaatttcaattgcttcaatggaagcgacgtgtgctgctagtgactctagattatcaggcagttcttaacttcactgctctgcctgtacgtgctattccttgaatgtgttatcattatcggtacattgccccatcacaggcatagaagtgttgtcagatgtaccatgagcaattgtcggcttgtaatatattggtagagatatgcttcccctaatatttatatgtatatatatgtgatcttgattcttgaatctcttgccaatacgattgattcctgaaccctgttaataagagtcttatttt

SEQ ID NO: 31143 - DNA, 1258 bp, Zea Mays
ctcgcatgagacgtaacaatcaaattcctataaggttttattttgctgaacttaacatatataagacaaaataattctcaactatttagtaaaagaaaagaaaatcaaggaaaagagagtttaacaccctgaatttggtggatatcagagaagaaattttattcccctaaattcagggtgttacacgagttcattgaaaccagtcatctgtcccatgaattcatacaagccgcttgcctgaaatttagcaagcaagccctccatgactgtctgaccctccatataatcccagtcaatcacctgatgcttatgaaacttggtgtcatgagagttccatagaaaacatcaaactgcagctgagtatgaaaatattgaatatttatgtcacatgaaagagaaaactggtcaacagtccttctagaggaatattcagccatagaaaacctcatcttagatgagtgtgtggcgcatcttcagcatccaaagagacactgcccctagcggatgattgggactcggaatcggtgacagggttataatctgtgtcatccgcacgacaacgcttggacaaaaaaatgccctgctaacttctttttcagaccaacgaaaccacagtaataaaatataaaataatcccaacaatcagaagacaataacttgaaaacatgtgcaagatggataagctgatctgctagaatgcgaacagtccacgctagagggacgaacggtccatgcacccacgaccggatggtgcgcgccacctaggaggaaggtccgcgaccgtccaggacgacttttgaaacccaagacgcccaattcatggagtcacaaaattgacaaaggtatccatcaaaacccattcaaatttttgcaccatattctcagtaagtaacacaagcaattccaccaatcaaatccataatttcactgcccaatttcagatcagagaagaaatcctagaaattcccaaacttgagtaaattgaataaattttgtgggattttgaaataccgagatgaagacatgtcgattgaatctcaggagatctcccgaacagtccatgcgcaatttcgatccaccatccgctcaaaaacgacaagattcacttttagcttgtggagtatgagagaggaaggacaagctggagagaatgacccccttttctgcctctgcctgagatagttgcctgtcgcggacggtccatgagggggctccggacggtccacgtcctggaaactttggacaatctgtcctgtcg

SEQ ID NO: 31144 - DNA, 3675 bp, Zea Mays
gggcaacttgagaaatccaactcgtatccttctctcttccacggttccacttccaccccggactacgctgccttctctcccgcgagggcgaaatacacgacacttcgatttcacaaaaccctaggccccaaccacctccctaacatggcgacgctggcgtcggccgtctccgacgtgggcgtcgaagaaccctctccagcaaaggcagctgacccgaaggaaccagcggccgccgtggaggaaccagcggccgccgcggcggaattggcaggggcatccattccatctcccgtcgcggccgcagacgctggagatgcctcttccggtcccgcgcttgccaccactcctcccgcttcacctgccacgtccgcagcgcctcctcccgtttctcccgccccgctagtttctcctgccccgcccgcagagccagggccgccgcggtcgcaatttgcaggctccctatcctacatagcgccagggacaccgtctccgtcggcagctttttcttataacgtactgccgagagcgccaccagcgccccaagttggcggcgctgcagcttcactacagccatgctcttctccggctcttatggttgctcctatacccgcgtcagctcttcagccaccagccccagggcaatattttgggaacagaccttctttctcatataacgtagtttcgcatgctaatgctagattgcctactggtcagcagtttcaaccggtcactggagcaaatcttgctggtccaatttctagatttgttccaccaggttccttgcagcctcccacccctgggcacataactcgccctagtacagcgttcccaggatctatggcaccaaatcctcctggatctattcagttgccgttttcagtgccaagaccatccaatattccttttggtgctattgcacaacagggcagctcagacattaataatttgaaatcggactccccaagggcaccagaggttacaccccaagccatgcagttatctactggcatgccatcaaaatctccttcaacaatcgcaagtgcttctggaagtccttcaatccccatccagacactaacaaattcatcggtgccacctcgccctgaggtatttggagccactagaccatctgtacctgcacaaccttctgcaactgtctctaatccaacaggtttccttgggaggcctatagttccacctgctgctcctttgccccaaacaccaccaccaattgcaacccaaggtggcacaccacagaattctcaacgaccgttttacccgtcctatccttcaggacctggtattgtcccacctcaacctttatggccacaccctcatcctccacaacctactggatttcagcagcctcccttccagtactatccagctggtcctgtaggctctcttggcaggccaataactggggcttctgctgcaactatggcctttgccaatgtgcaaccacctggcgtgtcaactggtggggataggaaagtacaagcatcaacaaatgcaggatctgaacagtccactcatgctgcagctgagccagattctacaggacatggaggtcaagtcactgagcagctggaggacaatagaaatactggagttcaggattcagatgcatggtctgctcacaaaactgaaactggtgttgtatattattacaatgctttgacaggagagtcgacttaccagaaaccaaccggttataagggggagcttgagaaggttgcaacagaaccagttccagtttcttgggataaattggctggtactaactggagcatagtaactacaagtgatggaaagaaatattattatgataacaaacaaaaggttagcagctggcaacttccgccagaggtgtgtgagatcctcaagaatgcggaatctggttccttaaaagaaggttcaacttcactgcaggatgctgcaactatagagaataagggagtaataagcattgatgcaagtactcctgccatacagacaggtggccgtgattcgttgccacttcggcaaacagttgcccctgcatcgccatctccattggatttaataaagaagaaattgcaggatgctggtgcttccagtgcgccttcagctctggctacttcatctgctacctctgaattgaatggatccaaaccagctgatgctgcacttaaggggcaactagtggcgaataatggtgagaaattaaaagataacaatggtgatgtgaatatctcagattcttcttcagattcagatgatgaggaacatggaccaagtaaagaggactgcattcgtcagtttaaggtgatgctaaaggaacgaggagttgcaccattttcgaagtgggagaaggaacttccaaaaatagtttttgacccacgctttaaggctattcctagtcactcaacaaggcgggctatatttgaccactatgttcgcacacgtgctgaagaggagcggaaagagaaaagagctgccctgaaggctgcagtagaggcgtataaagaattacttgaagaagcatccgaggacatcaaccagaaaacagactaccaagaattcaaaagaaaatggggtgctgatacaaggtttgaagccttggatcgaaaggaaagggagattctttttagtgagaaagtcaaggctgttcaagaaaaagtccaatcaatgcgcaaagctgtcatagctaatttcaaatcaatgcttcgagaaagtaaagatataacttcaactagccgatgggcaaaagttaaagaaaatttccgtagtgatccaaggtacaaagccatgaagcatgaagaaagggagactatatttaatgaatacatagtggaactaaaatctgctgaacaggaagcagagcaagctgccaaggccaaagtggatgagcaagcatcgtggactgaatccaaaccaaaacttgaaaaagatccacaaggtcgtgctcgaaatcctgacttaggccaaggtgatgcagaaaagttgtttcgtgaccatgtcaaggacctatatgagcggtgtgtacgtgatttccgggcacttctatctgaggttatcactccagaggtagcagcacggacaacagctgaggggaagacggcaatcaactcctggagtgaggcaaaaggtcatctaagatctgatctaaggtacaataagctaccgagtaaagacaaagagtctatttggcggcgctatgctgatgacttgacgaggaaactcagacaatcagacacgaaggagaaggacaaatcggatacagatgggaaacaacctaggtcctctgatccacctaggcggaggtagcttgtagtaacagtcacttgtacttcctaggtgctgctcctatatttcttactgttgatagttaagggtctgctcgcactcgtctgcaacatttgaatagtcactggctcactgccacttttgatactgagagtttctgtgttgtagggtgttttccttgcaaatgtttttcccgttctggatcagatgatatatttttgcagtatgagtctgacattgcagtaccgtgccaagttgcgtctcccatgctctcaggtctcagccttccatctttcaaacttcaagcccatttataggatctgtttcaccgttagaattctggcgacttcggctccagacctccagctcccagacagaggatagaga

SEQ ID NO: 31145 - DNA, 5310 bp, Zea Mays
cttcctcccgtggcgccaaaaatttcatttcattttccccaaacccatcccccaattcccccccaaaaccttcccagtgtgtcttctcgacgaaggaagccatctcgtctctctccgctccggcgattgatcggcggcgccgatggtgttcctgcagcgcagccgccccgtcaacccccgcaagcgcccggcaccgccgcccgagctcgagcccgagcccgagccccccaggcccggcccggacgcttcatccgccgtcgacgcggcggcggcgctgctcgcggacgcgggctgcacgctcctcgtcccgccgcaccagccgccgtccctcccctcgccgcactccttcgctgcccgcctctcccgcaagctctccgccggcggggacgcctcctcgccctcggcccccgcccggcgcctcctcgagggcctcgccgccttcgcggcctcctcccccgcgcggctccgccagctgctcctcccgacggcgccgcacgagccgagccttgcccgcgcgctcctctccgtccccgcgctccagccgggcctgctcgcgctgctcctcgagaagctgcccgagcacttcggcggcgacggcgcgctcgacggatcgccgctgcaggacgacgtggggaggctcatcgtgtcgcagttccgctggctcgatttcctcgccgacgccgacgccttcgtcgacaagctcgtggaggtgctctccgtggccccgcaccgcctgaagaaggagatcatcggctcgctcccggagatcgttggcgacaagagccacgccgccgtggtcgccgcgctcgagaagctcctgcaggaggactccgaaatcgttgtcgccgtgctcgatgtgctgtcggatcttaacctcaacgaggagctgcaggagcaggcagtgactgttgcgatatcatgcatccggacaattgctccagaccagacgcctcatctgctcaggttcttgctgttgtcggctacaccagtcaatgctgggaggattatatcgcagatacgtgagcagctcaagtttgttggtgttgtcgatccacgggctgcacggagtaagaagctcaaagggaaggcatcagctaatagcactgatggggcaatacttgatacactgagatcaggcctacggtttaagaatatgctttgtgaggctttcctgaaggagctgaagtcagttgaccacccgagggatcacaaagtgattgatgtttggctcatcatgcttatctatgccaatggtggtgctctagagaaggctgcaaagaaaatactgaagtccaagatcttacatgagtgcataagagagacactgtttgatcaatgtattcatgggaacactgaactggtaaaggaacatttcatgtcatacctctcagttagcgattacttgttggcttgcaaggaagagaaagctagagagtttgcggcttatttgttcacagcactatttgaagagttcactgatacatactccaggcaagagcttgtgggttcattggtcactcatataggatctggggttagttacgaagtttcatctgctctggatatcatgatttctttaacatccaacaattcggaagaactgattcctatatcttcacacataactggaatattggattacttggagagttttggcgaagataatcttcggaaggtttatgatatcttctgtcgtttggcactggctgctggcttcaatactggttcaggtggctcttcagttgctaacgaggttctaatggtggtgaggaagcaggttagtaatccagacatgaagtatagacggatgggaataattggggttttaaggatagtttctactatcgcttccactgatgtcaatgctgctgtgaactgttcatcatctcagcaaccaaattgtgaggaggccctagaattgctgaagatgtctgtcaactcatgcaaatttgtgacattactcttgatttttctatatgatgaattagctgctttgctggatagcaaagttatccactcttcaattcatgactgggtaggagagcatgttgcagagttatttgagacaccttttcttgccgatcttgaaaatggtgaactaccagagaaatatctatgtgatggcatagaaggagaattatggatgaagttggatggaaatatctctccagtatgtgtaaatattatgcgtctagcccccacttcgccccaaaaatcccaatcctgcttgcagatccttatgtcccaattttcacttttaacaacaattgaacgtttaggaaatgaaggctcacttggtggaatagatgcactacttggctgtcctttgcaccttccctctaccaagcacttggatggagctaactggggaaacctgtcaggattgcagaaaaaaacagtgtgctattccctatactatgcaataaactggatcagggagttgctcaatgctttcggcacacaggttgaaagtagggttgataatgtttcacagaaagcaaggaacgagacagcagtaaaacttctgaagcgtctaagaaatctgatattacttgaaggcttgctgaatgcatttctcaaagattatccattatctttacctgagttgcgatatcttggggattgctctggatcagcaagcaccagcaaattcaacattccaaagaacatgggagaggagagcataaatggtgcttccagcaaaagacagaagggttgcaagggcaaagtctcagaaaaagtgaatcctgatgataaactcaagcaacctacaatactggatgctttcaaaagagcaggagtaacagtcagtcaagcaacaaataaagcttcttcacaaccatcatcaagtggaatgatgtcaaaggatatcgaacaagatgctactgatcctggtgaacttgggcttatagatttaatggcagcaccagttaaactagatatgcaaagatacaaattcagaactatccgtgcaacgtgcttgtctttgttgaactactcagagtgtcaaggttcatcttcttaccttcaaactgagttaccaacatatctatatcttctccgtgatctgcataacaaattagataatctgaatccttcaatcaagccttttcttagtacttctaaagcaaaatatactcctactcattgccataagagtacacaagattttcttgacaaaatccagccactattcttagttttaaggaagcatctggatggagcagtttcaatgatcaaagatgagagctgttcagatgactggagttcacattcatcttctgctggcaacccagacataccatatgtggttgtctccaagtcatcaattgtgactgctgtatgcaaggagattcttggctgctacaggaagttacttggcattcctgatctgttgaatcaaccaaacatgtcaattctgaagcaacttttgcagactttacagccaactgaaaattttgatgatgttctttccgagttccaaccatctcttgctccttgcaatgttgattacctgtattgtggagcatgtaaaatattggaggatattatggattcagtgtcctcattttcataccttctgtcttctaatgtgttaattactatacaatcaattgtaaattctgttgttgtgttgttggacaaatctggggaaccaaatgggaaaaatatacacatgggatgctccaaagcaatcattccctttctgcgaaagcgtcttggatactcagctcataagctgctcagtgctgatttccctagcgaagatgctggaaaaggatggcagagtaaaggtgatcttatacagaagatattgcaaatataccttaggaatagtgactctacttcagatctacttgctgagataggtcgtgaattgcctaaggaaccttcgctcaaaacaaaagataaccaagatgtatcgtatggttttccaacattgtgttcctccactattacctcttggtaccgtgtgcttcacgaggagaacacagggagtttaaacaagacgatcaaacaagcactgaaggctagaggatcagttgatactattcttcaagagattcagaaatcagtggatgcatttgtctctctaataggaatgtgcaagtcccacgaaaaggtttctatgcatgcaatggcagttaaacatggggggaaatttattgacacatttctgaaagccttcaactttctagagagacatttcgagcaacataatgacaccatagttaaaatgctaaaacaactccagaaaggaacaagaataatccaatccatatgttcagatgctaagggtaacaagcggacaatgatcacaagcaaagtacctcctgcaaagagatccatggagcggttcttgttccaggtcaaggcgctgctacacagctgctccgccgagaaggaatttcagatgggcaatttgaagcacaaggacttgcaaggccatgtggtgagctctcaggcgtatgggaacgtggatgaggaagatgaggagcagacggaggtcgactccgaccttccagctgatgagcacgataatggcaatgccatggaggaggatgctgtggaaggtagcaacgagacgccgatggaggaggaagaggaatagtggcataggtaccaatctgtacatctctttctctctaagccggccaaaaatctgtcccaaaaattaacagttttgtgtgtgcatttagtgtagaaaaaaagataggatccccaccagaatctaggttgcaacgtcacttgtaaatatggaagtctgaataagtagtttatatattgctagcagtggtcgtttcataaccaaaacaccattaatattaatagcaaactcataaacacaaaatgacatagaaagaagcaatattacaacgcgaggggaaaagggtggtccgcctctggctcgctctgggagatgacgagattcagatggcctttgcgggtggcgcggtggaggcggagaggtcggcgaggagcggctcgttggcggaggcgccgccggcgttggtgggggagtccgggtcgtggttggggtcgagcgcgcggtccatggcgcgtcggccggtctcgaggcagggcttgcatgccatctcgatggtgatccagccgagcaccaccgcggcgatcgcgatcaccgccgtcaccaccgcccccatcgcgatgaagtattcctctcgtcctctgcgcggacggcagatctggtggtgtggtggatgcagtggagtgtccacgggacgggtgctgggtgcggaaactgcgaaccagttacagagggacaaaggggccgttgctgtgggtcccggc

SEQ ID NO: 31146 - DNA, 323 bp, Zea Mays
tgactgagcaagctataaaaaatagctataaaaaagaggaagagcgtggcggtgaggcggcgacgacggggagggaggaggaggcgctgtcggaggcctcgtcgatcggcgcggcgtcgtccgacagctcctccatcggcgagaactccgcgtccgacaaggagggcagcgacgggaggaggaggtggtggaaggcaaggcgcaaggcctcggcatgatgccctgctccagtccttggacgatgccctgcccatcaaggtacgcagccatggtttttcttgaggcagagatgtcatggaatgtgttgatctcacctagccagc

SEQ ID NO: 31147 - DNA, 281 bp, Zea Mays
cggcgacatcctcctcgccgtcgtccatggcgcccctgcgaacctccctgtccatggccacaaatccttgcgcccttctctgcgcagcgcccctgctgtgtttcttccagcgagctctctgctctcggctgctggcagccagggcgcgacgcctctgctcctctctaccccacaaaacagccagcacgcaggagcttcttctccatggacgcccagaattctagcagcgagcccccttcctcgctgttcgtcgtggtgcccgccggctgttcggcaaaatg

SEQ ID NO: 31148 - DNA, 514 bp, Zea Mays
gttggccacttgatgggacccgctagacaatttttcctctctcaatctcgcacatggagtaaacatcgggttgttgtaacagcccggaaatctcgcctatcaaacaccctggagctcggactctgcgggcataaaccacatccgcgcatgccgccaccgcctgtgtatatatggtcgcggactcgtgctccctcaatcgtccctatcgacgaccgtacaccgacgtagaaaccgcactgcacaaggtgtgtgccgccgccgtcggccccctgtttttggcaccacgtggagacttagtgctgacagggtggttcgtcgcggtctcgggattctgcgtgggggatccttggacgaaatagaccaccgagctcaccggaattcctcgccgtcgccataaactcgtgctgcgctgtggccaggcgttcctgtgacccaatagctggtatggagctttccttcgagtccgtcatcatctccactttgcgtagctttcgtttaatcggagttcgggctt

SEQ ID NO: 31149 - DNA, 1480 bp, Zea Mays
gtaaaaatgactatatgctatcaaagggttgttatcattcagcctggaggcctgacagagcagtaaaataaccgcagttaccagctgacctccctcaattcctcggccatccgtacgtctccgccttcggggctttcttcttggtctcgttccttggctggacaaaacacctgtggcagcggccgcgctgcttgcctcgccttgctctcggttcgtggggcatggcggcttcgccggcttgtgctccggggctcatctccggccccaccctccctcccctgcccgttgccttccgctgctactgggcccaaaagccctcctccgcgtcgacctcctccaggcgcccgtgccgcaggcggttcgttcccgttgcagctgcctccacccgcacctcctctgcggctgctcggggcctcgacgccgacgacttccgccacccgctggacaagcagaacactctgctgctgagagcaattcccgggctcaacgacgtgggcaaagctttgctaggacccgtctcggagcaagttatggtactccagaacattggaacatcagttctcgtctccccgaaccagcttccagatctccaccaactgctggttgaggctgcgaagctcttgaacaccgaagctcctgacttgtacataaggcagaatcctgttccaaatgcctacaccttagcaatcaacggcaaaaaaccattcattgtcgttcacacaagccttgtggagctgcttactccaagggaattgcaggctgttttggctcatgagctgggtcacctcaagtgcgatcatggtgtttggctcacttttgccaatatactcacaatgggagcatacactgtccctggttttggcatggttgctggcttcctggaagagcagctatacagatggctacgagctgcagagctgacttgtgacagggcagctcttcttgtggtgcaagatccgaaggtagtcatctctgttctgatgaaattggccggaggatgcccatctcttgccgacaagctaaatgtggatgccttcctggagcaagctcgttcgtacgacaaggctgcatcgaacccagttgggtggtacatccggaatgcacaaaccagagagctttcacaccctttgcctgtgatgcgagccagagagatcgatgagtggtcaagaagccaggagtacaagaccgtaatgcaaaaaatgtttcagatggggctgaacagagtatagttagtggcgacacatacgaagaggactgtagagtctgtagcttgtgtatggaagggaatgtctgtatatggagaaggctggtgtttctggaaaaaaaacagatacaaacatagacatattgtatatatttgcagttgaatttagtctccttgtatatgatatatttttttcttttttgttactgtgtaatactgtaactagaatgaataaaagtttgtttgagtttgccggataactggaaagatcggcat

SEQ ID NO: 31150 - DNA, 1170 bp, Zea Mays
aaccccgcgctccacttacgtgactcgcgcgcgacacgcgagcaggaggttgagacgaagacccgccgccaccggggatggcccaagcgccgccgcgacctagggagcgaggatgaggagctcgaggaggtgcgccgcatgcagaggattcctgcaaggaggagaacatggaggtggtgcccgtagtagtaggggaaccgatcaagagcactggcgaggggaagaaatagaagaagcactatgcttccttggagtaccacgtcaacagcttggagctgcttgcattgaccacagaggcacaccggagcatccggcgaggacctgcacgcttgaaaccgacgacgaggccatgctggggaattgcatattgtgtcaagggtggtccagaaaaagagctaaaagcaatgcagtacttggagagaagagagtgtgagtatgaccagaagatatccattgatttctacaaggaaggagatcccttgaaaccagctgtgatgggcgtcttagtgttcgtttccactccagatccaattggcaacaagtactatcttggccctgctcctttgcagaatatggcaaggccacgaagatgattcgatcatagagcttgcaaacaaggtgaggaaggtgctcaacagaacaaaggagaccaaaatcactgggcgcgtgaactcttctactacctcaagggtaagcaggtggactatggcgaggagcacagcaaggcttgcggccacaacaggtttgggagaatatatcacacaggtcactatcctgtttgttatgagcacaacccagtgcattttgtggggcactctgctggcgcgcaggttgtgagggtgctgcatcagatgcttgccgacaagagggatggttcatgtgagctggagtacaggattagagcacccaaattaggaattagtcatgcctatcatcccgcttgagacgaaggatgagcttgggctgcttcatccagcattcaaggctgtgaagacttccacatgataattagaaatctggtgacaacagaagtttgggttggggtcatgggatggatatctttgttgtaatgtgaggtgttaggagaattatgttatgcttatttattggcataagttatgtcttacacgtacaaatgagttaatggatgaactcaagttattggttcaa

SEQ ID NO: 31151 - DNA, 2193 bp, Zea Mays
cctagctctccctccccctccgcgtcctacagccatcgtcgctctgccttccgcccccgccgtcgccgcagacgcagccggccacccaccactcgcgcctcccccaccgcgtcgcgtgtgggccacagctacagctgcctcctcgagcaacccacactcctttcttcccctgcctgtcgtctctcttccaccttccaccacaagcgccgtcgcagccggtgcctgctccttcccgatccccgaggcaaagctgcgactccgcaactgccgccatggcgttcgagaagatcaaggtctccaacccaatcatcgagatggacgctgataccttgtgccattgtcctattataggcgatgagatgaccagggtattctggcagtctatcaaggacaagcttatcttcccatttctggacctggacatcaagtactatgatttggggatactgcacggtgaagcaactgatgacaaggtcacagtggaggctgcagaggctactctcaagtacaatgtggctattaagtgtgcgaccattactccaggtgaaactagaagaacgtatgaagctagacttgttgcaatttatagacatgtaagagaggatggagttgagggacaacctatttctgtttcaacagaacaatttgcaccttgttgataacaataattgatctgggcctcttccaccagaattagtagatacacgtagtcttcttgctatcttgacttcaggctgataataacaacttcagtggaagctccatcctgctgaatacaacaacatacaaacacttctaaagctgtgggtccacagggcgggtgtcgctcacgtgctccatcaagaacatcgagtgaggtggtgtgctgctgctctaaagaagggaggagaggaagtagcgacaatgtcgccaagaccacctggcgcgatgtctcctaccagatcaccaagatcaacatgtacaaggtgatccagtccgagccctctccctgcatgcttccattgattttttatttcattccaatcgatttgccgtgatatatgcaatgcaggatggtcggcatgtacaagatatgcttaagcatcagaggctccataaagcagctctgctagaattaactgattcactgtcaaggtcaaacatcactatgatattgctgagatggtccaatcagtgacaatgctggtggtattgttgagatggcaggaatgagccacaaaatctgagagaacttatgctcttggtgctgctgacaacacaactgttgctattagaaagggatttgccattggttcaggtgctcttgtgtccctggtgctgtttggtgccttcgttagcagagctggagtgaaggttgtcgatgttctctcctgaaggttttcattggtttgattgttggagacatgtttttgtactggttctctgtcatgaccatgaagagtgttggaagtgtcgccctaaagatggtggaggaggttcgcaggcagttcaacaccattcttgggttgatggagtgaacaagcaagcctgactatgcaacctatgtgaagatttgcactgatgcttcttccatcaaggagatgattccttggggtgctctggtcatgctgactccctcattgatggaacctctttggcatcgagactctctctggcgtttttgctggtgccctggtttttggagtgcagaacaaggccatctcagataaaagtagatgtagctttcataggacttaattccagcaaagcaaaggttggcagtgcaccaaacaatagcgtttatacttcattcttatggattggagaagcctatgcaacatgtcaagccagatgacatgcagatgagaaggttctgcatcaatagaaaccagagaaaaatctgtatgtgtctgtatgacatctcagataaagcctgatgatcagcatgatgaaaggtggggagttctatagctggtttaagctggagctagcttctgaagtccggtcaggtgtctgtatgtgttgcccctttttatttcatttcatgagaaaagattgttatttgttccttgaactgtacttggtcgtacttgtgaataaatattttagcatggttgttcgacttctcataatgtttattcgacatcagttcatgatattagtgttacgtgatattttatcatatgaattttgaatatcatagtgatgtttatc

SEQ ID NO: 31152 - DNA, 3190 bp, Zea Mays
tctctctctctctctctctctctccgtgccccccaggccctcctcccaggctcccagcccccctcccgtccctctctctgtctctctccacgcaccatggcgatctccgagctcgggtgagctgacaagaatgcggccgatttgagcgaggacgggaggggcgcgatggatgcgggttcgggcggattcgcgaggaggctctagaggaggttaggtttcggccccggccccggcccggctgtgggagatgagctcctcgtccgcggccagcatcgggcagcagccgccggaggaagagaagaagtgcctcaactcggagctgtggcacgcgtgcgccggcccgctcgtctgcctccccaccgtcgccacgcgcgtcgtctacttcccgcagggccacagcgagcaggtggcggcgtcgacgaacaaggaggtggacgggcacatccccaactaccccaacctgccgccgcagctgatctgccagctgcacgatgtcacaatgcatgcggatgtggagacggatgaagtgtacgcgcagatgacgctgcagccgctcaacccacaagagcagaacgacccgtacctgcctgcggagatgggaatcatgagcaagcagccgacgaactacttctgcaagacgctgactgcgagcgacaccagcacgcacggcgggttctctgtgccccgtcgcgcggccgagcgtgtcttccccccactggatttcacacagcagcctccagcacaggagcttattgcacgggatattcatgatgtcgagtggaagttcaggcatatcttccgagcccaaaagacacctgctgactactggctggagtgtgtttgtcagtgctaagagacttgttgctggagattctgtgctattcatatggaatgagaaaaaccagcttctgcttggaatcagacgcgccagccgtccacagactgtgatgccctcttctgttctttcgagtgacagcatgcacattgggctccttgcagcagcagctcatgctgctgcaacaaacagccgtttcacaattttctttaatcctagggcaagtccatcagaatttgttatacccctttcgaaatacatcaaggcagtttttcacacgcggatatcagttgggatgcgattcaggatgttgtttgagacagaggaatctagtgtccgcaggtacatggggacaataactgaagtgagtgatgctgacccagtgcgttggcctagttcctattggagatcagtgaaggttggctgggatgaatcaacagcaggagaaaggccacctagagtttctctgtgggaaattgagccactgacaacctttcctatgtatccatccctcttcccactgcgagttaagcatccatggtattcaggagttgctgctcttcatgatgacagcaatgctttgatgtggctgagaggagttgctggtgaagggggctttcagtctttaaacttccagtcacctggtgtaggttcctggggacaacagagactccatccatccttacttagcaatgaccatgatcagtatcaagcagtggttgctgccgcagctgcttcccagtcggatggttatctgaagcagcaattcctacaccttcaacaacctatgcagtccccacaggaacagtgcaatctcaatccgctgttgcagcagcaaatactacagcaagggagccaacagcagatggttagtcctgatgctcaaaatatccagtccgtgctcaacccaaatgctattcagcagcagctccaacaattccagcagatgcagcatgctcataatgaccagaagcagaagattcaaccagatcagccgtaccaagttcctagcagtgcggttctctcgagtccaacatcattaccaagccatttgcgggaaaaatttggcttttctgatcctaatgtcaactcttccagcttcatcagctctagcagcaacgagaatatgctggaatcaaacttccttcagggaagctcaaaatctgtggatttgtctagattcaaccaacctgtagttagcgagcagcagcagcaacaggcatggaagcaaaagtttatttgctcacaatcgatgtcttttgggggctcggtttcacttaactcacccactaccaaagatggtcctgttgacaacaaaattggtcgtgatgtgcagaaccagaccctttttagccctcaagttgactcttcctccctactgtacaatatggtacctaatttgacctcaaatgttgcggataataatatatcaacgattccctctggatcaacatatctgcaaagtccaatgtatggttgtctggatgactcttctggtttattgcaaaatacaggagagaatgatccgacaactagaacattcgttaaggtttacaagtcaggatcggtggggagatccttggacatcacccggttctctaattatgctgaacttcgagaggaactgggtcagatgttcggcattaagggtcagttggatgaccctgatagatcaggctggcagcttgtatttgtcgacagggagaacgatgtgcttctccttggagacgacccgtgggagtcatttgtgaatagtgtatggtacatcaaaatactttcacctgaggatgtgcataagatgggaaagccaggaaacgatccacgctacctatcttaaattgatacccagagctctttcgggctcccgtgacgattctgtggcacactgtagcactgtccatggcggtccggtgtgctgtgctcccatgttcgctggtgtcacctctagcatgtacaccgtgcgcgtcttcagaactcccccgttacttgtatccggtgcaggccaccgctctggactgatatcttgtaggttccacttaggaatcagtatcagcgactctatcctagttggtttgtagctcgcacggcactcgttcttgtgtcgcatcgaaatcttcaggctaaatgcttagttgaaactgttcccgtgattcttaagctatctatgtatttgaggattccccggcatgctttcgacgatgaactgcaataatctgaatgcaggaggattgtttgaatgctatcttgtgtctgccgggtgctgggtgcaaggttgattttgacgcatctagctttagcttatgacgtttcaggtgttctctgtctgaaactatttttatgcatggtgagttgatg

SEQ ID NO: 31153 - DNA, 2298 bp, Zea Mays
tctacaatgagttatctagagctacagcatagggtactggaaaaaaaaatctcatcgactctctcctgagtcctgactcctgacatctccgatcgtcaccgtccccgtccccggcgccgtccctctcgctcttgtcctcggtgccgcacctcctacatctctgtctcaccgctttagcacggccaccacgcccgcctgcgctagatcccatctgaagccggcggccatcatacccgtgagcgctagctgggctgcatctctcacctccacagccagcaagcgagcgtgatatcgagctgttgacatctgcgggtgcatctgcggacagccttgacgaggctgccgacgatgtcgtctctcaactcgctcttcaaccgctccaccttcggcacaaaatgcaaaacatgtttaaatcttgtcatttcaagaatcaagctgctgcgcaacaggagggagttacaactaataaatatgcgcaaagaaatggttcaatatcttcagactggccaggaatcaatcgcgaggattcgagtggagcacattattcgggagcaaaatatattggctgcctatgagatcgttgagcttttctgtgaatttgttctggcaagagtccctattgttgaggtccaaaaggaatgccccttagaactgcgtgaagccattgctagtataatctttgcatcaggaaggtgttcagacttgcctgagctaatgcatctccgtaatttgtttaccaccaagtatggaaaggagtttgttgctggtgctatggaattgcgccccgacagcagtgtcaaccgcacaataattgaaaagctctcggtgaaggctccatcaggtgattcaaagctaaaagtcttgaaagctattgcccaagagtacaatattgaatgggattcatctaatactgaagcagaattcaacaagaaatatgaagatctactggtagcatttgctaactcattacttattccctgattattagacaggaatgcatatgaaaggtgtttcatgtgacatcttcaaagcaggtgtttgcattactgctttatttagtgaataaaaactatatgataataattgaagaactgcacgtttgatattctatgttgggcttaacataggccattcagtgttcagttgaaggaattcagtgtacctttacgcccatcctgagaaaccattagctcacaagacactgttttctctatctaatattcagctaggaatcttcgaccgtcctttgcatattccatatgcgatgtcacattagggttgtgtcccacatttctagtccagtttatagactatagagttctccccccttttttggacttgtggatctggtctaatcttatgtcaccacaattaggatgtcaaacaatctggtaatgtagaaggtttgttggctgtttactgtgaatcggggcctaatgattttgtaaacatgatgcagttaattaaggaatttagaagagaatgagaaccaactaactgcaagaatatatatgcctccacaagaccacaactccatcttgaactaaatgtgcagctaagtttgaaatgagagtaatctagaaatcacttcatttattatgtgctggtatgatgtatgcaggacggctcgggatcttcggtccaccagatccagacacctatcattgagggctcagtgagctcaccagttgtttctgctccaagagataagacgccagcattgaattcacctgtcattgatgccgaaaaacaccaagttcgcgaatctccgacttcaccagctggaggtgcaagagctggtgttgtcactaagggcaatgtggtaaccatgggccatcactcccccgctgaggagatgccctccaccagcccaagttcatcagacgcgctggagaaagcccgagctgctattgcagctgccacccgcgcatctgctgctgctcgcgccgcagctgaacttgcaaaagttaaaattacaaatcaatgacacctccagttcgggcaaggcgtgtcaggaagtttaatctggcaactgatcaccaggacagactgaaatgtatttcattgaataaattgttactgtatattccctttgtgagcacttggcacatcatataaggagcgtggctcctcgcctttcttcgaatgtactcaaagagaactatctggaatgcataatgttgcatttactgttcactagttagttattgtatcattacggtttttttacaatacaaaccaatctaaattgcagtggttagagacgaacactttgttcctagagatcatagttctgag

SEQ ID NO: 31154 - DNA, 1341 bp, Zea Mays
gagcctggagcctggatatgtggtcatgttcattaaatatgaaaccttgctcaggtgtctttgtttgtgttattcgtgggcttttgtctctttcttgcctggtaaggggagttcattcgattgttaaaaaaattactgttgctttttgcctgggcaagctagtgctaatcactaatcaggctgatattccgaatagttggtgcggagcatgttttcttgaatctgtacttgatcgtgtgctcatcagctcatttgctggcttctagcaaatgttgttcatttttgcagttcctttaaacacttcttgcatctggcatggttgccaaggatgaaacggaacagctcttggtgaaggaggatgatgccagacatagatgacgcattttgtcaaattgttcaatatgaagaacatggacataacctttcagttggatgactcttttgatgacacatcaataggcaccttgttagtaggatctaagaatctaaggttagatagacattgaaaaggatgaaagggggtaagacgatgggtcgtgatggtatcctaattgaggatgttgcaaggagtgtgacaacacgtgatgtacaggaagcgcgtcgacaagacataaagaatgaaatcctcaattctgagaaattgaagtctcattttgaagagaatccaacggaccttgatttgctcaaacacgataagttgctatgcaacaaggaaattcctgcatacctgcgtgatgtccctgactacctaattgatccgaaaacaaaagaagccagcaatgctgtcaagctttccagggctgctatgcatatcgacaagccccaaaggcggaaaaggcaggggtttaagggaggatcagggaaaagcagagaccctctcaagacattctctgctgagggcaaacgagggagacggaggaaagaaagggagggagaaccagatagaagaaagaagagtaagaaggcgtgaagttgatttttcaagcagtttgctatcaagctcgcccaattttgtaggctttgtttgaagcaacttgacaaagtgctgtatcggtgacactcgtaggtcgtagctaaggagtatgtttttattgcctgatggcaactcttaatttttaaagtgtactcgcttccccccttttcctgtactgttaggaagcactaatgacgtgaaatttcattcaccaaatcaggggtatttaaagctaataatgttaagtccccccaggtggaacattcacacaaaactcgcccattccccgtggacctgtcccagatgaggccgcgcacaatgttccatttcttcacctatcaattttagatttactaaaaccatattca

SEQ ID NO: 31155 - DNA, 3004 bp, Zea Mays
ctcatcagtcatcactcacctttgcacacctcgctgcttcgtcttccttcccgttcttttataaggccccggccccgggctgcgccgccgctcgcctctcctcccttcccttccccgtaccgtgtcactctcctccccggttcgtcgtgcggagggccaaagcttcgaggaagcagaaccctagcgctagcgctgttggagtagtagcctacgccctacggccgatggctgcggcggcgatcctgccggagctggggacgcaggtgctcatcccggtcgcggcggccgtgggcatcgccttctcggtgctgcagtgggtgctggtgtccaaggtgcggctcgcccccgagcgacgcgcggacggcggcggagccgtcaagagcggccccagcgactacctcatcgaggaggaggaagggctcaacgaccacaacgtcgtcgtcaagtgcgccgagatccagaacgccatctccgaaggagctacatctttccttttcactgagtacaagtatgttggattattcatgggcatctttgcaatccttatattcctcttccttgggtccgtcgagggattcagcacaaagagtcaaccttgccactatagcaaggacaagacttgcaagcctgcccttgctaatgccatcttcagtactatagcttttgtgcttggtgcggtcacctcactggtttctggttttcttggaatgaagatagcaacttatgctaatgcccggacaactttagaggccagaaagggcgtcgggaaggcatttattactgccttccgatctggtgcagttatgggtttcctgcttgctgccagcggtcttttggttctttatattgctattaatttgtttggaatttattatggcgatgactgggaaggtctttttgaggctattactggttatggccttggtggttcttctatggctctttttggccgtgttggtggtggtatttataccaaggctgctgatgttggtgccgaccttgtggggaaggtagaaagaaacattcctgaggacgatccaagaaatccagctgtcattgctgacaatgttggtgataatgttggagatattgctggaatgggatcagatctctttggctcatatgctgaatcgtcatgtgctgctcttgttgtggcctcgatctcgtcttttggaatcaaccatcaatttactccaatggtgtatccccttcttgtcagctctgttggtattatagcatgtctcataacaacgctgtttgcaactgatttcttcgagataaaggctgcaattgttcttgtgtgtggcggttggtctctgggctggcttagtcattggttttattactgagtactacacaagcaatgcctacagccctgtacaagttgttgctgattcctgcagaactggagctgccactaatgtcatttttgggcttgctctgggttacaaatcagtcattatcccaatttttgctattgcgtttagtatcttccttagcttcagccttgctgccatgtatggtgttgctgtggctgctcttggaatgctgagtaccattgccacaggccttgctattgatgcctatggccctatcagtgataatgctggaggcatagctgaaatggctgggatgagccataggattcgtgagagaactgatgctctagatgctgcaggaaacaccactgctgcaattggaaagggttttgctattggctctgcagccttggtatcccttgcactcttcggtgcctttgtaagccgggctgctatctccactgttgatgttctgactcctaaagtgttcattgggcttattgttggtgctatgctcccatactggttctcggcaatgaccatgaaaagtgtaggcagtgctgcactcaagatggtggaggaagtccgccggcagttcaacaccatccctgggctcatggagggcaccacaaagcctgactacgcaacttgtgtcaagatctcaacggatgcatccatcaaggagatgatccccccaggtgctcttgttatgctgacaccactgatcgttgggattttgtttggggttgagaccctcgctggggtccttgctggtgcccttgtctctggtgttcagattgccatttctgcatccaacactggtggtgcctgggacaacgccaagaagtacattgaggctggagcttcagagcatgccaggacccttggcccaaaaggttctgaccctcacaaggcggctgtcattggtgacaccattggagatcctctcaaggacacgtctggcccctccctcaacattctcatcaagcttatggcggttgaatcccttgtcttcgcccccttcttcgccgcccatggtggcattatcttcaaatggctctaaagatagcgacaacgttagttagtcgcaagagaaaggccgcagttctgcggctgcgaggggaatagagcagtatgtcagctatacaacatctatggcatgtgctttgctcctccacttgattatagcccccgttgtgtgtttcggtttctgttttcctggagtttttggttccaggcttccgaccatgttttgatcccataaattctcctccagccttcgagcaactgagtccatcttcgtaagtcatcagccctagccagacattgaagcatcggaaaactttaagggcttgttcgttttggtgataatccacatgtattgggtgggattgagccggtttaaatccataacaagtcaaaatacatctcaatctcacccaatacacttcaatacacatgtaatatcaataaccgaacaagccctaatagtttttagagatatggtgatgattatgatgatgattaatctcagtttttttcctttgaaagtaattagcatggtctttgcttgagattttgttctcttttcaaaacgatatgcatgcgaaatggaggtgatgtttttttttgaacggttgtttcaaagcaatatgaaaacataaaggtagtgatgttcttcaaaa

SEQ ID NO: 31156 - DNA, 1843 bp, Zea Mays
caccacaacaccgaagcagccgagaaccggaccccgcaaggccgcaacagcaagggcagcactgccgaaaccgcaggccgcagcactcgagagcgcagccaggcggcggcgctccgcctccgactccacaccaggccgctgcgtccatggacccctccccgcagtcgacgccgcccaccggagacgacccggcagcggcggcggatcccgacctaccgaggctcacggtgacgtaggtggagcagatgaaggtggaggccagggttggcgacatctaccgctccctcttcggggccgcgcccaacacgaaatccatcatgctagagctgtggcgtgatcagcatatcgagtatctgacgcctgggctgaggcatatgggaccagcctttcatgttctagatgccaatcgcccttggctatgctactggatggttcatccacttgctttgctggatgaagcacttgatgatgatcttgagaatgatatcatagacttcttagctcgatgtcaggataaagatggtggatatagtggtggacctggacagttgcctcacctagctacgacttatgctgctgtaaatacacttgtgacaatagggagcgaaagagcattgtcatcaatcaataggggcaacctgtacaattttatgctgcagatgaaagatgtatcaggtgctttcagaatgcatgatggtggcgaaattgatgtccgtgcttcctacaccgctatatcggttgccagccttgtgaatattcttgattttaaactggcaaaaggtgtaggcgactacatagcaagatgtcaaacttatgaaggtggtattgctggggagccttatgctgaagcacatggtatacattctgtggattggctgctttgatcctgcttaatgaggcagagaaagttgacttgcctagtttgattggctgggtggcttttcgtcaaggagtggaatgcggatttcaaggacgaactaataaattggttgatggttgctactccttttggcagggagctgccattgctttcacacaaaagttaattacgattgttgataagcaattgaagtcctcgtattcctgcaaaaggccatcaggagaggatgcctgcagcaccagttcatatgggtgcaccgcgaaaaagtcttcctctgctgtggactatgcgaagtttggatttgattttatacaacagagcaaccaaattggcccactcttccataacattgccctgcaacaatacatcctactttgttctcaggtactagagggaggcttgagggataagcctggaaagaacagagatcactatcattcatgctactgcctcagtggcctcgcagttagccagtacagtgccatgactgatactggttcgtgcccattacctcagcatgtgcttggaccgtactctaatttgctggagccaatccatccactctacaatgttgtcctagataagtaccatacagcctatgagttcttctcagaagagtgatctaatgttagaacctaagaacaattggctaaggttgtgtacgattgtgttatttgcacgaatgatggtaacttagtcgtgttataccagggtatttgtatgtttggtcaggtggattgcctggataaatctctctgttgtaatggtcgtgtcccgaattatgtttgtaatggtcgtgtcccgaattatgttactggtgttcattattagttaaaatgcaacagaagtgtaggtctagatgctgcatagtgatctgtggatgctagaaccaagtgtttgtacgtaatactgttatgatggtactaaattgattagttaaatgcacgattatggtacctgaac

SEQ ID NO: 31157 - DNA, 332 bp, Zea Mays
ccccatttcgtctaaggtttaattttgaacaattttaaatgataatggaaattttgtatttcgattcaagtacggtctaccattgtaccttgtgtccttgtatggttctcattgttttgcaattaaaaacatttggtcaaagatgcggttattgggctaggctccctcggccagtccacgggactagttgggctgaattctcgtatgaggttggttagttttgctcttaatctacgtggattatgtgggattgagtggttttaaattccaaacaaatcaatttactagtttgaaaactctatttttctaaaatatttctatttttctaaaaa

SEQ ID NO: 31158 - DNA, 170 bp, Zea Mays
gataaatgtcacaaaaattattacatagaaaaagtgtcttacaaaaataaatgataacaaataagcaaactaatattatttccttggcgccaataagttgactgagagacgccacctagacttcatcaaactcttcatagtagtcctcatcctaggctacctgctcttca

SEQ ID NO: 31159 - DNA, 368 bp, Zea Mays
gccacagctacgctcaacggaaaccgagatttcctggccgccattcttgcgccagtctttggggaaggcacgacctctaccacttttccccgaccttcggtgtatataggcgccgtcagcatgtttgtatcgccacggcgcagctcgacgggagataaccaactgagtgcccctcttgccgtcccaccattttcgtggctcgccggtgttctaaccttgaagctcggccgcctggaatcgacttggcgcgcggagtgtggaggccccggttgcgcgcgcctagggagcctcagcggcggccaatttctcaatcccccgctggtgccaccatcccgcgcgaagaacgacacccaccctgacacgaagcc

SEQ ID NO: 31160 - DNA, 1350 bp, Zea Mays
accatatgagtaacctgttggatacggtctaaaaggaaagtggatggaaaggctggggagagatctcatatggggggcatcaatgtttaaagcgtgcccaggcagcagaataccttgtaaggtcgtggataggtgaaaggtacccaggcattaatgaaaaaattgtctcatatgtcatgggctatgatagtttgaaagctattggaggtgatgaggatagttacttggccaagcaagtattggatgtaaggcttcggatggatggtctcttcgagcttgaagagcatgctgttcagtttgtcgaagaatttattgctctatatacaaatggtccagctggtggcggtggaatcagcactggacacaggaaggaaattattctgcaaaagatgctggttgatcgggaaaacatcttttggcgatcgcatgcaaagaaggcgagcattccctgcctgcataatcaagctacatattctgaaacaggtcaggcacgtatttcacaagcgcaacgaaacccaacatgtcgtacaatggccattcaacactttgaagcaagcacggagaccccagcatcccctgctccagctttacctgggaaaagggtcgctctctaccatgtggctcacagcagggccggtgacaaggggaatgatatgaacttctctgtcattcctcactcccctgctgacatcggccggctcaggtccgtaataactccggattgggtgaagaacgctgtgtcacctctgcttggttcgtcttcgtttcctgacgagcgagatgttcagcatcgaaacaagctgcttgagcttgtcaccgtggaaatttactacgtcccgggcataagctccctgaatgttgtggtgaggaatatcctggatggtggcgtcaactgctcgaggaggatagatcggcatggaaagaccttgtcagatgtcatattgtgccaacaagttatcctaccgccatgattgtcaatattcttatccgtattcgaattaaaatatggtaaatagtatctgtattcgaaccaaaatatggtaaatagtgacatccgaatttgtatccgtgcgtatttgatccgaatacatctctattaattgactacagtacccactataaacttatgtgtattaatattattaaggtttgttttttagagcctgtgtgaactctgggagacttgatgctaataccagagccgtgtacaggtgaagacggagcaattctgtcacccgttttacgcttacccatattatattatattatattatattatattaaatattatctcaggaattactttttttcgtttttactgtagcaaaattttggtttgacaaaaaaata

SEQ ID NO: 31161 - DNA, 2388 bp, Zea Mays
actacttgcatagccgtcgttgccatgagtaaattgctggaggggatagtctaatgtgctaactgagccggctaacactcctttatgcattactgaggcctcgctagggtttaagcatttaggtaaccaaataaactcaatatgtctaggatggtagccagccagccaaccaaagatgccgaaagttcctctgttgtgaataatatagggctcagagcagagagcagagagcagccacaagttgggcggatagcacacacttgttcacgggatcgaccggatcagatgccgtcgtcctcgtccgcctccggcgtaggcctagggcggcggcggcctcccattgcagcaggggggcctagaagaagcgatagcagatggtggtgggcgagattaatggagaagaactatagtgatgctgagagttatcgcgcaaggaggccggaagagaggctgatcaacgattacctgctgcttgagtccgccgcacggaaggtcgccaccggcctcgcgtatctgttgctgacgtggtccaccgttgtcctccttggtggtttcgtctccgcgctcaagctcatcgacttttggtgtctggctgccattagtacgtcatttgcagtcaagggtccccttgagaacctcatggaagcgctcgaggtgggcgatggcgagaccagggagcgtgccgctaggatcgttgcggctcttgctggcgatctccgccgcatcgatcagctccccagagcattgcatcacatggcttcactgcttcaagcctctgattatcggttccccagacccagaactacaactgcaactgatgcaagaacaacgacgacaagcatgcaagaacaacgacaacgacaagcagcagagagcaagcgcgggaggtttgggctgctattctgggcgatcctgtcttgtctcaacttctgggaagtcttggcgaaagagaaaaaggaagacaccttcccctctggcggcggaccaaagcagctcgtctctcaagggctgcttatcgttgagagactcgctcggcacccagcaaaccgtgcccagatatgcaacaacagcgtcctgctctcaaagctcacagcgcccctattctcccatgctttcctcgacaccgcggagcacggcagaggatgggttgttggcatgttagccacgtcgctgaggatcataaccaggctgcttattagggctcctggagaggccagcagagggctgcgtgacgggatcacaagcaacgcacaggcggtctctaacctgtccagggttctggaggaggaggacgacgccaagtttggcccggaactgaaagcagctgccgttgacatcctagcagaactagcgttgccttcatcagacaggtcttccacctcgaggttgggcaaggctgacatcgtcagggggctgtggtgcatcttccttgttcaagtggacgatggcgttgacggcagcaacactcagggagaggaacagcgacagcaggatagcacactgaggaagaaagctagcgaagcactggcacagatgctgtctgcagaactgcgtcatgttgctggccggcttactgacatgctggctaaaagtaagggctccacaagtcgagtaaggacagcaagaaccctcgagtgcttgtgttcacatatttctacagaacatggacagcctccaagactggatgctattgaaatgctgacaaaggttcttcagctgatactacggatcccatgcgaatcaaacaagctggagacggctgacgaggagcagcaagaagaagaggaattcctggtcgccttgctatcacttgccgtggtgatatgtgacggcatggtcgacgaacatggcttcagctgtgctgcgccccctcaagacatggtgccgctggtgagaaagcttaaggacataatacaggctaacaacacaaccacggtcgaatgcctgcggacagtgaagcttacctgcaagctggtcgtttcaatggcacagctcaagcccatgtgcatcaaagatttcacagagcacaatttcatggatgtactcttggagtctttgaagacgttgtcagatctcgataactgcctcgtattatttgaggtcgataatcattatcaggtgacaaagactgataagccactggtttcacttgtgaagaaagctcatcaactcttctaaaaagcaacgagaacaacccggtaatgtgtatgtgtacgcgtgcatgtgtgcgtgcacgcgcgcattgtcaagtctgcatatcaatccaatagtgcgctgcgtgaaatgatgtgaaactcagcctgataagataaggcgcaaaacgccattgcttacggtattcaaccatccactgtatgtttcctgtatgaagtgtgcatcccacccccc

SEQ ID NO: 31162 - DNA, 807 bp, Zea Mays
agtgtcgccaaatgcggtgaactcgctaccgttcactattgtctcttacctcccgcgccgccgccttctgattcactcccacgctgctcggaagtcagaaccctcttgtgttgtcgcgtcgaccgagcatcaccgctccggcaattgttcctcgaggtatgatgtggggttcgatggtggcagcgactctgattagacggcgagggtgcggtcggaagcggtgagagggcgaggggcacaggatgggacgacttcgtgatgaatcgggcaagggtttcagcggtcgttgacctgcccccaggtttcttcaagctaatccagccaccagcccaccatcgctgccggtgccgttatcagcttatgcgacgaagcaattctggaaggccgagactacaacggaaagccgctctttgatggggtggctagcagacacgtgaataaacgttttgctcaatctactccatgtcccaggctgttgcaagagcagcatcagttaattgatcagaatgacagtgacccaatttccatgtgtgctctgcctacggcgccctcagcaaaaccaaaacctgatgttgtgctgttctcttcaattattttgttaaatttttacgttgacatgccagttatatataaagacagaagatgtataccagtcttggtatggcaacgttccttcttttaaaaaatccttgcattcttatttagtagtatgtattgttttgaaggttgtaaattatagtggatgaattcattgtgcatgcattgagcagaagccatcaccatactaaatgcagattgttctctcaa

SEQ ID NO: 31163 - DNA, 788 bp, Zea Mays
gagagatgcatgggcctcaacgtttaggcccactactacacgcagatgagcccaacgatctagggtttccagctctacacgccgcacacataaatcccgagaccaaaccttcgcctccattcgtcccccgccgccgccgctcccagtctccacgcggaagcagcgcctcgcaacgctcctacccaatggcgccgacgtcgaagctgtcgatgggcatcaagcgcgcgtcgcggtcgcacgcgtaccaccgccgtgggctctgggccatcaaggccaagaacggcggcgtcttccccaaggccgagaagcccgccgccgccgcggaacccaagttctaccccgccgacgacgtcaagcctcgcgttcccagcacccgcaagcctaatcccaccaagctcaggtcgagcatcacgcctgggacggtgctgatcctcctcgcggggcgcttcatggggaagagagtggtgttcctcaagcagctcaactccggcctgctcctcgtctctggtgagcacgcttggtccacttattcctttggtgtgcttccgtggtcagtcgcgtcgctgcccctaaccacagccaactagccgagatgtgcgaatctatatctatccgtagttccgtacatcgtacttaagtttttttagtttaggcttaatcagttgaaagttgtaaatgtttacctcaatctggaactatattatttgtagtctggtgtgaaacgtggtgtatatattagcagttggaaattggaataattaggtactttgaagattatcttgcaacta

SEQ ID NO: 31164 - DNA, 305 bp, Zea Mays
aatgtataattaattaaccaacatagttgactttacgtgaggaataataataacgcgcggcaagcgcacgacgcgaaatcggtacacacgatgcgcggggtagacaaacgggctcgggggtagacagctatgtctaggggtagacaagggcctaggcgagcgttatcggagttccgacgcgcgacggacaatgatgacacgtgcatacaatgaaacgcgaacgccgcaagtaacacacgggaccacgagctgtgctggggctacgcaggccgcggtggccgtgagctgccacgccggacgcaccg

SEQ ID NO: 31165 - DNA, 4152 bp, Zea Mays
ggaatagtcacaaccggatcatcaaagacaaaaagatggacattacaccactatcacaagttcgaccaggggtctaccactatatcatttgtgttcggatatcaagagtttgggaatttcatggcaaaaatgatgatgatccaatcaaacatttggatcttgtgattattgatcaacaggtatatgtattcttcttggtccttgtcaaattattactataatttgtaattactatctgtaggcttctttccatcctcctacaagaggatatgtatcgaaattctgtcaagcatagcaggtagtgcagtcctatatagcatctaggatcagctactttagtatagttatcaggggctgctacctacggtattcaggatctaatagccaggatgccacaccttccctagtgttgcacccttctggctatacattgtactcccttcttcatctaatgaagcattctattcagccccatttaacttgtctaacagccctaatatatgcataaaaatgtcttatcgtttagcacaacttaaatctataacaatttaactttataggggactgcgatgtacgctgaagttcctcaagaagctatatatacacttcaaccacgactacaggaaagcaagattttaatcatgagaaaaatttatgttgacaacgcaaagctatccttcaaacctgtgcatggaaagtatatgatcaggctacatccaaagactttgcttgaggaagtaaatgaggatccacaagattttccaaaatatacattccatctaacaccgttcccagaactaccccaacttgaaggaaacaatgagtatttcatcgatgtcattggatgcattacagctctttctgatgcaacaccatttcagactagcagtggaatagttcgcatgaaaaggctgatccaccttgtggatctaaggggaaataaaattgaggtatcactatggggacgaagagcagaggaattcccaggacaacaagtctttaaagccagtgaaatgaatcatgtaattgttatctttgttggaacatcagtcaaatcctatcgtggatcaccaccttttcttagtggcacagctgcatgccgctggtatataaatcttccagagatccatgaaatcaatactttctatgcaagtatcggtgaacaataccaatcaatccaaaagcttcatattcagacaatgaacgagatgcagaacaagattgagcaaaagacatttttagaaatgaaattagtcgacccatttgatgacatgagcaaacgtttcgaatgcaccatgattgtaacaagaattgctgacaataagccctggttctatcaaggatgcacaaaatgcaatacatcaacaagatatgaaggaaaaacatacatttgtaaacaaggccacatctcctctcagatggtccacaggtataaaatatctctatatgccactgatggcacctatgagctagaattcgtgctctttgatgagagagcgacatcacttattgggaaaaccgtagagaaattactgagacaaagcaacaaatctgaattgccggaagagattaaagcaattgtgggtgagaaattgactgttgtgaccaagttgtttccaggaaaaagtattaaaaagagaggacctaataaggacaacaaagatccaacatttgatattcttagtatcaaaaagaggcatggaaaagacctactcctttccgtgttcaaaaaagaagagcctgttgttctccacagcgcaagctcatctcaacttccaaagctaccacccctagtaccaatagagccaaagacacaagatatacagacctctggttcagaagcagcatcaccacatgaattacagcttatggagattgatcagactagttgctttgacaacctcagtgtatcatacaagagaaatttcaatgcaattgatgactccgacaaggaagaaacacatggtgctgaccaactttcagtctttgcaaaaagaccaaagatgaagaacaattagttaccttctacatagctactcttttgagacgttgcatctattgttcaatagaaatagatcggttgtggttctacttacgagaacaacaaaatttggcttctcgcaaccaaaactcttttgcagtatgtataaacatatgactgtttgcaagcaacgtagcagcagttctgctaagctcatcttttgtagtgacatatctttaaacatgctgcttttgatcaaaataacactcactatcaactctatataatcatatgatattgtctgatattagcattttatttctgtggtttttattgggcaaacttttgatcaaaaattacactcactatcagctctatataaacatataatattgcctgatgttagtattttatttatatggttcttattgggcaattctctttcagttaattttttctatgtagtttaaactattccagtttgttgtcacaattcaagtgacaggtccagaaaaaaatatctacctatttgtaatttattaattgacttttcctcattgtagaaaatatcagctaatctgctcaaattttgatttgcatatacataatggtgattgtgacacgagtcatgctatctaaagtcctttattcattgttttggacaaataactgtcacattttatttagcaagtaaatataaggtacaattcattatattaatgaacttataagcggttgagcatctcataccttagatatgatctttgcagaccaagtgaagtttgaaattcccttgatttatcatttagttaaatgaaaagttgtctaaaagggatgatagaattatgactttccattcgcatcgcagcactccaaaattctagacaatggtgctcgattttaatgtgcacctaacagttagattcttccttcttaacaatacatgcattattttagaaacttttctgtctataataaatttttgctgggcagttcaaactattccagtttgttgtgacaattcaagtgataggtccaaaaaacatatctcaagctatttgttatttgttaaatgaattttcatcacattgtacagaaaatctcacctaaaccattgcaatcttgaaaacacaacctcaattgctctttacacataaaacaatcagatttaccattcagtcaaatgaaaagatgggtaaaagggataacgaagttctaacctcccacttagatcctagcactccaaaattctatacattggtcatctatctgcctgataaccccatccaaatcatccgtaagactagagatggcaacaaataaactatcagagaaaagtgcctctggactatcagagaaaagtgcctctggactatcagagaaaagtgcctatggacatctatatccgtgacttatttccgatatccgaacccgttacccgctatggataaaaaaacagtatccacatccattactcgcaggtaacggatatccactacacatacataatttttaaatccgccaaattcaaatatttgtccagcaaaattgtccaccaaatttaaatatgataaaaacatacaaccatacaaaatttgtccaacaaatcaaatctaacacatgcattaaggcatacagcgagcaatataaaattagacctgttgggcgagctggcaatgtctaacgtagtgctcaacatggtcacgtggagaagaccgatcctcatgcgcagtgcttgacgtggagaggtcgcgagtagctggcggagaatggagatgcacgaggacagtcgatcgccagtggtgtgtgcgaactatgaagtcggcggcggtgcacgaccgcacagatctgagctacgaccagatcacctacagggaacggtagtggcaccgccgcactggtcgtatgcaagctggaacgcatggggagtgaaggaccgccgagcgcaggaccgtggtcgtggtggccgcctggccgggtggcaggtggtcgtcgaggcggtcgagggtagggatggatactatactggggttgtggactcgtggggagaattggggaatagggaggcaagacaggctagacggggttgccagattggggaggctagacagacagccgagatgggccgcaacgggaaattagactatctatggtctgtgaattggttctaa

SEQ ID NO: 31166 - DNA, 911 bp, Zea Mays
atcgtcaaggccagggacctagattggatgtgatcaaggaattacacaagaaacggttacagataactgaaaagccgaagtataaaagaaaaccgaaaggaaccactgagagaagtatcaaagtaaccagcaattataaattcactgataaggatgcatctgctgatagttctccaagagatgtgcatcatatgtcatcagttacaggaattcaaggggatcctgcatcaggcctgtcctcgaggaacaaaaggaaactacattgggggcttgacattaaagaacgatgggaaagaaaggcaaacatgtaaaaatatctgaagatccaacaacaaaagcatatccacaccgcactcatttgaaatttgaaagctgagggacaaaacaaagcggccgaccttttccacggatcatcatgttgctggtaaaggtttgtcagctagcagaactgatcagtaagctagtatctaatttttcagtgttttgtctaacgttttctccagacgtttggttgggactttgctctgttgtattgtccgatccaaacttgcaaagttcaagtgcgatgataatttgtttattgctgtgtgatatagtttgggtttgtttgtcctctttttgtgtgagaaaaggtactgatggtgcaacacaggcccatgtgcacaatggaacatagttgttgctgatgatactagtgtatatagaagattatttctcatatgcttctcgcaacttgctggtgcggcttgtttacaagaatgaagcaggtgaaggcaaatcgtgcaataagttatcgacggaccgcatacagatctcgcccccaggatgtgcccatttttaaatcctcgagcgcctttggcctggtccatctgggaccttttgcgatggtttccgttcgtactatgctgtcc

SEQ ID NO: 31167 - DNA, 1437 bp, Zea Mays
cttaaaacaatttaacaattgggcaagagtggaaatttggagacagcagaacggcaccataactgctcctaatctaagcaccatgagtgccctctatcagtgtaggcttttttttcctcagcctttgtctccttccctcccccaaactttattccaaagcttttgcacttcttgtcaagcaaaccaagcaaaaacaatttgcaagttgccaagacatctcctgcactccttgcttatataaaaacccaaggggacgcaggagggacaaagggcccccctttcacagtttccctcccccaaaactactttcccacaaacccagaccagagcagcttgcgtctatcgtttcttttcttgttggccttctccttgccttgcttttgcttgctcgttgcttcttgagctcgagcccgccccttctgcgccttgcccaagtctctgtgtgttttttataggcttgagagcttggaatagcggggggtggaggaagcggaagaggagcttcgttttgtgttctagagggagtcatgttccatggcggcaggcctctgtccctccgggggtctctcaaggcgcttgaagctgatatccaccatgccaacaccctggcgcatgctatacacagggcgtatgggggtgcctgcgtgcagatgaggctgtcctacagctccatggctccaatctttctcaaccttatccaatggatggactgcagctgctccctgtcatacacgctccctagctaccttggcctgctcgaggttctcgtctacaaggtaccgacgaatagcacttgccgagagagtttgctgaatccacgacgaactgactggtatctcctgaggctttgaatgttgacacggtcttggtggttgaacacgcaggtttatgtcgatgaagatgcctccatatccaccatagaaaggagggcgagcctgaaggaattctacagtatgcttactatccaccatagaaactagtgattaagaagctttttttttctgttcaagatttttttttgttgatgctgctgctgctgctgcagcagtggtttaatatagttttgggaccccatggaatgcagctatcatataccctttcttgcaacaactggaggacaacttgatggacaaggactgcaaggacaaagggtggtctgctgctgccgccgccggcggcggcggcggtcggaagcttgttgccgaagatgacagggaggatgagtgtggcatttgcctggagacctgcaccaagatggtccttccgaattgcaaccatgccatgtgcatcaactgttaccgagactggagattcattatcttcattcctccagcagtccagctgaatgccagagatttgctggacaaagtttatgatactttgcgccgttgttaaaaagcccccacgtttcgtcaacaattagcaatggtccattaa

SEQ ID NO: 31168 - DNA, 1878 bp, Zea Mays
caaacctaagctttctttcttgataacgaagcagcaggagattcctctctgttttccacccgcaagggaactttggtgaagtggtgaatgtggagctatcaatggaccgaatggttaaccttcctcgtggctatggatatattgaattcaagaagagagctgatgctgagaaggctctactttacatggatggtggtcaaattgatggaaatgttgttaagttgaggttcactcttcaaccacgccaaagggctgtatcacctatgaaagctccaccccctcctccaaaacgagatgttgctcagattgaaaaaggtcttagcagtgctgaaaaggatgcccagcagcgtcctagggaatcatctccacgaaggaagccagcttcaccaccgcggaaacgatctccaaatcgaagggctgaatcgcccaggcgtccacctgacccatcacctaggcgtcgtcctgattctccgcctattcgtcgccgaccagatccttctcctgtcaggcgtggtggcacacctcctcgcaggagaccactgtctccagttagaaggcgttctccttcaccacctaggaggcataggtcaccgatgcgtccttcacctaggaggggacgtggcagtccttcaccacgcaggcgctcccctgggcctcttaggcggcgctcgccacctccaaggcgtttgaggagcccaccaagaaggccaccacctccacgtcgctatagtcgatctcctcctcgccgaccccttcgctccagatcgatttctccaagaaggggacgagggcctctcttgaggcgtggtaggtcaggctcatcatattctcgatcacctactccaccgccaagaaaggggccaagaagggtatcaaggagtcgcagccctagaaggcctcccagaggaagaagcatctctagtgacagccgaagcagcagttctccttcccctagacgtggcaggtagaaggaacccgttgcattgtgtatccggcaggtaaagccttttatcccctgactcagatcaagtgttggtttgaggagaagataaaagaaccctacggcaatgcttccagtggatctgcttaacatgcctggtgggctcactggcttgtgatttgtacccgagacagaattatctgccatgtgacatctggctcatgtacttgattgtaccccaagtgttgaaaggtttcatctactttgttggaaggagtttttcaacattcccattgtattatgattccgttgatcaagcaatttgtgtatgcgcaggcgcacgcacagcgtacaccttttctaatctgaaaagagttgtcattttgccaaaccccgccctgcttgttgccctgtcccatcagtcattggtttactgacgcgacgcaacgccgtttcctacaacatcctcatcgccgcctactctcgcgcgggcctacctggcgacattcgcgcgctaggaacggcaatgtagggtattgggcgtacccacgtgacggcagaaaaacatattgatgttcttctaagggctcagtccctttgggaccaagggtaatgaatggaattttgaggggatcaaaatcccttactatttaaaattgaatattgagggattatggtcctcttaatcccgttcattacacatacacttgctgtcgaagaagtggaatgttgggacttatgactcatctatttgtaaaattgtctcaaatagttaaatgacacaagattatatttgacatttctatgctcgtaattgaaggagagtaaaattggtgtaactggatatatgtactgccttgccttgtgaaaggatcacgatgtacaaatggaatggagggacaaattagactttaattttttttgtgacaattaaattc

SEQ ID NO: 31169 - DNA, 14949 bp, Zea Mays
aacagtgcaacctactgaaaagcccgtcatccaggctcgacatatggaattgcaagttggtagagttacattgccatgctgcgacaaacctacattaatccagaaagggccttttgctgatattcggcgtgcattagaaattcttgaaagggttgcatgttctataaaattcaatgagcccattcttcttgttggtgaaactggtactgggaagaccactactgtgcagaatcttgctgcctggcttaaacaaccgttgactgtggtgaacttaagccagcaaagtgacatttctgatctccttgggggatttaagcctacagatgctcgatcgatatgttttcctctttatatggagttcaaggatcttttttctcgaagtttttctgcaaaggacaatgaagctatgatacgttattgtgatgagtttgtaatgaacaagaattggaaaaaactactaaccactttggaaagatatgttgcgaaggctcagaagctaattgaagggtctaagtcttcaagtggttcaaagaggaaacgacctttgccagcccatgttgtttctgattgggacaccttctcttccagactgaatatggcttgtagtcaaattggttcagcaactggcatgtcatttcagtttgtggagggtgcttttatttcagctttaaggaaaggccattggattttgcttgatgaggttaaccttgcacctccagagacacttcaaagaattggtgctgtactggatggagagaggggcacactttgcctagcagagaggggagacgtggattatgttgaacgtcatccttgcttcaggatatttgcctgcatgaatccagcaactgatgctgggaaaagggaactgccgtacacttttaggaaccgctttactgaatactttgttgatgatcttatggatgacgatgatctacgtctttttgtcaggaaatatctggatggtctgaatgctgcaaatggagttatagatagtattgtgcgattttataaagtggcaaaaaaggagtgtgaggagagactgcaggatggagctaatcagaagcctcaatttagtttgagatctctatctcgtgctttaggatatataaaaaacgcagagaaaaaatttggcttcaggaaagccatttatgatggtttctgtatgttctttcttacattgttggatcctcctagtggaaaaatcatgaagaacttaatagtttcacttctgttagatggaagagtgccacctaacatttcttttgttgactacttcactgataagcctttgcaattaggtggctgtgaatcggatgattttttgcagagctatgttttaactcaaagtgttactgagcacataatcaaccttgcccgtgctgtttacattagaagataccctgttcttctacaagggccaacatcaagtggcaaaactagccttgtgaggtatcttgctgcaaaaactggacatgagtttgtccgaatcaacaaccatgagcatactgatctccaagaatatctgggtacttatgtgacagatagtcaagggaagcttcagtttcaggagggtgctttggtgaaggctgtgcgggaggggcactggattgttttggatgagctaaatcttgcaccgtctgatgtcctggaagctttaaataggctgttagatgacaacagggaacttttcattccagagctgcaagagactataccagcacaccctaattttatgctcttcgctacacaaaacccacctatgctttatggggggcgtaaaatgctgtcccgggcgttccgcaatcgttttgttgaagtgcatgttgatgaaataccagaagatgagctagccacaattttggagcagcgatgtagaattgctcccagttatgcgaaaaggatggttgaggttatgaaagaattgcaaacacatagacaaaatagtagagtgtttgctggcaaacatggtttcataacacctagggatctatttcgttgggccaatcggtacaggacatttgaagggaagtcatacgaagatctggcgaaagatggttatttactgctggcagagagattaagggatgtcaatgagaaagttgttgttaaagaagctttggagcgtcacctacgtgtaaaactcaatatagctgatttgtataactcggaagtcacccgtgaagataatttattcattgatgttatcaaactaagagtacaagattgcgttgggaatatcacttggacaaaaagtatgtggaggctatacttccttattgagcgttgctacagatcacgcgaacctgtcctccttgttggcgaaactggtggtgggaaaacaactgtttgccagattctaagtgctgtccttgggttgaagttacatattttgaactgccatcagtatacagagacatcagacttcattgggggattctgccctatacgtgatagatcaagaatagcaattgagttcaaagatcttgttgcaaaaatcaaacagatgaaaatgtttttttatgttgcagggaatgttccgcttgaaactgatgtatctggagctgatagtgtcatcagtcatctggatgaaatacttgacagatacagaaagaaaaaatatctgtttcctgaggtgtctgctcaagatcttggtgccatggagcaaatcaagttggatttgatgcatctccacaagaggtggcaagcaattttcctgtggcaggatggaccgcttgttcaagcaatgaagaatggtgatcttttcctcattgatgaaatttctttagctgatgacagtgtgcttgaacgcttgaacagtgttctagaacctgaaagaaaattgtcattggctgagaaaggtggttctgtgttagagaagattgtagcacatccaaacttcttcatccttgcaacgatgaaccctggtggtgactatggaaaaaaagagctttctcctgcattaagaaatcgatttactgaaatttgggttcctgctgttattgatgttgatgaacttaggagcataacttttgggaggttcaccaaaactgacttctcttgccttggagattgcattgttaacttctggaagtggttcaaccaattgcacatcgggagaacattgacgatacgggacctgctgtcatggatttcatttataaacgtgactgaacaaaatcttgggcccgagcaagctttgatacatggcctgtttcttattttgcttgatgggctctcattaggtctaaatgtttctaaaactgaggctactgagatgaggaatacttgcttgtccttccttctagaagaattgcagaaagttgggggcacggcagtagattcatacttgaatgatctaaataattatggctggggtgacaatatgaaaaaaaaagatatagatcatggttgtttggaagatcatttcggcattgcaccattctatattcctaaaggccattttccttgtaagcaacaggactttgaaataatggcgcccacgaccagtaagaatgtcttgcgagttttgcgtggtatgcaactacctaaacctctccttctggaaggtagtcctggagttggaaaaacaagtttaattgtagcattagctggattttctggtcatgatgttgtacggataaatctatctgaacagacagatatgatggatcttctaggttcagacctgccagctcaagggggaaatggaatggaattttcctggtctgatggtattcttctccaggctttaaagaatggaagctgggttcttttggatgagctcaatcttgctccacaatctgtcttagagggcctgaatgccattctggaccaccgtgctgaggtcttcatacctgagcttggtcaaacttacaaatgctcatcgtcttttcgggtctttgcatgccagaatccttcatcgcagggtggtggacggaaaggccttcccaagtcctttctgaaccgcttcaccaaagtttatgttgatgagctatcagaggaagattatctattcatctgtaaatcacgatatggttcattgatttctgaaagtttcatccgaaatcttattcactttaatagcagactgtatatggataccatggtatataggaagtatggccaacaaggttctccctgggaatttaatctacgtgatattatcagatcttgtgagatgatagcaggttccccaaatcctatgatggatgattcttttttaaatactgtttatctgcaaagaatgcgcacattggttgatcgccatgaagttgtcaagctttatgaggatgtctttaagaaaaatgcttggttgttggaagtgcctctattagaagaaataacatccaatcatataaagtgcaaaacaatcaactcaacatatttccaggtgtccttaatagtcttgaagcagccatgcactgtatccagcaaggttggttgtgcattcttattggacaaaattcagctggtaaaacatcattaatccgcttgctggctcagctttctggaaatacgttgaatgagttaaatctgtcgtctgcaactgatgtgtccgaattgttgggatgctttgagcagtataacttctttaggcactacaaaactgttttatcagaagttgagcattatgttgatgtgtatttcagcctgagtattgatacgaaccagaagaattttgttgcagaaagaaggggtttgtttaccaaatggtttgaatttgtggctgcaaaagggcactcctcaattaagacttcgaaattaatgagtgggaatgcatctttgccttcattaagcttgcttgctgaaatagttgagcagatgaaatgtgatctggaaatgtttgacttctctataccattgacaaaagatgatcttagtgaaacactgaagtccatcaacaacttgcagcaaaatggagctgcacaccaaccagttagattcaaatgggttgcgggagatttgattagagccattgagcgtggtgaatggattgttttagataatgcaaatttttgtaaccctactgtacttgataggataaactccttggttgagcaagaaaggtctattatggtcaatgagtgtggtcttgttgatggaaatcctgtagttatcaaagcccaccctaagtttcgaatgtttttgacagtaaattcaaactatggtgaagtttcaagagccatgcgaaacagaggagtggagatctttctgatggaccaaagttggaatctgaaaggatttagcaatgtacctggggacagtgaacggaaggatgtgataagatttttaatttcttgcggaatacccagaatggaactggtctcgtcaatgtgtgaagcacacatgtacgcaaaaggtgaaggttcacgtgttggtgtgaacattacccttcttgaaatcacgcgctgggttcagttgttccaacaactgattgttaaaggaaatcagttcctttggagcctgcatttgagctgggaacacacatatctaccatgtttgggtgaaattaatggatctggcattgtggaggaaggaaaaaataagtttttgactaattttgacagatctgaaattttggctagaaactttagttttttgactgtttttgatggttgttcaactagtttgcattctggattatctttgtccttgccgggtggttggccaattgagcaaaaactaagggatctcatttggtattcaaaagaaacttgtgtcatgaggaattgcatgtttctacagtcattgggtgcccaatacgctgcttatcagataagcagtttgaatgataattcattattgttgggtcagattagtctcatccacccatctattcttcctgctgcaagcttacgcgaattacagtttcctacggttaatggtcagcctgtcaaaatttgtgtcactggggcattcaattcatacttagctgatcagatgcttttctttgctgcaaactgggtaatggagcaatgtactaaaaacgatcttgaactatatggcaaatggtttaattggtataactctctggtccagccttattgcaacttctttgagagctattggtatattctggagcaagaaagtgagcatcctatttggcataacatccttgaatattacagggaaatagttgcctatcacaatattgatattgttactcagcatattccattactctcgaagaagttgctggatatggctggttgtgatagcctgaaagcatgccaaaaccggctgcatcgttcttttaaggctttgggcttgttgcggcttactctgcagcaatggcaaattgagacaaaatgtcctgatctttctgtcctggaatgtactttgttgccagcattgaagtccctcagatgcttagagggcgaggtacttaaaacgattgcgaaatcttggaagcggctcaaaatatactctctccttcttgattaccacagatcaatatggaaaatgatgattgcatctcagttagaggggctaccaattgtttggaatcttttgaggaaagaaatactgaagttgcagcagaagttcccggttgaagttgacgtctttttgatggaatgtgtgaatctcaacaatataaatgataccaattttcaatatggtaaaccaactttgtgggattatggtggtcatcctcatctgccatcatctagcgagatatttgacaaaatgcaagaacttttgtccttcacaacagatgtgtggccaaggaagaatcttttgaatatagagcttgatgataggaaacagttgactgatgctatgctgtcagccaacaaggatcttagacaccttgcaatggaaggtgtctctatggcttgcattgctacaatgaaaactgaggaagatgttttagctgttgtcccccaattggatgaagttcacaagcggcttgtaggaaaggttaactctgtgagggataatcttggattattgtccaagacatcagtgcctgaatttaagttctgttgctcagtgtcctctgagattctatgtaacatttatggtttcaatggctggctagcaagtcttcctttgctcaacttgaagagcttaaacttggatacccttttacttcaacagctatgcaagtgcacacaaaaagattcttctgaaactcatgagattcttgttaattctgagtacctgctgaagtatgctatggattactcactgggttcatcttcaagatctcctctggactatattcaacatcagatcatttggtggatttgtcatgactgggccaaagttgacaatgcacatttaaaagttgctagttgtattcttgaaatgtggtacaactatcactcttccttgtggacttattgctcaggaagcccaaagtgtctattctcagtcacacatgatgattcctgtgacttggcacacctgacaaaaatggacgccatcaatactattatccagcaggatttacatgtggtggattatctgaagagtggtgtaatgcttaaagttgcatctagaaacctctgggaaggtgtttcgtgtttgggaaactttgtttctagtctgcactctgctgctgattccctctttaagcagattatatttgtccataagaagcatttcgaggaagagaactataaccagttagagtctctcctgttccaacaatcgagacgtttgatagagaaagaagatctggacactgtttgtgctctgttatcatcttcaagctgtagagtattggcttcgctctcagagtcagataaactcgtagaatccttgcttatggacttgtattcatcctactcccgtgactctttgttgcataccggagctgcttgggtccgtattggagagttacgcttccggttattgttgagctcatacagtccagatcctacatttaagtctagatacaagcattcacatattttggaaaaaattacacttgtgaagcttgaggaaaaggttcgtcatgattgtgaggaattagctggttctaactcccctgaagatagccatgacaacgagttattgcaattgctggaaattaaagagaaagacacccgtgcaaaggttgtatttcgtcctcgacaatctaagcataagagtctcattgctgcatgccttgagtttgaggaccgcctgtctgagtgcaaggacttgttagctagcttaacttgcgaaggacttgggcaactagaggttgaccgagtgtgcaattggcagataatatccatgaactttatcaagaggctgacagaagattatagggaatatgttgatttgatccagccaattcaagttgctgtatatgaaatgaaacttggcttagcaattgctctatctggttctcttcagagggagtatttgaagaagattaaagaagatgatattaatagagttcttggagcaatttatgcttttatgcagtttccctctggatcttttactgaaagggttgtaactgacgtgactgatgatcttacaaattatacaatcactggccaactaggaaccctaaacagttgttctggagatgtagatatgttgaagaagcttgctgctatgtcaagtcagttgaatgtttgtaaagttgctggcaaagtgaagtccctgtccgagatgcttgcttcagtgcatcatatttttttagtaagaacagctgattgtgtcagctgttcccttgtcatggataagtcatcttatgcgtcattgaaggatacctttgatcattttacaagcatgtggatcaacatgaaataccgtttgaaggctaaagaaagcgatgattctcagtacttcaagttcaaatcgcgaatgatcagtatagacgacatctttaaagatgtgccgttgctttctgatatggaatcagaagacagcattttagataatgaagaaaaactagagcatgaatttttcaaaattacggaaagtattgatgacgataatggtgttgttgaagacaactgggatttgataccagagtctgctcttaaatgtattgtgaccatacatgaccaattgtttggttcgcccgatctttttgagaagcgccgcaaatgtcaagttagtgatgcacagaaagtccagtctttcatagaatcatatgagctgggaacaagaatacttaaagacctcccggaattaacatgttctatgtttgatgaaaagctcatgcctgagcacctatttcgtgtttgtcttgaataccaacgatcctgtgcaaaaacacatcaagattgtagtggttataatgcttacaaggatccaaatcctcctgtcttgtttaaaatggttgagtcactaactacacttcaggagagagttaatagctatctggatgaatggcctgatcatcctggtctcttgaaaatactggacctaatcgcttcccttttagcgatgcccctaagcacgccaatttcgaaggtcttgcttggattgcaattgctggctgggaaagctcaaacattgcaggaaaatgactccaagttctttgtaaaagatcatcttgcatcgatatttttgcttgtgtattcatggcaaaggctcgagttagattgttggcctatactgcttgaggaggtccagacaaagtatgagttgaatgctgcaaagctgtggtttccattgcgagccttacttactcaaacttctggtattccagtggatgatgatttgtctattatcagaagtgttgaggaatttgttcaaacatcaagtcttggagaatacaagagacgattgcatatcctctttgccttccatggtgagatttctgctggtgctagcttgggtagttattcaagtaatgcggtgaagaaaatccagaatattctgtacagtgtgtttggttactatatgcagtttttgtcactcgttcatgggaaaattgaagaaggtaaaaaaaacattgagaaggagttgaaagatcacgtcaagctttacagctgggagcaagcaccatatagcagcgcttctattgaaaattttaaaaggactaggcaaaagatttttaagcttctgcaacggttcaatgatattttgaaaagtcctgtcatctttctactgaatgaagaagccacatcaaggaagattccatgctggcttgatcctcagaggcctgaatcacaccttcctgttgactctgaaaaatttaacaaaaggtttctgtggtaccacaagtgggcaagtgagacgtctttatcattacaaacattgcagcaatcaaatggtagtactgttggagttcctactgccaaagaatatgcagatatggtatatgatgtgaagcactggcagaatgaaattgagctcaatgacagattgcagttcttctggatctcacttgagagaatatgtggggcagctaattttggtagtacagtgaagcatgggaaaaagaatcagaagaaaacagctctatccaatctgttcaagactcttgaggaatgtggactatctaagcacaggccaatgagtcatgagtggggagatgagctggcagcaccaagtccattgttcttggagcagtcatatgattctgcacatttattacagcaaataaactctcagaaaatgctggaagatgttagcatcaatcattccacactattgaacacagataactggaagcatgcaaatcagcaatacttcaaatgtttagcaatgatgcaacaacttcgacaggtttctttgaagtttaacaaagatctaggtttggaagaggttaacaaggctatgtcatttatgagtcatctgttgactgtgttgtctgaacaacgacatcttgcttataatctatttgatcaacggaaccaattcaagcatgctattttcttattaggttctggagagtaaatctctatcatcaagccaaaatgtgctgctgagttccatgtggcagcaaaagaaattgtttgatgctgtaatcactttgataacagactccaacttattgctcagaagcttcaaggattgccattataactcttgtaacaactttatagaagttgaagggatctcatctctccttggaaagttcatcttgaatttttctgaatccaaggagttgttagatgaatgcttgcttggatccactaatatatttgctggtgcatataagagcatgcctcattctgcaacagagatggaacaactttttactgataattgccagcatatagattcattgttggatggatacttgcctggatccaataatatatttccagatgcatataagagtattcctcttgctacaacagagatggagcaactttttgctgataattgccagcttatagattcattgagagaagatatgaaggttctatgccacagggatctttcagtgggatctgttaagaaagttcttatctctcgtttggaagaattgttggagaagggcaagatggcaatggagaaccgaagacatgttgaagaaaatcataagctatgcttaaagcttgaagcttcgtatatagaaattttgaaggaaactttcatgttagttgttggtgctgtcagaaagctcactgatcatgaagtatgcagtaatggaactgaaaaatcgccagttggtaatgttgcatcatggaaagatactttgcagacatgcattatgaatcttaaattggatgatatttgtgttgctggtgaaaagattcgtattctagtgaggttgctggttgactataaacctgatatacgtactagtatagagctgcacctaatgcatcttcatgcttggctgagtgtgatcctatcatcagcagaagggatactttccgaacttttagaagcacacataacaacttctgaaatgactcttgcacttggggacctttttattcatttatttacggatgggtttggttccactgaagatacagccgaagatgcagatgaactacagcaagatgctgttggaagtggaactggaatgggtgagggggatggtcaaaagagtgtaagctctgatatagatgatgaatcacaacttggtgacagtaaggacttgacatgtaaggcagatcccgctcctaagaacgatgataaagctgttgaaatgcaagacggttttaatgcacaattatctgatgtttctgaggatcttgaaggcaaagactcgggtggcgaagatgaggataccttggataatcagatgggtgatactggtgatgcaagtgaagtggttggcaagaaatcatgggataaggatgaagatgatgatcctaagacatctattgagaaatatgagtcaggctcatcagccaagggaacacaacaggatgatagggaaatgagagctaaggatgatggttctattgaggaggaagatccgatggaaatggattctgaggaaggaaagaataataatcttgaacatgatcctagtacccatgatgaaaccgaactgaatactgatgaagtcatggacaaagctgatgcatatgatgaccggactggacctgaactccctgaaccagagaatgattccattgatgttgacatggtggaacaagaacaaacggatgaaataaatgctgacaatgaagatataggtacagaagaagctgaacaagcagatcagaggttagatgcttcagatgatatggaggaaggagatatggcacaacatagcgatggtgtggtagataatgaaggggagcatgttgaagatgcaaatacagacgcaggtgagatggattcacaccaattggacaaggcggattcacttatgcctctgtcacaaggcctacagcctgacaatatgcaaataaattctaatggagaatctgaagcgaacttggccaacagcagtgatatgcatggcgctgttgctccttcagtaaatttttcaggaaatgaagtgcccaatatggaaatatctatgcccaatactggtaacgattcaatactatcgtctaactccaagccagatatgcaaaatgatgctcagcagcacatcaagcagacaaatcctttcagaagcatcggagatgcattggaggactggaaagaacgggccagagtctcagctgatactcaggatcatcaaccagaaactggaaaagatagtagtgagaacactactgaatttcgttatgtgcctgagggtgaggagagcacctctcaggcattgggtgctgcaacagctgaccagatcaattatgacaatcagattaatcaatctttcttggaagatgaaagctgtatcaggaatttggaacatagtgatgagagaacacctgataaccctgaggtgccttaccttcaaacttcacaagcacttcccaacaagtctgaaaatgccaatgaattggatggaagagaaattcaaactgatgcatccgttcaaaatttagttgaaagaacagatcacactttccaagatctagtttctttcaaacaacccccggcagatgataaaatagctcttattgacctaactactgacagggaattgccttctcagatggatctcgacatcactgatgcagagacaaaaagatctaatgcggtctggaaaaatcttgagctcgcaaccatgaaattgtcccaagaactggcagagcaattgcgcctggttatggaaccaactcttgctagtaagcttcaaggggattatagaactggaaagagaataaacatgaagaaggttattccatatattgcgagtcatttccgcagggacaagatatggttgcgccgaactaagcctaataaacggaattaccaagtggttattgctgttgatgactctagaagtatgtctgagggcaaatgtggaaaatttgctatcgaggcattagttactgtgtgccgtgctatgtcacagcttgaggttggacaatttgcagttgcaagttttgggaagaaggggaacgttagtgtgctacacgattttgatcagatctttaatagtgaagctggagttaatgtgatctctagcttgtcgtttgagcaagataacaaaattgaggatgaaccggtgtctgatctcttgacacatctgaatgttatgcttgatactgccgttgcacgggcacgcaccccatcagggcaaaatcctctccagcaactgatactgataatatctgatggaaaattccatgaaaaggaaaacttgaggcgccatgttagagacgttctaaatcgaaagaggatggtcgcgtatgtgctcctggatagccccgaggattctattattaatctaaaggaagcatgcttcagagtaggggagaaggtagagctgaaaaaatacatggattcctttccgttcccgtattatgttatgctacagaacattgaagctcttcctcgcacattggccgacctgcttagacagtggtttgagctcatgcagagcgccaacgagtgacccttgggagttgggagtagtgccacgcatttagctgtacagcaaactacattctagcttccatttttgcttgggcctggacagttctgtggtggcaagcttgattgtgcacaaatgccttcacggttcaaatcgctttcctgaaatatgatctctggtcgcaggcttgattgtctaaaagcatcatcacaattcaaattgtttttgggaaatttgaatagaatttccgctttcctgaaatatggtctctgctcgcaggctttattgtgtaaaaacatcatcacaatttaaattgtttctggcaaatttgaatagaatttccgtgctcaagagttatagtttgttttttttttcaatggagaattgttgctcacgtgctacatgcgacctgagtgtgattgatccttcaatcttgccctgctgttcatcttgtgttgtttgtcatgtttggctttgttgatgtacatgtttcttccactgcatgtgctacgcgttgacgatgtacgcaactgtcgctgccaacgcgaccactttatatatgtgacagtgacacatgccaggggcag

SEQ ID NO: 31170 - DNA, 666 bp, Zea Mays
gggaagggcgcggcatgcgctgaagacagtcttagggaaaaaaatttagggggaatgggaccgaaccatccacgcaacgaatattctctctagatgccgcatcatcccgtccgcgaacgtcgccgtccgggacggagagcctcgctcgcaacccacccctcctctctcggcgactcggttctccctcccgcgggacgccaccggaactgactgccgctgctggggcctggccgttctctcatggtcatggagacgccttcgcaggagatggacccagagcaacatggggacaacatggcaggcaagggtggagctggacaggtctattggtccaacgcaatgtctagtttcgtgctcaaatatttgtccgacctagttgcgagtggaactaaaaccacgagcggcttcaagcaagctcatcttaacagctgtggtagagctttgtatgagaagctaggtgtccagtgttggggacttgttctcaaatgctaagaattaagaacaaggcaacataaaaagtgttaagtgttaaagtccttcgtccttcgaagcattatgtcccttcgggaaataatgagtttcggacgaaggtcataagagacataccttcgtaaacataacaagtaatgacgaaggattcatataaagcatgaaatataatataag

SEQ ID NO: 31171 - DNA, 2278 bp, Zea Mays
agaaatcacattgtcctgtactactaatagtaatcacattgtcctcgtcgtcgtcctatcttctcttgctcttctcctccggcctcctcggtccttgctcacccgaaccagcaaccctaatccgtggccgcggacccgccgcaagctccatcgcgcgaatagattggggattcagtcgaggctacgcgggaactggtcgcgctcgagatcttagcctccgcacctgaaaccattggctccattgctattgctgtcgtggtgatgaaatcttggggagcgcgcctcgctcggtcctaagatgctggcgagctacggaggtggtggccgcggtgtccatctctcctcccacaaggacatcctcctcggccgcggcggccggagcttcctcttgggcaacacgtggtttctcctctccacctacccggcgcgcctcctgcacaccacggaccgccgcgcgcccgccgctttcttggccgtgatcaaccggcccccctgcatgcggccgcaccgcgctgggcagggcctgctgcagaggggtggtattgtcatggctgcttgcggctatgctcttgggcgagctgagctgggtgctgccaagcgccagcagccggataaggatccatctgcagggacgcgctcctcgaatgttgcagccacgggatcactgggcagtgcagcacggccagacgtctcttttaggtacagaggggcggattcttgtaagaaggtagctgcaagcttgaagtcgtctgagccatgggggaacagggcattctggacaaacgccgctgggccaggttggaagttgagctttgctgttgagccatggaccaagggctttagcacgtcgtgtgcggcgccatattctgctggagccacagagcatcaattatcgctcgatgagaaggtggataactccaccgttgcatctgattctgatgggaagtcaccagtttctgaaaaattgaagtttctctctggttcatgttacttgcctcaccctgataaggaggctactggtggtgaggatgcacatttcattagcattgatgagcatgtgattggtgtagcagatggtgttggtggttgggcagatgttggtatcgatgctggactatatgccaaggagctaatgagaaattcaatgagtgcaatcaaagatgagccagaagggaccatcgatccaaccagagttttggaaaaggcttatatgagcaccaaagcaaggggatcatccactgcatgtatcatcactcttaaagatcagggtatccatgctgtaaatcttggggacagtggtttcgtagtagtccgagacggtcgaactgttctcaggtcaccctcacagcagcatgatttcaacctcacttatcagcttgagagtggaggtggcagtgatcttcctagttctgcacaagtatttcacttcccggttgcccccggtgatgttattgttgctggcacggacggactttttgacaatctatacaacaatgagataagtggtgttatcgttgaagcgctcagggttggacttgaacctcaagttgcggcacaaaaaattgctgccctggctcgacaaagagccacagacaaaaataggcagtcaccatttgcatcggccgcccaagaagctgggtaccggtactacggtgggaagctcgacgacataacggttgtggtgtcgtatgtgaaaagcgcttgattcgagcctttctttttattagatgtaatgtcaaaatcttagtcccgaatttaatggcacatgtgttctcaaggtgtgaaatcccctgagatactagaagcactcctgctgggtttagccctggaatacgttagcaaaccattacaccattttacttgtttgccactgtgagtaatcttctttttatatataattctctaaaaccagggcggtcgtttcgcccttggagttggagggggaggataatgacctgctggaaccaaattttgttgtaaatattgtcgattgccgaatgataacatgttggactcaatggtggattgttgatgctgtttgaaatgtttctcttgaccccggagaacggcttctcaatatattgtcagtatgagttccatagaattgaaatgcaagagccaagaggggtgagactgatggctctatcgatctatttattagtatttattacggagcacaagaattttacgagcatgagaagagtgatggcctcgaaacaccatgagcctacgatgcagttgcagtccaaacgcctaggcgggcgagtttgatgctgcg

SEQ ID NO: 31172 - DNA, 3486 bp, Zea Mays
cgactacccttgtgcccgactgcccgtctcggctctcaaaacaaaccccggctcgcctcgcggaatccacgagtccgccacgccagtgcgcctccaatttctccgcagtccgcagttccgcacccgtacctccccaaccccccagctcaccaccccgagatctcccccgaccggcctcgagatccctgcggccatgtcgtcgtcggcagccatggaagcaatcgacgagctcgtccagctctccgagtccatgcggcaggccgcctcgctccttgcggacgatgacccgtccgacgagaccgcctcgcgccgcccctccacctttctcaacgccgtcgcgctcggcaacgtcggagctggcaagtcggctgtgctgaacagcctcatcggccaccctgtgctgcccacgggggaaaacggcgcgacgcgggcgccgatagtcgtcgacctggcgagggatccagggctcagcagcaagtccatcgtcctacagatcgacagcaagtcccagcaggtgtcggcaagtgcactccggcattcactgcaggataggcttagcaaaggggcatccagtggatctgggagaagccgaagcgatgagatttaccttaagttgcggacaagtacagctcctccgttgaaattgattgatttacctggcatagaccaacgagttatggatgattcaacaatcagtgaatatgctgggcacaatgatgcactattgattgttgtgataccagcaatgcaagcggctgatgttgcatcttctcgagctcttagactagcaaaggacattgatccagatggaactagaacaataggtgtcttaagcaaaatcgatcaggcagctgcagatgcaaaaaccgtttcttgtgttcagtccattttgtccaataagggtgccccacgagcagcagctgatattgagtgggttgctctaattgggcagtctgtctcaattgcatctgctcaatcaggatcagttgggtctgataattcactggaaacagcttggcgagctgaggctgagacccttaaatctatcctaactggtgcacctcagagtaagctgggaagaattgctctcgtggataccatcgctaagcagatacgtaaacggatgaaagttcgtctgccaaatttgttgaccggacttcagggtaaatcccagatagtgcaagatgaacttgcaaggctaggagaacagatggtacaaagtgctgaaggaacaagagcagttgctctggagctatgtcgagaatttgaagataaatttcttgctcacattacttctggggtccggttggaaaatagttgcaagttttgagggcaagttcccagataggatcaaacaacttccattggacaggcattttgatttgaacaacgtgaagaggattgtgttggaagcggatggctatcaaccctatttgatatctccagagaagggtttacgttccttaataaaaggagttcttgaaatggccaaggagccatcacgactctgtgttgaagaggtacaccgagttttgttagacatagtaaatgctgctgcaaatgctacaccaggactaggaagataccctccattcaagcgggaggtcattgcaattgcatctaatgcattagatgctttcaaaagtgatgcaaaaaagatggtggttgcacttgttgatatggagcgagcttttgttcctccacaacacttcatccgattagtacagaggagaatggaaagacagcgccgtgaggatgagttgaaaaataacagatcatctaagaaaggacaagatgcagagctatccaagatgaaccgggcttcaagccctcaaactggatccgatgaagctggtggtaacctgaaatcaatgaaggataaatccaataagcaagataatgatacaaaagagggaccaaatttgcaggttgctgggcctggcggcgaaataactgcaggttaccttttgaagaaaagtgcaaaaaataatgaatggagtaaaaggtggtttgttctaaacgagaagagtgggaagcttggatacactaagaagcaagaggagagacattttcgaggtgtcattgtcctggaggaatgtaacctggaagagatagaggaggaagagatatcgaagagttctaaggattcgaagaaggcaaatggacaagagaaaggcccaagtcttgtttttaagattactaacagggtttcctacaaaactgtcttaaaagctcacagtgccgttatattgaaggctgagagtatggctgacaaaattgaatggatcaagaagataaaaggtgttattcaaagcagagggggctctgttaagggtcccactgaagatggtcctatgagacaaagccgttcagatggatcccttgatacaatggctcggaggcctgctgatcctgaagaagaacttcgatggatgtctcaagaagtccgtggttatgttgaagctgttttgaacagtttggctgcaaatgttccaaaggctattgtactttgccaagtggagaaatcaaaagaagatatgctaaacaaactgtacaactcaataagtgcacaaagcaatgcaaagatcgaagagctactccaagaggaccacaatgctaaacgtaggcgggaaaaataccaaaaacaatcatccctcttgtcaaagctcactcgccaactcagcattcatgacaatagagcagcttcatatgggaacgatagttctggagctgagggtagcccccggtctcctggccactctggtgaggattggaagtctgccttcgactcagcaacaaatggctctgttgaccggtccagttcacagcatgagacaaggtcaaaaagtgctgacagtcgaggccggcgccatgaaaacggggatgccaactctggcagccgacgcacacctaaccggttgccaccggcaccaccaaatggggggagatactaagtatgttgattgatcattacctgtgaccaatcatcatcatatgctcttgccaggttctcatcctctactgatactggttattggtggaagaaaacatatgggaccggagaacggaaagcttactggaagatttggatggacggtgtgtatcaagagaaccaaagttgtttatagaaaattagaatcatataggtcattgatgattgtcatttcccgatcgttttggtgtatttgatcttttggatcctcattgccagtgggattttgttgccacggatcagttaattttggttttgtacgcttcttctgtaagtctccccatcaaactggcaaatgtattctttacacacagtcatgtatcgttgttcttcccattcttttagactgaaccacatgttcagtggttgtgccatactgctgtatgattatattgtacaattcattattgggctggagtacacacatgcttgttgatacggcccacatgttcatattgggctctatgtgggtaatggggcatctgaactgtggc

SEQ ID NO: 31173 - DNA, 4579 bp, Zea Mays
cgtcgactcgtcgtcttctctacctggcgctctcccagatcagatcaccaccaccgcccaccgcccaccaccgctcaccgagctcgcggtcgccggagatcaccgttctccggcggccccgcgtacgccggtatcagtaaagaccagcgccgctagggttttggacctatggatccgctccggagctacctgggccggatcctcctcgaagagatcacaccggtggtgatggtgctgtccacaccgctcgccgaggccgcctgccgtaagaacggcctcagcttcgtcgacatgctctccccgttctcgctcttcaaaaaaatcgacgtgcccgtgcggacggcgagcgaggttccgtacaggctgcaaatgtttaagatccggatggtttacgcgtccgacgtccggaaggaggactgcgaggtggcagacgagaagattaagcctgtagtttctgaggccaatgagaaggctcttccggatttgctttcagacccgcctcaggctgaagatgtacttggaaagcctgaggccgagctgtgcccattgtggattaagaagttcaatagagaactaatgcgaacactctcattttcggagcatgaaacgtttgaccatcccgtggcatgtcttctagttgtgtcatcaatggacaaagaaccagtcaataaatttgttgatctcttcaacacaaatcagttgccatctcttttgaatgaaggcataatggatccacagattttgaagcattatcttgtacttcatgaccagcaagaggggccacaagacatagctgtgaatgtcttagctgaaatgaggagtacccttggtctgaatgactgtaaattattatgcataaattcgtctacagaagcaggtggtagtaatgctgacaattcatggctaccttataaagctcttgttttgaacaatcatgatggatcctgtattcttagtgtggatgatctgaatgagataaaggacttcatgcaagattttgtttcaaaccatatcatcccctacatggaacaaaagatccgtgtcctcaatcagcaggtagccacaacaagaaagggttttagaaatcagatcaagaacttgtggtggagaaaaagagatgatgtcccagaagctccaaatgggccaatgtatacattcacctccatagaatcacagatcagagtacttggtgatttcgccttcatgttacgggactacgagcttgccttgtcaaactacagactactcgctactgattataagcttgataaggcttggaagcgatttgctggtgtacaggagatgagtggactttgctatttcattttggatcagtcgaggaaggacgcggagtattgcatggaaaatgccttcagtacatatttgagaattggatcttctggccagagaaatgctactagatgtggcctttggtgggctgaaatgcttaaaacaagaggacagtatagggaagcatctaatgtgtatttccgtgtttctaatgaggaaccttctttgcattctgctgtactgcttgagcaagccgcttgttgctatctattatgcaatccacccatgcttcggaaatacggatttcacctaatcttagctgggaatagctacttcgtgtctgatcagaaacaacatgctgttcgggtgtacagaaatgctttgttcgtttacaaacaaaacccttggagttacatcaacaatcatgtacactttaatattggaaggtggtatggagttctcgggatacttgacgtagccatcaagcacttgcttgaggtcattgcttgtagccatcagtcgctgactacacaaaacatgttcctcaatgattttttccattatgttcagagcatggggaagaaatttgatgtgtacaagctccaacttcctgtttttaacatgtcatctctcaaagttctacatgaggatcatcgcacttatgcatcacatgcagatgttggcgttagtgaaagcacgtggcaggagctggaggaagaattgatcccatcatcatcaattgtcaaaactaattggctggatactcagccaatgagaaaatacaaggactcctgtatttgtgtggctggagaagcagtaaaattgagtgttgaacttaaaaatcccctccaaattcctgttgctgtttctggcatctctattatatgccagctttccagcactttggatgcattaagttctgatgttagtggactggacttggatggtggggaagataaggttaacacagagccatctatttcaatgttggagactgatggagataagtttacattgtcaaagcttgacattgtattaggaggaggtgaaagtaaaagagtgcaacttgatgttactccaaaggttgaagaaaaaaatcaagaaagggaaaagaggcccacaccgttcttggaataacagcctggttgtaatcaagggtttaccaaaacttacaggatctattgatcgcatgcctacaaaagcgtttgctggtgatttaaagctgcttacactaaatctgagaaaccattccgaatatgctgtgaagggtataaaaatgaaacttagcaacccaagatttttaattcccggcgattcatcggacattggcctcaagttcccacactgcttaaagaggcacgtgcaatcagaaagcagtgttgtatcagccaaaactatgaaggacaatttcaagagtctgctctttgcatttcctcaggatatagaaattcaagcaggggcagcactctcttggcctatttggtttcatgcggcaactcctggaaatgtttctctttatatatctctgtattacgaaatggggagttccagtgatattaaataccgtacactacgcatgcacttcaatcttgaggttttgccgtcacttgacgtatccttttctgtaagcacgtcctcatcaagattgcaagagtatattgttcgcatggatgtcatgaacaagactccatcagagtcatttgtgcttcatcagttatcatgtgtcggtgataaatgggcagtttcagcattggcggcgtgcagttcaatcaactctgttgaaacagtatcagaaaatcaggctgtgtcgtacttcttcaaaattaaggattgtgaggcggattcttgtaaagaggcagaaagtgattcctgcacaagcgatatggctttgtgtccaggaagtagcactgatctgtttgacattgcacgatctccttttgttgattttcaccatcaagaaagatgcaggcaagtgaagatggcaaaggggccatgcagccttcttgattttgttctaatctcaaaggcagttgataactcttccaagcctactccagacttcgaactactttctcatcacacatgtcattgcagtgctctaagccagaaccctatatggtggcttatggaagggcctcggacaattagtcatgatttctcaaagtcttattgtgaggctaacctccaattggtcattcacaattcagaagctcataagattttggtgagagtggtcacttttgatgtaattccagagaaaaccgtccatcctcatgactcaaccagtgctcagggtggatggtatgatgtatcactggaaagtgacgtaaaggccatctctagttccaagagtacacatcaagagaagcgatcttcgaagagcattccaccatatgtttggtgttcattgagttgtgctcaaatcgagctccaacctgacagttgtgctagagttcctctaaaagtgtgcatatttgcaccgggcacatacaatttttccaattatgagctgcaatggaaagtgcatctatctgagggaccacatgtgggtgaaaatgagaaccggttatctggcggtggtctaggctatcctttctatgtcactgtccttcaaggtgtctaagtaattatcaggattcaagaagtaccttcttgagcgtcaatatagaccagtgcaaaactcaggaactacacccaattgcaacgggctgatgataataggtgccagccagtccagtttgtgcaaagatctgccccggaagttccctgactgaatatacttggatacgctcatggttctgcttcggtaccgatatatttacacgtcattttgaaggatgagttctggtgagtacatgtatacaattgtcgctgggaacaaaaactaacggtaattgctggtggatttttggcagacagaatataccgatagaagttttgcttgtctaattgttgatggtggctagtaggagcatatactattcctgtacatcctgtttaacttgtcgctgctagacgatttcgcaaatgtagtatgtagtggtagatggatccgataaattttctgtaattttgacgaggtaatcaggcaatcgtctcgagattgttgttgtatgggcgacagtattttttcattgtttgtacaatccttttaaaaatcatcgtctggccttgagcctttatgccatatgggtatatgttgattccccttttcagttcctcgtatcgacgtccagctgtccacatcaggtgcaagtgtctgaggggtgctgttatttttgatattttc

SEQ ID NO: 31174 - DNA, 1852 bp, Zea Mays
attcaagaattgttcggttacattttgcctgtttgctgtttttttcgtcggttcgcctcgtcttctccgcctggcccgagactcacactcaattcggtcgttttctgcattaacggagtcaggcccaggcctaacctcagtacatcagagcagccgaacacgcccgcggcaaccgccgccattctaccccaggtcggacggacccttgccggagacgagcacacgccacagcagagcagcgcgaagcgagagatccaatggcggcggcggaggggcagtgggtgctcatggcaacggggcggacgccgaccaacattgcggtgatcaagtactgggggaagcgggacgaggcgctcatcctccccatcaacgacagcatcagcgtaacgctcgaccccgaccatctctccgccaccaccactgtcgccgtcagcccctcattcccttccgaccgcatgtggctcaatggcaaggagatctcgctattaggaggaaggtttcagagctgcctcagagaaatcagaaagcgtgctcgtgactttgaggacaaggagaagggcgtcaagatcaagaaagaggactgggacaagttgcatgttcacatagcctcgtacaacaacttccccactgctgctggtttggcctcttcagctgctggccttgcctgtttcgttttcacccttggaaagctgatgaatgcgaaagaagattatggagaactttcttcaatagcaagggatctgggagtgcatgccgcagtatatatggtggttttgtgaaatggtgcatgggagaaaaagatgatggaagtgacagtattgccgtgcagcttgctgacgaaacacactggaatgatcttgtaattattattgcagtggtcagttcaaagcagaaggaaaccagtagcaccagtgggatgcgagatagtgttgaaacaagtcctctcttgcagtacagggcccagacagtggtgccaggtcgggtgttgaaaatggaagaagctatcaagaaccgtgactttgaatcctttgccaaattaacttgtgcggatagcaaccagtttcatgctgtatgcttagacacgagccctcctatcttctatatgaatgacacgtcacaccgaataattagccttgtggaaaaatggaaccactcagaaggaaccccacaggtcgcttacaccttcgatgctgggccaaacgctgttctaatcgcacaaaaccgtaaaactgcagcacatctcctccagaagctcctatactatttccctccacaggataatgatttgagcagctatctggttggcgataaatcgattctaggtgtcgccggattgcattccatgaaagacgtcgaggctcttccagcacctccagagacgaagataccggatcagaaattcaagggcgatgttagctacttcatctgcagcaggcttggcgctggtccaaaggttgtttctgacgaaggtcaagcattgatcgattcagtcaccggacttccaaaaggcgtgtagttctagatttaggttggaataatggtttaagctggggattaaagacaatggtatcatacaagcaacctgggccgggaagatacattaggctcgtgtcacgttggtttcgtgctgattgacttgacggtgtattggtcatgtattatgcatttgcgctggtgttcgttgctgtccaataaagatagaacacgttctcgccttttgtttttctccctcgcctagtatgtggctcaaatatttgtttcactattttattgagcacttcagctgagacaaaagcggagaataactttgtatggctgcttgtcacagtggatgaaaaaatctcgacccccc

SEQ ID NO: 31175 - DNA, 3909 bp, Zea Mays
cggagacctccacgcgacgcttcgtctctcctcacctgcactcgcgatttcaagaaccgactgtattttctatcctcgcactttctggaaccggatgggcagctacttttcgatggccggctagggttccacacaccaaccatgatgttcccctcaacctctgtcaacatttgagactggttcaactcgcttgtgtgccgaagttcccctgcggcggccgtcatcaccatggtctcccctcgtgtggctctggtcttatcgtggtgaccatcatgggtcgagaggagtgcgacgacctggggttcactgtctcacccttagctttagtgcaaagttccctcccagctcatcgcagaccaagcttttggatccccacgctcccccacccattcttctgtaatgcggtgttctccaagctcgggctgcaggtgtggtcgccatggttcaaaggcgacccgtgcgtcggcgcggccacggacggcacgtccatctacgccgacaaaatgaacccgggcatcaagtgcgactgctccgaccacaacaacaccatctgccacattaccgagctgaaaatgaacaaactggatgtggttggtcctatacctgaggagctgaggaacctcagccacttgacaactctgaatttacaacagaattacttaacagggcctttgccatcgttccttggagaattaactgctttgcagcagatgtcgctttctggcaatgcattatcaggaactattccaaaggagctggggaaccttgtgaatctcataatcctgagtttaggcacgaacaatttaactggctcccttccttctgaattgggtaacctggttaaactagagcatatgtacattgatagtgctggcttaagtggtcctataccatcatcattttcgaaacttacacgattgaaaacattgtatatccattagacacattttttcaatagtattgttctatgccactcaacgttatatgttattccactttttgtttaggtgcgcatcagataatgactttactgggaaaataccagattacattggaagctggagtaatttaacagatttgcggtttcaaggcaattcattccaaggtccacttccaagcactcttgctaatcttgttcagctaacaagcttacgaataggtgacattgtaactgggagttcttcgctggcattcatcagtaacatgacatctttgaacttattaattttaaggaattgcaggatatttggtactttggcattagtgaacttttcaaaatttacaggattaacattattgtaaggcatttcgtttcttccaaattttttgttaaatctgctttgtgcaagatgcttcctatggatatgcatcgcgagatgtttcctttcacacatattctcgtcttttacttacttatgcagggatttgagttttaataatatcataggtgaagtaccacaagctctactaaatatgaattcactcaccttgttatttcttgggaacaatagtcttacaggaggccttccaagctctataggaccttctattaagtacttagacttttcctacaactacctctcaggaaaccttccttcttgggctagtcataatttgcaattaaatttggtggcaaactacttcgtgatcaacaagtccaaagatagtgtcttacctgcggggctggagtgccttcagcgaaacacgtcatgctttcttggctctccacaatcttcctcctttactgtagactgtgggagtagtagatctgtatttgcttcagataattccatgtatcaacctgatgatgccaatcttggtgttgcatcatattatatttcaagcccaccaagatggggtgttagtaatgtcgggagattcatggatacatcaaacgggagttacatagtcaacagttcacgccggtttcagaataccctagattccaaacttttccaaacagcaaggatgtcagcatcaactttaagatactatggttttggacttgaaaatggggactacacagtcacacttcaatttggagaatttgactttgaagatttacaaacttggaagagcgttgggagaagggttttcgatatctatctccagggtgagcgtaaggagcagaactttaacataaagaaggcagcaaaagaagctggcgaagcaagcacatcgtacactgctgtcaagaaacaatatactgtacctgtcacaaaaaacatcctagaaattcatctcttttgggctggaaagggcacttgttgcatccctaatcaaggcgattatgggcctacaatatcagctttgagtgcaactctaaatacaaaaaagaagggtaataaaataggtgtaattattggagtcgtgattggtgcaacagttttaggactagcaatacttgctacactctgtgtgtggaggcacaaaaggagaaaagtatcactagagcagcaagagctctacaatattgttcgaatacctaatgtattctgttacacttatggtgaactaaggaccgctactgaaaattttagttctgctaatcttcttggtgaagggggatatggatcagtttataagggtaaattagttgatggcagtgtggtggcaattaaacaactatctgaaacatctcgccaagggaagaaggaattcgtagctgaaatagaaactatttcccgagtgcagcaccgtaatcttgtgaagttgtttggtttttgccttgagggaaataaaccacttttggtttatgagtacatggagagtggaagccttgataaagcattgtttggaaatggaagattgaacttgaattggtcaacacgatataaaatatgcttggggattgcaagaggcttagcttatctccacgaagagtctagcatccgcattgtgcatagggacataaaggccagcaatgtattacttgatgccactttgaaccctaagatttcggatttcgggctcgccaaactttatgacgataaaaagacacatgttagcacaaaagttgctggtacatttggctatctttcacctgagtacgccatgagaggtcacatgactgagaaagttgatatttttgcttttggtgtggtcatgttggagattattgctggaaggccgaactatgatggtaagcttgaccaagacatggcttatcttttagaatgggtctggcaactttacgaggaagaccatccgctggacattgcggatcccaagctcacagaattcgatagtgtcgagttgctccgtgccatccgcatcgccctcctctgcatccagagctcacctcgtcaaaggccatccatgtcgagagtggtgtcaatgctcacaggagacagcgaggcgcctgaggcagtgtccaagcctagctatgttgccgaatggcagagcaacactgaagggacgtcaagctcagtgtccacagcagaggctgtgtccgtggctccattcctaaaccccgttgtggacgatggccggtgatgatggccatcgctaagatcatcttatgtcaagcactcaagccacagattgttttcttggagatccacctttaaaggccccattatttaggttgaatgtggatgacagatttatgttgttgactggatgagatgtcctagggtttcctcacgttgtagaatacaactctcacaagtataagaatctaggaacatattccttcgatgtaacatacctcttttgtttaatctgttttgtaagagaaaccagaagaacaccttgtatttcggttgatattttgaaacccacagccaattgaatgctgggtgtgtaggcatatatatgaccaataggttgattgtaagctttactacaatagtggggcggtctcgaagtatattgccagatatgttgcagttcattttctaacacgag

SEQ ID NO: 31176 - DNA, 1695 bp, Zea Mays
cgcacccgacactaccggggggaataacccacgaggaccactccaccaggcagcaggcaccaacttcgcttgactcgcttcgccccaaacggcgatagccaaccgcgatcgatagatgttcaagcgcaccggcggcagtcgacgaagggtgagcccatgtactcaagcagcacgccgtagctgatctccccatcgccgattttcaggtcacccggtacgatccattcagacttcgtctctcttttctccccatctcgatctcgtcctatcatccctgcggcttacgccgacgtctacaccaatcaatggatgtcatctgcaatgatctgttctctttggcgtcattcgatcttccctggcttgttgaatccatcgacccatcacaggatgtcctttcacagatctggcttagacgcggactgtagacacgcaaatgtcagattaggaggcatcgttagatcctgtagtggccgtggttctttgcatagttgtgagttgtctcttcgctattgggatttgtggcctttttttaaatgatttgggacttcgacgtctgatgtttgtgaatgctaactggacgtcacattcgggatgctgagctgcctgtttgtggctggcttgcttagtctcatgggaggaacaaagatgcaactcatattggctcaccctcatgggaggaacaaagctgtacctcatattggtatgactgcttttagcattcactgtatggtgcagcaagagtattgtcattgagatgaagaaatgattagtatatcaaataatgattttgttgtcggacaaagaggagattgagatagtgtgtcgtgccatagagaggacagcgcagtgtggtctcctctcgatgcgcgaaatcgctaattggcatgctaatcaccttttctccatctcaatgccaaatgttcgaatggctggggattataatcctatatccacaatcgatgcgttgtgatgccatgtattcgaaatgtgatgttggcagtgccacaatctaaaaaaaaactccaaataaaggggaaactgcatctccccaaaatcctagggctcacaatgtcacttcattttctcttttctcactgaagcgggtgcagacgccatagttgttaaggcgtcgctgaccgtgtccaacagttcactcatatgtcacctaaaacactgttttatactgtacattgcgctgtttgcagagtggagtttgaatattaggatggggataggtaagctacttgagatagtaacctgctcgcctactcgtgtaccttaaggcgagtgggagagaggttgtcggcggctccagcggtactaaaaatagaggtgaggtagtatgtttatctactatactaagggggtgtttggtttctagggactaatgtttagtccctagattttattccattttagttccaaaattactaaatatagaaactaaaactttattttagtttctatatttagcaatttatacactaaaaatgaataaaatgaagggactaaacattagtctctagaaaccaaacacaccctaaagcacacaccagagcttcaacctttcggccaactgtgaattcatatatgccatctgttctccatttcttgtgagatatacgcggcactatatttgcagtaaatgcatgtcgaaacattaggtttcagcttttatatgacactagtccttag

SEQ ID NO: 31177 - DNA, 806 bp, Zea Mays
ccgtcagggacaggctgctggatgaggagtcctctcttggcaagctgatcagcagcagctgtgcaaagcaagccagataatatcttgcaaaggctgtgccagaggagcacaagaggtttctgcatgatttggtttggatacatgaagaggaaaatgtgccagttgatatggatggaggacaaatcatctgcaatctgattgctgtccatgctggcctagagaggaccatagatttgaatgagcaacttagagttttaagaactagagacacaagggtgccaaaggttcaaatgcttagtgggaggcaagatgtttgggacacacccaagggtctggccggcaagcagactattattgtaagtggccaccacgggaagctccacatcgacggcctccgatttataatcgacgaaggtggtggttatgaagacaaacctattgctgcgatagtttttccttcaaagacattgatcagaagtaccgaggaagcgggaaccacatcagagaggtgatctagagttctagacatcgtcaggagcagtgaacacggaggcacagttttttctctcttgaagttactgcttgtagtcatgtactcatgtcaaacgacaataggaataacgtccaaaggcaataagttggtgaaccggacctgcgttttctcaatttagtcactgatgactatatgtctatatatattgtaccttgatgctgtcaatttagacgagaccgtacatcctctttttttagggcaataaactttactccctgtcctcaaatatttgtacacaaagagtggtggtgag

SEQ ID NO: 31178 - DNA, 201 bp, Zea Mays
acaatatcctgaagccgactgttgaaagtatgacggtcgatgaacaatagcaatacgaggactacatgcgtcaagagaaggagaaattcttatcacaataaacggtggatcgccaccagaaagtagtcaaacgtggagagacgacgccgcatctcttctatctttgcttcaagtccccaacgtaagtaatcccgatgacat

SEQ ID NO: 31179 - DNA, 309 bp, Zea Mays
gggaggcgcgcacccgaccgcgatgaggctggggagccgcgccgccgcgacgggcatacgggccactgggacgccgagctgccgaggggccgggggggctgccggcctgtgacgagctgctggagccacgcccgcgcgcgctggggagccgctcctgcgcaccgccggggtcggggccgatcgcctggccgctaccggagggccgcgcccgcgcacaggccgggggacccgcgcccgcgccaccggggccgcggccacagccgccaccgcgcaccgcggatgcgcccgctgggccgtcgtgcccacgag

SEQ ID NO: 31180 - DNA, 3587 bp, Zea Mays
atcctagaagttgtctgggagttctacaaaacactcccttgctctaagcacaactgatggaccactacaaaacactcccttgctcgaatccgctaagcacaggcccaaaccgtccacttggaaactcgaagcccatcctgtctttcctttgcgtcagtcgtcttcgacgcaaggagaattgggaattcaggaatcaggatgcggctctccttcccccttgtcgccggcgccgtcgtcaactgaataactgaatcgaacagattctaggaacggttgaaatgatacgacatcttctgtgcatggatcggagtgatttctgggaatgttatatttgggccaccgcttcagaagtactgggcagagaagcagcagcaagaggcagcaaaagaaggccaagctggttcaacctgacaaaatgtcctccccttctgcagttacacggagaaatgtgtactcctcggtcctgaactagcatcggcttttgttagcattggttacatttagttgcccaagttttcggcgctggaagaagacaccgtgcaatgcacagaaagatttgaaaaacgtttaaatgctggttgatctcattctgaaatacagtacctttgatgaatgcaccgtgcaagacacggtggagacaccttcgaatgatttcaagcctcctttgaaatacctttgaagaagacaccgtgcaagacacggtattgtagtttgcatatctccgagtgcaggttgatttctgaaatagctagaagtcaggatcacagcgctgtatatcctactatcctagcctctttttcgtggcttccggatcttgctgggccgaccgttcgtctgagttctggcccaaattggcttttccggaatacggctcggccctctccagtacaacctccaccgctttctgaacacgaattagaaaaggacgcgatattgcagaagctcccgcccatttttcaccaatcaccagccctagccgcccattttccccatttttcaccaatcacaagaacctttgcgtcctccggcgaggcggcaaccgccggatccctgaacgtctgaatcctggagtgaaccccgcacaggatggcgaggaaagcgaaacccgccgcccaaggcaccgcggtcgtggctgccgccaccggcgtccagtactggctcttgaagacggagccgggcgagtggtcgtggtccgaccaggcgcgcgccccgggcggcgtcgcgccgtgggacggcgtccggaaccggcaggccatgagcagcctgcgcgccatgcggccgggcgaccgctgcctgttctaccactccggcgccggcgccgcctcccgccgcgtcgtcggcgtcgtcgaggtcgccaggccctggtacgagggcgagggcgaggaggcggtggccggtggcgccgtggacgtgcgggcggtcggggagttccggaaccccgtccctctgggtgtcatcaagaaggcggcgggcgaggtggaggggatgaaggacttcgcgctgctccggcaggcgcggctgtcggtgatgcccgtgccggcgaagatctgggactgggtttgcgacgcgggaggcggcctcgtgcaagacggcgagggtgaggacgaggaagaggaagaagaggcttgattccgcagaccagcaaatgtgaagaaggtacacggccctgattttgctgtgcaacagagaacttgatcagtgttgctacatctctatagtaaatctgtaagttatctgcttattctgacgtcttcttgtagaaccaagttgctcctgctggtgacatgagcagttgcaacttgcaaggcggcgttgtgtgggagtccttttggcctgcaagtgttttgctagctttgacaaggcactcctgtttcttcagtgttcgccgtctcggcgccgaagtgcccaagaaaaaaatgtatttactatttgatctactcctatgtaagttcagtggttcatgtagccaagtagcttggatatctatgaaggtactcgagctgttgcatgctgcggcagttttgcacacacacacgtcggctatacagccatccagattcagataggataggacccaatgaatgtgacccggaccctgacgcagagggctgggctgggctgtgctgggacttggagcagcggcagccggtagtgagctgtggcgcaagctctgcgttttatctgtttcgtcttcaattcgtcccatgttgcctgtcggcgacttgcttggggtcgtgactactttttctttctgccactgccacgacacgagccaatcccaccagatctgggcggagcattgaagtgccggcactcccaagtcctgcgggcaccgtcatcatctttctttgaattcctcgcagtaacaggtggatggacgctggagaaggacaaacgcgctggctaccaaagcacagctccggagcgtcaaattatactgagctcagctttgctgttttctacagcatctctctccgctgcctccctttctgaccggtggccccctagcctgcctgcgagatccccaacccccagcctctccctctcctcacgcgcctcttttaaatgcgcccccacccctacttaatagccgccctaaactcacaaggccatctcacagaccgacaacgccctaggcaagcagcaagcgcacacgtaaacgtacacctacctcggcgagcaaaagggaaaacgctgatcggagcaacgaagcccgcagccatgccgacggcgacggccacggccacggcagctcctcgccacgcggcgctcttcctgcccctgctgctgctcctgctcggcctccacgccacgtccgccgccgccgcgcgcgcgggcgtcgccgtggacgccgagctcacgtccaccaagccgtccccggtcccgaagaagcccagcgtgaagccgcccggccccggcgccgcgagcccgaccttcccgggcttcggcatccccgggatgggcgggttcggcatccccgggatgggcgccggcgggtggggcggcggctacggcgggcccgccggcgggtacgcccgcggcggcgtggtggcgcccaccgtgacgtgctccgagaaggggccctgctacaggaagaaggtcacctgccccaagaagtgcttctcctcgtacagcggcgccggcaaggggtacggcggcggcggcggcggcggcagctgcaccgtcgactgcaaggtcaagtgcacggcctactgttgattcgactcgtccgctgctggcgcgtagcggtttggcagtgggcggtgctagtggctggcggtggcggcctgctagctgctgttggtgtgatggcgcgtgtgcgtgtcggtgagctgagtaccgggtggttaacttgtgttatcatccccaatagtatactagcgtacttctcgttctggggactatttatacgtagaccacgatatgcgtaggggcggtttatttctaagataagaatataagatgctctgtttatggtgtttattagtgttataatcatcaaagttgtgttcctgctttggttaagtgataagacgtgcttgtgaaatccagtatgcataaataaagagctatattgtaagtataca

SEQ ID NO: 31181 - DNA, 2565 bp, Zea Mays
atgggcgtccacaatcgcgtggtgcacgttctgccgctctgctcacgcccgcggccgaacctcccccgcatcccgcagccgccgacgctcaccttccatcctccgcgcagccactcatcccgcagccgcgatccccgcggcgctcaccttccatcccgcagcgcgcaccttcatcctccgccttccatcctccgcacagccactcatcccgcagccgcgatccccgcggcgctcaccttccatcccgcggcgcgcaccttcatcctccgcgaccgctcgcggatctctcatcgacgtcgatgctccgcgattaaggggatccgaggccaacaaacagcatggcgctccccgcggcgggcgggcgaggaggcatgcgcggatactcggcaggatgctccggcggaagcggagccacctccccgtcggccgcccgtgttctacagctccgtgttcgcgcagatcgaagagatcgggtggaagcaactggtgagcgccacaggagagggagtgtcctgtactcctgtctcaccttccgtgtcgtgtaaggattcatgttgctgccagtcggcactaacctctttctatatgtttatattgtacgaatgtttggagaaaaaaactactgccgttcaggtggttgagcaacgctggcgcattacatactaaattttgtcagtttgatagttgtttgaaaaggttatttcagaaacctgtctttgtccgaatgcaagagagagaacagacagagcgaatcttccattgatcatcagcacacgacatgaatttttttcttatcaatttccaccaatctttgtagggtaaaaacatctctggagatgctctaacatcccattctgtctctctgctattgtctttaagcgccaaaacttattgttcatttgatctcttttcatgtacacaaactcagcacggagctcaagctttgtttttttactactactactactatcctgtactacagtagtatgaagtatcgtatcatactcatgctctgtatttatatttgctagattctggctatgcgccatcctaggaaactcgtattagcaggctgtttaactgcactaagagtcatgacagctgtatcgacttctctaggttgggttgcaccaaatctgagctgtcatgacaaaaatcatgatgcaatacaagcagaatatgcttcctgaaagataaagtaatcacaaagttgaggcagataaaatggttgagcaaaccaatcaatctgaagttagctttgtgaaggctgagcatctaaatggaggatgtctgcattgatgaaggagttcttcctgatcaaaagatttcatcagaaaagcaagtagaccaaaaagtgtctataaactttgattccagggaagagataagtgctgactctacaaaaactgcacatgagttgaaatcggaaatagttgtcctacctgtcaagtgtgatactcatgacaatattgtggaacagaactcctcatgcaaaaagcgtgatcttgaagataacaatactacagatgtatctaccgagtctaatgatgagggattaaatcccaaacaattaccatttcatgaagttgcacaagattaccagaaggttgatagtgtcatttcggagagcaatgaaaatcaggactggcttttcactggagatgcaacccatcagggacttgagaaatatgttatgacaaagttgtttaatcgagtattcgcatcagtcctagaagatgtgaagagtgatgaagaacttttttagaattaacttgtacgagaatgaaacatcctgtctggtatgagaattaacttccctcgtttttggcattttttgcttgatgtattgcatctctggcaagctgcacacatgaataggtttctggcagaaactgaaccaggattgaattgtacttgtgtcttgcgttgggttggtcttttggatctttctatgtattatgtctatactttgtagactactggccagccactccattcacgtattactcttccattgtgagtttttgctcttcactttcttatcactcacagtcactcagcttctcacatttccacacaagtagtagttaaggacacatttagtttcgaaggacagtgaactttgtatgattcattgtgaatctgctgatcttcaaattggacaacaaatgtatactccttcctattagaggtggtattgtgacaggagatgtcctcagcgtcccattccacagcgtctacggacttctggaggaggctcgccatagtagcagttctcttcctcccaatggattggttaatttggagctggtcacaaccaacaggctacaataatacgatgggcggatccaacaatgtaatggtgtaatgggcttggtcatatgcttggaggttaagaaattgacttgctggaccaatgtaaccgtatggctgatataattaatttcgtaaaccttctggatgaataaatgatctagcatcagtggcattgtcgtaattaagttaccttatctatctaaacctaaattacgaacctgaaataacactcattaccatataggattg

SEQ ID NO: 31182 - DNA, 1678 bp, Zea Mays
ggcgtccacacacctgacgttctgcctcccacagtcccacccgacatcctcgcccagaacgcgtcgctaatctcgcgatcgcgcctcggccgttccgcgcctgcctgccgccgcccgcgattgtagctcaccccgacaccgtgccccctctcccctggcgtgatgcccgcctcccacccccttctccgcaccgcacggatctagcgcgggaactgctcagccacggctccgcacaccctcccttcccatgatacggagctgtcctatcctgctcgcgaggcaacgaaagggtacgtgatcctctgtctacatggaaggtgaggcagatcggggggagagtggctcgtggcagtcgcctcgatggcgtccttcgcgccgtccggcgaggtgtcgtccaagcacggcgtcgtcggctacgggatcgtgggtgggcccaacggcaacgccgtcgcgcccgctgccaagtccaccgtcgtcgagaccaccatcgagagggttatcttcgatttttggttcctggcgctcctccccgccgctcgggaaccactccaccgctgagaccgtcgtaacgatcggctccgttgtggcccgcctgtgaccccgtatccgcttgcgctcagctagggttcagatctaaaaatggctgatgacggtgcgaggaggggaatgcccgctgaaggctgaagctgcccccacgggctacagtaggtgccatcgctcgccacaccgaacaccccactgccctccagaccgtgctccagggccctacggcgataggaggccactgaggatggatcagtgcggtactgctgccttccggaggacgccgagcgccggagagggggctcttctattggacttggagcaagcccacggcaacaacgccggaagcaaaatggcctcttctctagaaggacatgagttcgatccaccgtaaggaggcgtgcccgccaggctccatcttcggatctgatcgcccaccaagtgggttgagttcgataaatgaagtcagcaaggaatacttcttaaaaactgtaagtaatattgttggtgataaattgcttaagcaagctgcttcacaatatcaaatgcaggcacaacgaagccctcagacaaacccaagcaactattctttatcaggtcaagtttctggtcagcagactgctcccagtggttctgtgacaggagatgaacagaagggatatccatgggcgcacaccatccctatgagacaagctattgccagcactcgaccacctcaatttcggccttcctcgtctggccaaatgcggagtaatacggcatcacgtgcagcgaccacaaacatcttcaccagtgtttggggcaaatagtattcatgcacgtccatttctgcggccagttggaggtccagctgcaccatttagaccacaaatggcagattccaatccaagagcacacttgattcagggagctgtgaccacaatatctaggagtgtgccaaaacgatccatagtgtctggaaatgcgccagtcaatcaagccttgggatcttcaaaagtcagtgctggcatggaaagccagtcacaacaattgagtgcgcctaagcctttagctgcaacaagcttaagtcagactcaatctcatggcattcaagaagagcctaaaattcaggaatatatgaggtcttggagttgag

SEQ ID NO: 31183 - DNA, 4910 bp, Zea Mays
ggaaatcctaacaaatcaaacaccccaccatccttcccgagtcgtcctctccattttcccctcccgattcgccccgtcttcccaagccctacgccagcgacaaaaccctaaccggtgggatggcgacgcagccgccctctaccgccactgccgcggttgacctctatgagacggcctcgcagccggacgcccccgccgccggcgacgcctacacttttctcgagttcaacacgcagggggacgacttcgactaccccgacttcccggagctctctcaaccacctccccgatccacgccgctgacgtcctccatccccggcgccggcacgtcgtcctcgtcgtggcctgccccaccgcctccgccgtccgacgcggcctccccggaacccgatctcacgtctcaagacgtccacaccccgccggcctcctcctcctcgccgtcgccgcgttccgcctccaaggcgcgtccgtcggctgcggcggatgggctcgcctccggggttgtcgcacttaacttcgaggatcctgtaggaaccggcgccgtggaggacgggtacgactacagcaagggagacttcgtggaacacgcatgccggtactgcgggatccacaaccctgcgtgcgtggcgaggtgcaacgtaccctcctgccgcaagtggttctgtaactcgcgggggaacacttcaggctcccacattgtcaaccacctggttagggcaaagcataaggaagtatgccttcacaaggatagccctttaggagaaacaattctcgaatgctacaactgtggttgtcggaatgtatttcttcttgggtttatctcagcaaaggcggagaatgttgtcgttcttttatgcagagaaccatgtttaagtgttaatgcactgaaggatatgaattgggatctcagtcagtggtgccctcttatcgacgacaggtgttttttgtcgtggcttgtaaaggtaccttcagagcaggagcagctaagagctcgccaaattagtgctcaacaaatcaacaaagtggaagagctctggaagacaaatcctgatgcatctcttgaagatcttgaaaagcccggtgtagatgatgaacctcagccagttgttttgaagtatgaagatgcttaccagtaccaaaatgtttttgcaccactgataaagcttgaggctgattatgacaagatgatgaaagagtcacagagcaaggataatgtaactgtccggtgggatattgggttgaacaagaagcgtgtagcttactttgtctttccaaaggaagacaatgagttgaggcttgtgcctggagatgaactacgcctgagatatcctggtgatagctcacatcccacatggcaatctgtcggacatgtgattaagctcactgcacaagaggaggtggcacttgagcttcgcgctagtcagggggtgcctactgagctaaatgttggattcagtgtggattttgtttggaagagtaccagttttgataggatgcaaggagcgatgaaaacttttgctgtggacgagacaagtgtcagtggatacatataccatcaccttttgggacatgaagttgagcatcaaataatacgtaataccctaccaagacgctttggtgcacctggacttccagaactaaatgcttcccaggttttagcagttaaaagtgtcctgcagaagccagttagtttgattcaaggtccacctggcactggaaaaactgtcacatctgctgcaattgtgtatcacatggcaaaacaaggtcaaggacaggttcttgtatgtgccccaagtaatgttgctgttgatcagctggcagagaagataagctcaactggtctgaaggttgttagactgtgtgcaaaatctagagaagctgtttcgtctcctgttgagcatctcacacttcattatcaggttaggcaccttgatacttctgagaagagtgaattgcacaagctacaacaactgaaagatgaacaaggtgaattgtccagcagtgatgagaagaaatacaaggcactaaagcgtgccactgaaagagagatactgcagagtgccgatgtcatttgttgcacctgtgttggtgctggagatcctcgtctttcaaacttccgtttccgacaagttcttattgatgagtccacacaggctacagagccggaatgtcttattcctttagtgcttggtgtcaagcaggttgtccttgtcggtgatcattgtcaactgggtccagtcatcatgtgcaaaaaagcagcccgtgcagggttagcacaatctctctttgaacgccttgttatccttggagtgaagccattcaggctacaggtccagtatagaatgcatccttgcctctcggagttcccatccaactgcttctatgaaggcacactgcaaaatggagtgactgttaatgagaggcaatcgtctggaattgattttccttggcctgttccaaatcggcctatgttcttctatgtgcagatgggacaagaagagatcagtgctagtgggacatcctatctcaatagaactgaagctgcaaatgttgaaaaaattgtaacaacatttttaagaagtggtgttgtaccaagccagattggagttatcacaccttatgaaggacagagggcttacatcgtaaattacatggcaaggaatggctctcttcgccaacaactttacaaagaaatcgaggttgctagtgtagactcatttcagggtagagagaaagactacattattctatcttgtgttagaagcaatgagcaccagggaatcgggtttctcaatgatccgcgcaggttaaatgttgcgctaactcgtgcacgttatggcatagttattcttggtaatccaaaagtactaagcaagcagccactttggaatagcttgttgacacattacaaggagcatgagtgcttggtagaaggacctctgaacaacttaaagcagagtatggtgcaatttcagaagccaaaaaagatatataatgaccggagattgttcctgggcggtggtcaaggtgttatgcatggaactaactttggggctggggcctcaagccaagcagcagataagagaagtggcagagggaaaggtacgtacactttacatgttcatgttgtacttgttttacatatatagttactgttcattcctgactccctgctcaaaagaaggacaatcgtttgctccttatggccctccaaatggggtgcataagcctggtgtgcacccggttggctatgctgtaccacgtatgccttttcctccatttcctggggctccacattctcaaccatacgcaattccaacccggggtttgcatgggccccttggagctgttccaccggtgcatcaacctggaagtagaaactttgggtcagctcgttcaaatactggtgggcctattggtggccaccttgctcatcaacagaactcccagcaagctatggggagcattgggtcaaattttaactacactggaatggagaatccaagtagtcagccttctggtggagcacaaatgtcccaaactggattaatgacccaggtgcctgtccaaggactaagtcaaacattccgtgatggtttttctattggtgggatgtcacaggacttctttgtagacgattttaagagccaagggtcacatgtgccatacaatattgctgaattttctacccaggcttctcaaggtggttatggtgttgagtttactcaagcgccccaatctggatactctgggaattatatgaaccaaaattcacatcctggatactcccatattggtacaacaaatgacattgtatctcaggatcacatggcccatggatctcatgggatgtttacacaagcgggatataatgatccctcacaagatgagtcgtctcagattcattatggaatggctgccgctggccctctacagtcgcagtctcttcaacctccgccccagtgataatgaaagcttgtgataggatgaagccaaattttggaagtttggtgggttgcatcttttggcccacatgtgcacttctccgctgtttcagactcgatggtgcatagacatcagatgcaagcaatgaaggcacactatgtattggctatttatcggggcaggcttgactgaggggcacaaggattgcaacgtatcattgatcgttgtagttcactgcccactttggccacaggagaggtcatatcatcgagaggttgacggcactaccctcatccctcacctgtatagaaaggcaatcggggccaatagtggtacgatgtgaatattccaggatttgctgccattcagaaagtcaagttgcagcaactgcatgcctccatggtaccatgaagacacgcccgtagagtggctttgtatagaggtgctataggcgaggtggacaaccctttcggatatcgcacatggcaagatatttacattgacattttgtatgcacctgatatggttttgatatttatgccacaaatcatttaggtggtgatgcaagtagtttgttgtgattggaaatttgggagtgttcgtgaaagcaagtttgatcctgaaatcttatgggggaatggttgagtgggggttattttgttgtgaaacaggtgtctttgaaaagaaacctttccaggagtgatttcatcaagattgattgttagaatagacattagtaactgttataaatggttaacatggtcaccaaagcggtacgtctagttaacatggccacaaagacattaatcaactttgagacgaatgacaggacctaaaggggcatgttctttggcaaagtagaagtggtcgtctcgcagttttatagcaagacggccattgacttatggttccaccactcccaccccttcccatctttggtagattttctatcatatctcatattt

SEQ ID NO: 31184 - DNA, 2673 bp, Zea Mays
ttttttttacaacttctccctctcagtttactgttgaaaaggcaaacaaaatcacttagccgcgctgcctctgtgtctgtcttttcgtttaattagggtttccggatctgctctgcgtcgccgccgaccaacctccaccgcgcgacgccatggacttcgacgagtacgagtatctggagaagacggtggaagcgttcgcagcgccggccaacggttcgtcgccgcccgggtcggggtacaaggacaaggagcgcagctcacgccgccgctcaacgggcggtgacgaagagcgcgacaacgtagaacgcagatcgaagcgttctcgccccgaggaaggccgcgaccgcgatagagagcggcacaggtaccgcgacggcgaccggcaccgcagcagtcgggagcggcgggaccgtgaccgtgacgtcaaggagaaagagcagggcagggagaacgacaaggacaggaggagccgcgaccgcgaacgggagaaggaggagagggagaaggataggcagcggaggagtcggagccggtccgagcggcgccgtgatgacgaagagcgtgatcgctaccgtgaacgcgatgtcagacgtaggaaagaggaagttgctgaacctgaagttgatccagaaagagatcagaggactgtgtttgcttaccagttatctttgaaggcagatgaaagagatgtatatgagttcttttctagggctggaaaggtccgggatgttcgcctgattatggatcgaaattcacgacgttctaaaggtgtcgggaatatttgtaatatggtgtacctgctgggatactcagcaacttattaagatggaaaacaagatcatattggtatattgaattctatgatgctatgtctgttccaatggcgatagctctttctggtcagttgcttcttggtcaacaagtgatggttaagccttcagaggctgaaaagaatttagttcagtcaaatgcttcaagtggagctgcttcaggtggagcaaggaagttgtatgttggaaatcttcactcaaacattaatgaagaccagttgcgacaggtctttgaaccatttggacaagtggagcttgttcagttgccattagatccgctcagtgggctatgcaaaggttttggttttgtgcagtttgcacgtcttgaagatgcaaaagcggcccagagtttgaatgggcaacttgagattgctggaagagtaatcaaggtttcagctgtgacagaccaagcaggcatgcaagttagtggagctacgggagatttggatgatgaagaagctggaggcttggcactgaatgccagttccagagctcttctaatgcagaaattggaccgcagcggcattacgaccaggattcaaccaccactacagcaacactgtttccatatatatctagcttatcaaggtcgttctccatggacctcctccagttctttggtgtaaagtggtttggctgaaatattttgtttactgcagttctagtatttagtgccagttgcattgattgcaaatttcaggatggcgaattgatgatgtttgaaagtggacataagagaggaatcttgttacaatgcccttaccattttgatgcagatttcaatgattggctccataagaaacttgagttaaattttgttatagtagatgtacccttttatgtgtagcttactcactggacacgccaaccttttgtgttcctgcagtttgactggtgggacgggcattgctggtttgactactccagtggcaataccaactgtatctgtccttggtgctgccccagctgcagcccctcttctgcaccctacagtgcctggtcttgcaattcccggggcaactcttccaattactaccccatctattgatttggctccacctagtcaatgcctattgctcaagaatatgtttgatccagctttggagacagatcctgatttcgatttggacatcagagatgatgttcaggaggaatgttccaagtttggtcaattaaaacatatttttgtagacaaacattcaatgggtgcctgaagacagagtcacgctattcacttctgatgggctgatccagattgggggttccttggttcctcgtcgagtttctgcttctgagaagaggcaacggaaactgaagagtggacaaaagttgcgccggtttcaggagagctcttacatggatccaaatcaaagtctttgccttggagcactatttaacatagcagcaacaaatggcctagacatgggcagaagattatgcatctttggcttttgccgttctattgaaatgttaagcgatgtagtggaagatacggtattggagcatggcggtgaggttgtcactgcagagaaggcaagcagtaacggcctccaggagaagctaaccatgtctgttgcagtaccattgctgtggggcgttcctccagcatcagagaccctccatgtcgcggtgcggagcggtggaggtattgtcgataagatctattggcagtgggacttattctagatgtccagcattaacaaaattggttccaagatgtatatgtctctctaattttctgcacgcgttgtgcagcaactgtaaacttagtctctacctgtacagacccggtcacccttgtgcatatatataaaagaactttgggatcacaacttaaccggag

SEQ ID NO: 31185 - DNA, 2588 bp, Zea Mays
aataacccagaaataaaaatcgccgtggaggcgagtcgccgccggcaccgcccggcacggccttcttctccggcgaaggcggagctcgttacggggattccacatccgttaatcggtcccaccggatccctcgccgcctcccacgggccgggccgcgccgtggcgcgcgcgcaggccgagatgcggaagaggatggagagcgacgacgatctgatcgaggaggcaaaactgcgcaccgtctggtacaagggcgacgcggaccgcgcaccgagcagcagcagcaagagctgggcgcagcaggcggaggaggcctacaacctccagctcgccctcgcgctccgcctctgctccgaggcctccgccgctgcggaccccaacttcctcgactcctccatcgctgccgccgaccacctccagcccattgcatcgcctcaatccctctcccaccgcttctgggtcaatggctgcttgtcctactccgacaaggtctcggatggtttctacttcatccaggggatggatcccttcatatggacgctctgcaacgatttgcacgacggaggccgcgtccccactattgagtccctcaaggctgtcaatcccaccgattctgccatcgaggtggtcatcgtagataaagtggcggactatgacctgaggcagctgataagcatggccattgacgtttctctgaaccgtaccgactccaaggagatcgccactcgactcgctgccgttgtgtccacgaagatggggggatcggtagcagctaccgaggaacacgagttgggtccccggtggagagactctgttgggttcctgaagattagctcagggtctgttgtacttcccatcggaaagttatcagttggcttttgttgccaccgagcattactgttcaagaccctggcggattccatcaatctgccctgtcgcattgtgaagggatgcaagtactgcaaagctggtgctgccacttcttgcttggtgcgctttggtcatgacagggaatgtctaattgatttaattgggaacccgggattcttatctgaacctgactccctcttgaatggactatcatccatctctgtttcttcaccattgcgcccaccaaaacatgactcagctgataattctgataatttcaagttgtttgccaagaaatatttccttgattgtcagtcgttaaatctcatgttcagtgatccagcagctggaacggttatcgacttagatgaggttatgggatcaaatctaggtctaaactcatcacatgcaacaaacagtgattgtcaagctacctttactcatcttaaggctggtactcgacgcagtagtcaagatgggagttttataatgcagaggagttcccaagaggatactcaatctggactaagtgatccctttagcgatatgtcccttgagatagaagacttgattatcccatggagtgagcttgttctgaaagagaaaattggtgcaggttcttttggtactgtgcaccgtgcggattggaatggttcggatgtcgcagtaaaaattctaatggagcaggacttccatccagagcgtctcaaagaatttttgagagaggttgcaattatgagaagtttgcgacatccgaacattgttcttcttatgggtgctgtcactcagccacctaacctttcaattgtgactgaatacctatcaagaggtagcttatacagacttttacacaggcatgctgcaagggaaaatctggaggagcgccgccgcttgagtatggctttcgacgtggcaaaagggatgaactatcttcataagcgtaatcctccaatagtccaccgggatcttaagtcaccaaacctgttggttgacaaaaagtacactgtgaaagtctgtgactttggtctctccagattgaaggcaaacacatttctgtcttccaagactgcagcagggactcctgagtggatggcaccagaagttctacgagacgagccctcaaatgagaagtctgatgtttacagcttcggtgtaatcttatgggagcttatgacattgcagcagccatggagtaatttaaatccagctcaggtcgttgcagcggttggtttcaagggacaaaggcttgagatcccaagcagcgttgatccgaaagtggcggcagtaatcgagtcctgctgggtcagggagccctggagacgaccctcttttgccagtatcatggaatccctgaaacttctcatcaagacattaccacccaatcagctcctcgaagaaaattagttaccacccaagcaacttgcaaattatgtcacctctagagttttctcgatttgtttagatccgatatgcgccaggcctctcaaaccattcgtcttcggcgccacgtattccctgatgagaaatattcaaaactacacctgtcacaaaaggggaaaaactatggttggacaataagattcatgaaaaaaatatgtgatccaaattaagtgtacatctcttttatcaaggaaccaaatgtaagttggtcaaatatatacatataagtactaatatttatggaatatatacttttacaataaaattattaaagatataaa

SEQ ID NO: 31186 - DNA, 2512 bp, Zea Mays
accgtgtgccattcgtgacagcgacagactttcgtgtttgtgtgtctcttcggctcgcaatcccattggtcgcttcatgccgctcacgaactcccctccgagcccggccgtccaattatgatccacttggttaactagcataattaatcgcagatgaagcagcagttcatgaaggcaggaagcagctaaatcacccatataaatggtcgcgcgcgctagcatagcatagtagcgatagccaccaccgatcgaagcatgatggcggcgtcgggcgcgtacgcggcgcaactcccggcggtgccggagtggctgaacaagggcgacaacgcgtggcagctgacggcggcgacgctggtgggcatccagtcgatgccggggctggtggtgctgtacggcagcatcgtgaagaagaagtgggcggtgaactcggcgttcatggcgctgtacgcctacgcgtcgtcgctgctggtgtgggtgctggcggggttccgcatggcgttcggggagcggctgctcccgttctggggcaaggccggggtggcgctctcccagggctacctggtccggcgcgcctcgctctcggcgaccgcgcacggggccacgccccgcaccgagcccctgtacccggaggcgacgctggtgctgttccagttcgagttcgccgccatcacgctggtgctcctggccggctccgtgcttggccgcatgaacatcaaggcctggatggccttcaccccgctctggctcctcttctcctacaccgtcggcgccttcagcatctggggcggcggcttcctctaccactggggcgtcatcgactactccggcggatacgtcatccacctctcctccggcatcgccggcttcaccgccgcatactgggtgggcccgaggctgaagagcgaccgggagcgcttctccccgaacaacatcctgctgatgatcgcgggcggcgggctgctgtggatgggctgggccgggttcaacggcggcgcgccctacgccgccaacatcgcggcgtccgtggccgtgctcaacaccaacgtctccgccgccaccagcctcctcacctggacctgcctcgacgtcatcttcttcggcaagccgtccgtgatcggcgccgtgcagggcatgatgacggggctcgtctgcatcacccccggagcaggtaaaaaagaaccaccggtctccccctcccgtacggcctttaattttccctctccgtaccgtacgtcccagaaacttaatattttcatttcacgggtcgcgtcctctgccccgtgtgtgatgactgatgagacgacattctgctgctgattgggcttcttcaccagccgtctgggtgggttgttgttggagcatccggcatttggctgtacctgtattatgcctgaatcaggctttgtttcaacgtcaagcgatcagaacggatcaggaaaaaaaaaagaaattaatgcagagtcaaaagaggacggtggaaaaaaacgggcaaccggcagccaatcgcgggcatgtcaggctggaacgaaagcgaagtccgtatagcgtcacgacgtaacagcctaacaggggttctgaatctgttctgagtgcggctgctacagtaacgagcgttgttataaaccagttggtgtaggaagattagtggcaccacgtagtagtagcggtcaacggtgtaccactgggaaattgttctctctgggatctgtaattttttcccccttcctgtgcgcgcatgtcatgtgcagggctggtgcagacctgggcggcggtgatcatgggcgtgttcgcgggcagcgtgccgtggttcaccatgatgatcctgcacaagaaggtggcgctgctgacgagggtggacgacacgctgggcgtcttccacacgcacgccgtcgcgggcctgctgggcggcgtcctcacggggctgctggccacgccggagctgctggagatcgagtcccccgtgccgggcctccgcggcgcgttctacggcggagggatccgccaggtcggcaagcagctggcgggggccgccttcgtggtggcgtggaacgtcgtggtcacgtcgctcatcctgctggccatcggcctgctggtgcccctgcggatgcccgaggaccagctcatgatcggcgacgacgccgcgcacggggaggaggcctacgcgctctggggcgacggggagaagttcgatgccaccaggcacgacgcggtcagggtcgccggcgtcatggatagagaagggtccgcggagcagcggctatcagggggcgtcaccattcagctgtaggcgcacgcccgacggtccataagacacgactttttagcggacatttttttttcatgggagaagagcagtgttttaggctttttattattagcatgaaaggttgtccatgtatcatatttggcccagagcacgtagtctctgctagtttataaagaaattaggtcatgtatttttcctcttaatctagtctacccgcaacatgtactaacaccgttccgttatgca

SEQ ID NO: 31187 - DNA, 1545 bp, Zea Mays
aggagcccactcttgggcatacctcagttccaaaaagctcgcaacagccagccctaggtctgaactctctcggacgggtgacaggctgacagccgccgcccgccagctttggagagccacggtgacaggccgccagcagccatcgacggccctccctccacctcgccgtcgtccctcttcccccatctcgccgagccatcgtccctccacagcaggaccacctcaccgagccgtcgtccctccacagcaggagtgcaggaccgcatcgccgagtcgtcgtctctccacaccaggttcgccgtcgcggcgcggctacctcgctccggctcccagctcgtccggtccagctcactcgcggtcgcgaccatctccgtccacctcatccctccggcaagcagttgctaaactcatccagggtcagcagatcagcagctcttgccttatcccgctggctggccgcagcaccggtggtgtggtggaggatggcatcgaaatacgtggccagggtaccgtctccatggtgggcgccacaacgtcgtttggttggttcatgggtttccgtctgctcggtaaaatgcggtgcattgggaggacgggatgttgtgtgcgctgctgttagcttcagaccatgcatcgacattcacaaggggaaagttaagcagattgttggttctactcttcgggattcatccaatgatggcatggaacttgtgacaaactttgaatcagacaaatctcctgcagaatttgcaaaatcatataaagaagatgaacttcttggaggacatgttataatgcttggctcagatcctgcaagccaggctgctgcactcgaggcactacatgcatatcctggtggcttgcaagttggaggtggaataaatttgcagaatgcaatgtcttaccttaatgaaggggccagtcatgtgatagtgacctcttatgtgcttagcgatggcaagatgaacattgaaaggctgacaaaacttgtcgagctggttgggaaacagaggcttgtgctggaccttagctgtcgaaaaaaggatggcagatatactattgtaactgacaggtggcagaagttcagtgatgtgtttgtggatgaaccggcattagaatatctcgctgccttcgcagatgagtttttggttcatggtgttgatgtggagggcaaaaggttagggattgatgaggaacttgtggaactattggggcatcattcaccaatcccagtaacttatgctgggggtgtgtcaacaatggatgacctagagaggataaagaaggcaggcaaaagtcgagtagatgtaactgttgggagtgctctagatatatttggaggagatttaccctacaaagatgttgtcctttggcacaagaagcaaagtatggttggccaagtgtcaaggaacatgtggtagcgatcagtattgccagaatttattgtgtatcgctcgctaaaagcatatttattttcattacaaaacttcattgtgcgtttgaattactgagctttcttttgcttttgcttttggttgtttagac

SEQ ID NO: 31188 - DNA, 410 bp, Zea Mays
gcggaggccaagtcgggtcccgaggtgtctagggtgatttctagcaggaggtcgttgcggacaacgtgaaaggaggaggaacaacaccgtgcacttgatgaagcttgagatggtcgtgcttcttattcaggccttggagaaggttgaggacgtgagcacgatcggaaacatccttgccgaggttgtgcagggtgttggccatgttcttcatcttgcgacagtagttgttgacattgagctcgccttgctggaagacctggaactaggcgtcgaggtggagaacacaagtctagtgtgttgctgaggaactgggactcgatggtgagccatgcatggtgtgccgtcttcctgagctcgcggacgatctcctgaagctcgacggtgacagtgccgaagaggcaggacatgac

SEQ ID NO: 31189 - DNA, 1782 bp, Zea Mays
gttttgttctgcaagttggcccaggtttcataactgaccatgagagggcattggaagaactttttagtgaaaatgcagaaggatctcacaagtataatgcttgtctgaacacaatggctactcgtatatccacagtatttgcatcaatgagggaattccctcgtgtacactaccgtattgccaagacgattgatgcttctacaatgacaacactacgagacttagtccccacaaagcttgctgccagtgtatggaattgtcttgcgaaatataaaacgacaatacctgaatttcctcaaacagaaacttgtgagctacttatagtagaccgttcaatagatcagattgcaccaattattcatgaatggacttatgatgctatgtgtcatgatctgctttgtatggatggcaacaagtatgttcatgaggttccaactaaaaatgggtcggcaactgaaaaaaaggaggtcctgttggaggatcatgaccctgtctggcttgagcttaggcatgcacatatagcagatgcaagtgagaggctacatgataagatgaccaacttcatttcaaagaacaaagctgcacaattgcatcaagcacgaaccgatggagaattatcgacaagagatttacaaaaaatggttcaggctcttccacagtacagtgatcaaattgataagctttccctgcatgttgagattgcaggaaaactcaataacataataagggaacaatgtcttcgggatgttggacagctagagcaagatcttgtgtttggcgatgctggaaccaaagaactaatcaactttttgagaacacaattggttgtaagtcgtgaaaataaattacgcttgctgatgatttatgcagcacttaacccagagaagtttgaaagcgacaagggtgcaaaattaatgcagttggcaggattatctgctgatgacatgattgctgtaaataatatgcgttgcttatgtgggcctgataccaaaaagtcttcagtagggggttttacactgaaatttgatgttcacaagaagaaacacacaaatcgaaaagagcgaacaggggaagaatcaacatgggcactctctcgattttaccctattttggagcaattgattgaaaatcttagcaaaggtgagctgccaaaagatgaatataactgtatgaatgaccctagtcctactgttcatggactgccaaccagtagctctgcccgaacaagccccgctcactcaatgcgatccagacgaacaggtggcacatgggcaagacctcgtggctctgatgatggatattcaagtgattctgtgttgaagcatgcctccagtgacttcaggaaacttggtcagcgtatatttgtttttgtaataggcggtgctactcgatcagagttacgtgctgcacacaagctttcatccaagctgaagcgagacatcatccttggttcatctagccttgatgatcctccccagttcatcacaaaattaaagttgatgtcagtagaagaattgacacttgatgaccttcagctgtaaatggtgtccgcccacacggagtgtaaccttttattttctctgttctgtcagctcttatttgtgggggcctgtcatattcattcggtgaaatgcattcttaataccacttttactggtgaatgtaagaaaaaaactgttatgcaattaatcttttcatgcaattattgtgcaaccaaaataccagaagtcatgagaagttctcaaaattttattgatgaattttatttactcaatcgatcta

SEQ ID NO: 31190 - DNA, 1479 bp, Zea Mays
ccgttattttcagtttttcactagccgcttcgctaccgtgcacaggaaaacccaaacaaaccacagaacccgagcaccgccgccatgtccgccgccgcagccgactggctcccgtcagcgtccgtgacggcgtccggccgcccggtgctttccgcaggcgaggtggagcggaatctcgtcccgcttgtcgatctcgagcccgaggagaacccacacctcgcgcccctccgcgcctgcctcctcgcgctcacttcccaccgcctcatcttcctccacgagccgtcccgctccgcacgcggcctcccgctcgccaccgttgtccatgcctaccctccccaccgcaggcacaaccataacccccttcgctccctcttctcctcgtcctcatcttcctcgtcgcagcatcaccgcatccgcctccagatctccatgccatccgtgcgatcggaggtcattgccatcgtcgtgacctgtaaggctgacgttgatgtgttcttcgggaggctgctcgaggcgatccgtgcaagggcttgggaggtggcccccgcagctgctccgtcgagcagcacgcccgtcgcagatgtgcctgcggagaacgtcgggatccggatgcccgttgttggggtctctgggatactgcggatggagcaggagtcatgggagagcgccggccagaacttacaagatgcgttccaggatctcaatgccctcatgggcaaagctaaggaaatgatgcagttagcagagaaaatgaggctcaagctattaatgaactcatctactgaatcaaattccaatgatgaagagatgggctctaagcaagacatgcaggatttgctacttagtgttggcattgtgtctcctgtgacgaaagaaactgctggtgcgttgtatcatcagcagttgtcactacagctcgcggactttgtaagaataccgcttgagaaagcaggtggtatgatggcactggtcgatgtttactgtctcttcaaccgtgctaggggaacagagttaatctcaccagaggaccttttgcaagcttgttcgctatgggagaaagttgatgtatgttgatttgtaatgagcagccaagtcatgctcaggaaatttgatagtggagtgaaggtgatccagacaaagacacatagtgatgaagaggtatttgcgagaatctcatcacttgcacagaagcaggatgctcttcagaaagggattagcccaagtgatgctgcattcacactgggaattgctccagctttagcaaaggagcatcttctaaatgcagaaaacaaagagatgttagtccagatggattccgcttctttatcaatttatttaatgacattgatgcccaaaatatttactcgcaaaaaccttatggaccgtacaacgtgtggatctccgttgcgatgacatctcactgacactggttgatcaagctggacatcggtgcagttattgtatattcttcttttgggg

SEQ ID NO: 31191 - DNA, 2725 bp, Zea Mays
acttctgttctgcccaaccccactccatccatccaaatcagctttgcctagcttattattccttaccgacaaacaaaactgacacggatccgcacagagcaacgaactcgcccagtccggctgctgctgctgcacaacggactcgatctcacggccccgccggctcgcagccatgcagacgcagtcccgcctggccatgagcggcggcggcggcagcggcggcagcagcagcagctcggcctcggaggacgagcacgaggcggtgatccgcgagctgacgcgggggcacgagctgacggcgcagctgcgggccgaggccctacgcgcgctgcgcgggcagggccaggccgaggccaccgcggcattcatcctgcaggaggtgtcccgcgccttcaccgtctgcctctccatcatgagctcgcccgcccgcgccccgccgccgacgatggaaatgcccgcgcctgccctggccccgcgacggggccgggacgacagcatcccaagagagcaacggaggacgtcctcgccgcacagcgacgggtaccagtggaggaagtacggccagaagaggatcactaagtcgccgtttccgaggtccatatataatatccctcttcctacttattagcatatatagtacttctttgctaccttagcaaaaaaaaaaaaaaactatacccattagtcctgaatgaaatataatggatgcatgtatcttgagctgttctagttcaaatcatctgattgaatttgacgaagaatattaatttctatgatgatatcaaagagaccaattatgaaatagatttgttttcaggatggtttgactttgtataaattaaggagaatctactgtatttctgaaggatgatgtaatatatacactgtgtctgttcttttatatatatatatatatatatatatacacacactagtagtaccaaactagtgtaacgacctgccataggtaccaaactagtgtaacctaaataactaaccctactcctccaataattcagcacgcggccgctatatatagaagaaaagggtaagattgccctgttgctgcaaacaagggcaagttttgtgagcgtgacgcatctagctagctaggcagcgtgctagcaacggcgttcctctgaatggacgggaatagaattggatggggatgttgtcttgaatagcgacgctgcgtggcacagcgcgaacacaagagacaagcgtaaaagcaggccgcgcttgagttgacgcgcacggccgtgttcgcctttatttaaaagattctggagcggccagcagaacggatcgcccacagccccacatctaaagtttgattaggcctgcctctgctcgagcaaaagctagctgttgattagagatcattctgacgttgacgcatgtttatcttccaagtaaactagctacagtactgcacgcttttctctctctctctctctctgcatttgttttcttgaccagctttttgtcacatctatctcctggtggtgtacttctcgtgtagtagcttagacctgggtaattaagggccgggacgtgtaggcatcttttcttgcgtcacatgtgtgacgccggacgcgatggtttcctgtattattattggccgccatgtgccgagatggataggctgctgatgtgattccaacaacaagtaagcgtgttgtcttatttactacagtacctgctcacttttgtacgtacgtgctgcgcaggtgctactacaagtgcagcttccaccgcgagcgcagctgccgggccaccaagcaggtgcagcagtgcagcgacggcgacggccacccgccccagtacgtcgtcatgtacttcaacgagcacacgtgcgacacggcggcctgggagcccgcggcggcggcggcggcttcctcgggggtgccgctggacgacctgtccaggtccaggctgcaggcggtactaggccagggccagcagggcgctcgcgcgctgctgctggacgaacgcggcgtccaggaggagcacgagcgccggcttctcgtctcgtcgctcgcctgcgtgctcgggggccagcagcagcagtctcctgcgggcagcggaacaaccacggccgtcgaccccgccgttaacgtggggcaggagcaggagccgccgccgccgcgggcccgcacgcctgcggccgttgacgcggccggtgagatgccgcgtatcattggcgtggacgtggcggggctggatgtcatggactacgatgtgacggacgcgctgtgtctcgcccattcctacgacgacctacctgacgacgggtttccgttttgctgagtgcgcagccgcaccacatgcatcttctcgcgaaacatacgtacggtacatgtgccaggcccgagatagttcatgtcgggcgcgacgggtcactgagcctttggtcatagaacaattaatactgtgatatatagtactgtctctactacggagtacttatctagcagtagtagtaactacacacttgcccagcttattacagccaggctttgcgtatctccagataagtttaggtcaggctggcgtgattaatttgcaagttctttttttttgtgtgtgtgttaatcagcgtgcatgccatgtactactagttcccttgttttcgttccactattacaagtgtgcaatgttttacatatattactgtggataaaaaacaaaaaaaacgcatacattgtcagtaatttcagccgtc

SEQ ID NO: 31192 - DNA, 178 bp, Zea Mays
cctccacgtcagcactttctgttttagccgcatgatccaaatccaacggtcataatcacatctcacgcatcccagtggtctctaacacacgctctttctcctccaagcgaaggaccattctagatgatgcacgaaggagccgttaggcgaccgtttccgtacaacccccagctacccc

SEQ ID NO: 31193 - DNA, 2253 bp, Zea Mays
gtttggatttcggaccggacgcgtttctgaacttcttgcgccggaagaaagagaaaccgagaagaggagtcgcggctcccgacatatgtggcggcgggcggcgacagcggcgctgtcgctgggcgccggtgccggcgcggtctcgatcgccacctccgaggaccccgccgcgacgttcaaggtctgcgcgcacctgcctccgcgcctcctccgcgactctgtcacggccgccaccatcgcgtttgactacaagtggtccctctggggcctcgagccgggcacccccgtgtggcagagcgccaagcaccatgcccacctccgttccgccaaccgactccaggagctctgcttccgcaacggtggcatctacatcaagctcggccagcacatcgctcagctggagtatgtcgtgccggaggagtatgtgcaaacaatgagggaatccatgctgaagaggtgcccggtctcatcgtacgagcaggtccgcggggtgtttaccaaggatctcggtgaatcgccagaaactgtttttgcagaatttgatcctgctccatttgcaagtgcttcccttgcacaagtccatgttgcccgaacgcacgatgggcaaaaagttgctgttaaggttcaacatgaccacctcacaaatactggtgttgtagatatagccactgtggatttgttagtgaatgctctgcattatattttccctacatttgactacaggtggttagttgatgaagttcgagaaagtgcccctaaggtaccttcctagtcttgcctggaaatataagttctttgtgattgagtaatggattttgttttctttttgtttgttacaaaatgagttaaccttttgttctcacatgtcataactgttgtctattaatggctatgattgtcccctgttaaaactaagttttgtgctaatcaatattctttacaatagtatcatcattccaatcttgaatttttatgcaatttagggggaacaaatataataataagaaaaaatggagctggtgctaacttgttgtgattctcaggaattggatttcttgaatgaagccaaaaacagcgaaagatgtttgaataactttagaaagctgtctcctcagattgctggtagcatatatgcccccaaggtttattggaatctcagcacatctagaattctcaccatggagtttatggatgccaaggaggtaactgatgttagtggcattaaatcaattggagttcaccctgttgatgtttcaaacctagtcagtaaagcatttgctgagatgattttcaagcatggctttgttcattgtgatccccatgctgccaatatgatggtccgaccaatgccacaagacagcagaaaactttttggatggaaaaggccacagctggttcttcttgaccacggcctctacaaagagcttgattataatactaggataagctacgcttctctttggaaggcacttgtttttgctgatgcaaaagcaattaaggagaacagtgccaaactgggtgctggggaggatcttcatgcactctttgctggtgttctcactatgagaccatggaaaagggtgattgacccatctcctgatcatcttgtactaggaaaaaatactgattattcagaattacagaattacgcctccttatattttactgagatctccgagctactgaggagattaccaagggttatattgttgatgcttaaaacaaatgactgtttacgtgcagtcagtcatgccctggttgggggcagttccttggagtcgtttatgattattggacgggtatcttctgaagctgtgctggatgctaaaaggatgaacaggaggtcctttctcgatggattgaagatatggctggaggaagccctgctggaagctcgattctttactttgaagctgatgctatgtgttatgcaacttaggaagttgttgcctggctaaaagcagttaggcgtatcagcagcctttttgaccggtagaactgcggagttgacatctagttccatatattttcttgagggcgaaacttgacattttgcttagaagattgcctttcttttcgtatacataattcttctgtcgatcattttctcaccatgagtggccatttttcatggtcgatacttgataccttcattgggtgaatacaagtatacaaactgctgacgtggacaaatgtaagagcaaaactgttttctttttggaagggaatcaacattgacgtgtagcaaatttc

SEQ ID NO: 31194 - DNA, 2098 bp, Zea Mays
gtaagacattccggcccgctcccgctccttcccgttgtctcgtaagctgcgaggaatccccagctcgtcttgccccggttgttttgtatctcctcgtcggacccagcgttccagtcgagcatggcttcgattccgcctccgtcttcctccgtcgctgccctcacccgccaaccggcccagttcttgaaatggtgcagtgtatccaaggagacaaaggcatcggtctgcagtttcttggctacaaattcaaacagcactagggtgaaatcagtgggcttgagagtagcattatccttcaaaaatgatggtggttatccagctgacggtttctctgggaatggcaacacgctattgccaaaaagcacatccgttcgtggcgaggaccatccggttgctgatcctgtactcccaatggattcaatgatgacgccagaaatcctctctgctaatttggcacttgttatggacaagttctcagatgatgacacagatactgaacttgatttggatagcccgacagagggcttcgcgtcgattccagatgccattgaggacgtacggcaaggaaaacttgtgattgttgttgatgacgaatcaagggaaaatgaaggagatctgataatggctgcctccttggttaccccagaggcgatggcttttatagtaaggcatggaacaggaattgtttgtgtcagcatgaaagaagatgatctggaaagactgagccttcctttgatggttaccacaaaagaaaacgaggagaagctatgcactgcttttactgttacagtggatgcaaaagagggcacaactactggagtatctgccaaagacagggcaaaaacagttatgactcttgcatctcctgactctaggcctgaggacttcaaccgccctggtcatattttccctttgaaatacagagaagggggtgttctgaaacgagctggacacacagaggcatcggttgaccttgccatgctggctggattacctcctgttgctgtcctttgtgagattgtggatgatgcagatggttccatggctcgcctgccaaagttgcgtgtctttgctgaaagggaaaatttgaagattatatctattgctgacttgattaggtataggaggaaaagagacaggctagttgaacgtgcttctgttgcacgcttgccttcgcaatggggcaatggccatggatattgctacagatctgctattgatggcatcgagcatcttgccatggtgaaaggtgatattggtgacggccaagacattttggtgagggtgcactctgagtgcctcacaggcgacatttttagatccgcaagatgcgattgcggtgaccagcttgcaatggcaattgagatgattgagaaggccggaagaggcgtaatagtttatctccgtggacacgaaggacggggtatcggtctgggccacaagcttcgtgcttataacttgcaggatgatgggcgtgatactgtggaagctaatgaagaacttggtcttcctgtggactcacgagaatatgggattggcgcacagatactacgggacctaggagtccgttcgatgaagctgatgactaatagccctgcgaaatatagtggtctgaaaggttatggactgagcattgcgggcagggtgcccttggttacgccaattaccagcgagaacccccaaatactgtgtcccatccgtgaacatggaagagccaccgaagacggagaggaacttgtcaagcaaggatacatacccgacttgggcattttggtcttcagttgcggtcgttgcacgagctgctagaggtgtttgtcatcgttgtaacatcagcgtggtccaacatcttccgtatgttcgcaaacattcctccaagccatgaagaggtgctttgttgatcaatctagatgaggaggacgaggtcaactttgtgaaggtacaaatggagaatgtaacacccctggtgttatgtgaactaaaacattggcatgccatcatatgtactggcattatattgctcgtgttacacttagaatgcatccactagactaaaatttcaaaaaaatatgtgatgtgatacttggttgggtatagggta

SEQ ID NO: 31195 - DNA, 217 bp, Zea Mays
acctctagacatgctgctgtttggctgtggggtttggttgccaaaagcactagctgagtttctaaatcaagttgtagctttgtcaagtttaagtttgactctcttaaggctaaatatgtactatctactcatacatagtagcaaacatttttagcaatcaccatcttgtatcatctcatcatatttccacttgttactcaatgtagcagcatggatc

SEQ ID NO: 31196 - DNA, 1855 bp, Zea Mays
tcgtcttcatcaccccgcacgtctccacttccctttccttacttcccactccttccccacccacccaacccaaccctcccaatcccacactcgtcgtcccagtcccaccgaaccctactcaccaacaacagacccgcaggagaagggggaaagggggggaaattcctgtggagacgacttcgccgccatggcgggcgatcccccgacggccgcggagaaggagaccctggtctcctctttcctcgagatcgccgctggccagacccctgagactgccactcagttcctcctgatgacgagctggcacctggaggaggcgctgcagctgttctacatcgacggcgagtccgccctcaccccggcgcatccggtggccccgccgcccacgtcggcggccgcgtcggcgttggcggcagcggccggggcggaagaggcgatgaggttcgctccacccccggcggctgcactgggcgatgcaatgttgcatggatttggggtcggggaggacgacgacgtccgcgcgcctctgcctgtgaagagggagactctgtacggcgagggcatcgtatccgtcatgcgacctaatgcatcagctgcatttcgtaactttgaacaagaagcaagacaatctgctgtttgggactctgaccagaatgctacatctagttctggcaaagttagaggcttcttccctggacaaatggctattaatcaatttgcagtcgacagcggaatttagctctcacatgcttaatcgagacacttggggaaatgatgcggtggctcagttgattcggtcaaattttattttctggcaggtttattatgacaccagtgaggggaggaaggtatgcacctactaccatttggtgtccatgcctgctattctcctaattgaccccgtcactgggcaaaaaatgcatgcttggaatggaatggttcacccagatcgtttacttgaggatttactaccttacctggataaaggtccgaaggagcaccatgcagctcaacctcaaaagcgcccaaggaaagttgatccggaagcttctacgggcaagcaaggcaaaatagctgtagaggatgaagatgaagagctagcacgggcagtagcagcttctctagaggagagtaaagaagtcattgaagcatcagacgccagtgatgacatggttgaagctgaacccgaggaggaaaatgagcccaccctaaacaccaagcctgattaccctcctctccctgaagaacctacaggaagcagggaccttctctgcagggttgcgattcggctaccgaacaaccggaggatccaaagaaacttccttcacacagatcctatcaagctcttgtggtcattctgcgctcctcaggtcgaggacggggagaggagggctttccacttcgtccaggcaattcctggggcatcccagaaactggagttgggaagcgacctaacattcaaggaagccgggctggccaactcgatgatcaacctcttgttggactgagccgcccgctctctcaacctgcactttgagatgagacgccgtcggccggtcgaggggtttgtatttcaggatgggcttgaagatgatggtgcgcttgggtatcttctttccttgaggattaactcttatcttttgctccactggagctaggagtccgaggacaaaccaaaaaaaaaagtctggtgtgccctgagctgtttgtgtgtggaaatggtccttttgtcgttcgttcttgtgtccgtatacatcctgtccccggtagggcttaactctatttaatgcacatatctatgaaagattcagtctggagcttgctttgatgctcccctctgggctctggtcgtgtc

SEQ ID NO: 31197 - DNA, 595 bp, Zea Mays
cgtaatctattttaataggaagtatatgattttacacaccttaatcgaggaaccacgaggagaccggtcgatggagaactgcgatgcgacgatgttcactggcagcgagccctccgtttcaataaccgtgaaaaaacttggccacggtgaggagaagaatcggacagcatggtcaccactattgtcaatactacggtgacgttgtgacgacgacctagtgtggtcgagctgtgagtcgacggcgcggcataacaagtggagcacacggcgatgcgaggttgaacgcaggatcaatggcctacgaccaacaacaagtgtcgagacgacgtgcgtgaaccttagggggttttgcagtgtggactacgaggcaggacgtcggtgagctgtaggacgacgtcatcgaggtgaagaacatcggcgaggtgggccgtgagcagtggtcggcacgacgaacgggaggaacagagattcaccggcgctaaagcgaggcgatgcaatttggagatgagactggacctccaccggcgatgttgcagattggggataggtaccaggtgcaaggaacacggagagcgaaagctgggagaggagagcg

SEQ ID NO: 31198 - DNA, 441 bp, Zea Mays
ggaaaaaaaatatttgtttggtgagccacgctcccatccggatccgcgggggaggacggcgatttcgtccccagcctcatgaggtcgggaaggggttcccgcacccacatttgtgaacctcgccggcgcccatcccctgccttcacgaacccgccgccgcccgtcccctactcttcctcgtgcacccaccgtcgctcgtcccctcgtcttccttgcgcactcgccgtcgcctcctcctcaccctcacgcacttgaggccagctgcagaacgaggtcggacggcggagacgaggtcgaggtctacgacctcctcaacttgcgcaagactgccgagactgcagggacaagctctttgctgcctcgtcagctgctagctgacttctccttgggattgagagatgaatgtcgaatgcttgctgctgatggaattaactagtttga

SEQ ID NO: 31199 - DNA, 773 bp, Zea Mays
aacctacaaacgtatattcttaaataccttccccggcgcgatggccgcggccgcggcagaaacacagatgggcgacggggctccgccgccaggggctctatactccttcggaacgccgtggccggagctcaatcaaggcctcacctacaccgacacgttccgttgcgctgatgcggacgccgctaccaccttgattgagttctactctactaaccacaagagctcggcgccattgccagggtggatcaagaggattcgtaatgggcagataaccgttgatggtgaagttgtcactgatccagatatgactctggtggatgggtctaagttggtatatcatcgttttccttggcaggagccatttgcgccgtatttgctggaagtgctctacgaggatgatgacatggttgcccttaataagccttctggcttgcaagttctgcctaaaggactgtttcagcagcgaactgttttagcacagcttcaattgaaagactggaagatggcctcatcttgccggttcaagagaaaagatgtgcagtcacatccagtacctgttcatcgtttagggaggggaacatcaggcctcctgctttgtgccaagacaaaagttgccaaagttcgacttgcatcttattttgctgaaggtgctataaatgctgcaaagaaaagagttcagtgaagagcgaaaaatttcaaaattttatcgagccttagtgactggcatacttgatgatgatgaggtactatctcttatttgatacagtgttctg

SEQ ID NO: 31200 - DNA, 2954 bp, Zea Mays
atttttgtgaccgctgtccaggtgatttttttcttggcgcgtggtatttattcctccggccgtcggtcctccccgtgcagctctctgctcgtcgaggagctccctctgccggcgctctctccctgctccctggagcttcctcgccgcgcccaaggttcctccttggctgcgcgctcctccctggctcatccctccgtgctcccctagccctccctgtcatgcgcccgctcaggtccgtgcagtcccagctgcctgctctgctcgctcgtgccgcgtccggctccctggctcgctgcgcgcccatctctctctcttgcggctccctggcttccagctcggcgttcccctcccaagtttgttcttctgccgcggtgcttgctcctgctcgaccgtgcgccttggcgttcgccatggccaccgcgccgtggagctctgcgcgctcagccctgctcgctccctgtgctcgcgtccagccgaagtttcctgcgagtgctcgtcggtcggagctcctggctcgcatccctccagctcgtcagccgtgtgcccagctccacctcgtcgatggcgccgtggaattttgtgcgccgttcctctgctgaccgctgctgctaggcttcgctgatgcgcgcgatttgccggccatatcccttcacctgtggtctccacgtcgtgtgcactgattatcttgtgtgcgcggccgcgggcgccgtcgtgccttggccgtgctcggtttcctcagcatcacgatgcttgcctttgcgtctgcttcagcatcctcgtgcaaaactgtcgcagccgcgttctactctgctccaactcacgtccacgctctagatcacgctcgccccgctcgaacgagtcgtcatgccatcgtcttcgtcgtatggagatcgtcgtgctgacacatcaatgctgtcaatcgccatcctcgtctacgctaaagatccgagaagattaggtggagaaggaaacaaattagtacgcgacgggagaattctcgatgtggaaggagtgtgattcgatacggcacttaccatgtattcggggaaaggctagagctgaaagacgtcgtccatttcatgatttcaagtcggatttaattatggtaagctaattcgccacttctaataattggtttaatggatagattgctaggtacgtatgtcacgacgattatcccgcttgtagctcgggcacgtatttatttgacgcttgttggaatacggggctacatgtagcggggtaattgtgtctacgattgcgaagtcgtcgtgcagcgtagctaagtttaggttatgcgagaaggattaaatcggtgtttcgtatccgatgagtggtcgaattaataatataaaagataggttaagtattttatcaggctagctagtaagttctgacgatgttgccatgctgatttagtttgcttaaataaattaatgctttgctaatagacattttaattagcgggcaggtgatgcgaagtcgttcgatctggtagtttagaatgttgatgtgcttctgttcttgttttaagacttaaatgtcttagactaatgaatttagaattattaagtttttggtgtcgatctttaactaaggcaagtagagcgtgaatatatattattgatttgcgatgtcttgttataggtgtttaattcgctatcgcgtaacactatttagatttgtaatatttctgtctatatgcattaggtgataggagttgtgtgctaaactgttgatgcattttcttccttggaaaattgaatacccttccttgatacccttttacaaaaatgatttttgatgcttaaccttgctctagaaaaacaaaatgttttcttttaaaaacaaaagtgatgcttaagtggatgggatgttttcaaaaataaaacttgatggtgaatcagtcaaaggccttgatgggttcaacatcggaaaagatgtacctctgccatgcatgtaccaaactttgggttgaaaataataaagctgagaccgggcggttgacttgcatgagaagggagtctcggtgtagtgtctccgtctgagtcgattaaggaccgtctcgatgtaggcttgctaatcgaggactttttaactggtcacatgcctcatcatgggtaagctttgcctcgggcagactaataccagaataagacaacacacaatggaagtggagagatggcgagagtagtgtgtaccctccgtggcaagaggctggacggtggtgtatctatgctctcggttggcgtgaacctaatctggtcttaagaaccccagtggcgagttgacatatgcaagggttaagtgatacatatgtcgtgtgattggagatccacagctgggtattaatcgattcggatcgccgttacttctcggacatgatgacttggtcactgccctacatgtagaaatccaatgaactaaagggatgatgaaaagacggctagtgtaggccaagtgcttgaactaggatagaaagaactttagatgtaggtaactttacttaacttgacaagtaaaatggatttttaaggatccactcatagtaagcttttctgcaaaacagagtctttgattcttgataagccataccttgaatccctctagtcagcatacccttgagagtcttttctttagtcgggtaagtcttgctgagtaattccatactcagggttttattccttattgtttttcaggttatagttttgtgctgctgatgatggtgttaagtgccggtgggctcggccttcttataagtctaagtaacacttctatacttcttattgaggatggtcacttgagctagcatatatttcaaaactacaaataatttataacaattcaaagttatttctttgaaccacttttgtaagcactccgatcatgtatattataaaacttgatgtaacttgtaaaatttgacaataagatttccgatgcaaaaatgttgg

SEQ ID NO: 31201 - DNA, 2606 bp, Zea Mays
gtaccctccatctctgtcctctttacttgccccatccatcccacgccgatcgccaggcgccagcagcaggctagctctgctccgccgctcactgctcgctagctactggaccgcgcttccctctctccatcgcgccggcgcgcacggctagctctagctcccggagccgccctttcatggtccccgccgtggtcgggacgagatgcctccgctcgcattcctccgccgctacctccccgcgaggcttctcgcgcgagcgtgcgatggtggagtccgggggagcccgggcgtggcgcgggacgaggaggccggaggcagcggcggactgagcggccggtcggcgggggcgccgtccggggagtgctacgcgtgcacgcagcccggggtgccggcgttccactccacggcctgcgaccaggtgcactcgccggactgggacgccgacgcggggtcctcgctggtgccggtccaggcgcagcagcaggcccagccggcggcggcggcggcgcagcacgcggcgcggtggctgttcgggcccgtgctggacccgcgcagcaagcgcgtgcagcgctggaaccgctggatcctgctcggccgcgccgccgcgctggcgctggacccgctcttcttctacgcgctctccatcggccgcgccggccggccctgcctctacttggacgccggcctcgccgccgcggtcaccgcgctccggacctgcgccgacgtcgcgcacctcgcgcacgtgctcctgcagttccgcctcgcctacgtctcccgcgagtccctcgtcgtcgggtgcggcaagctcgtctgggacgcccgcgccatcgccgcgcactacgcccgctccgtcaagggcctctgcttcgacctcttcgtcatcctccccatcccgcaggtctaccatagtatacacatcatgaggaaaatgcagaaggtgacgggttacatctttggatcgatatggtggggatttggtttaaatctatttgcctatttcattgcttctcatattgcaggtgggtgctggtatgttcttgcaatccagcgcattgcttcctgcctccaggaagaatgcaagaaaaacaatagttgtgatctaatatcactagcttgttcgaaggagatatgctttcaccctccttggtcttcgaatgttaatgggttcgcatgtgatacgaacatgacctcctttagtcaacgaaatgtgtctacttgtttaagtggtaaagggtcgtttgcttatggaatctatttgggggctcttcctgttatatcgagcaattcgcttgctgtcaaaattctctatcctatattttggggactcatgacactcagtacttttggtaacgatcttgccccaacaagcaatggtattgaggtgatattcagcataatcaatgtcctcagtggcctgatgctcttcacattgctgatcggaaacatacaggtatttctgcacgcggtcctggcaaggaagcggaagatgcagctgcggttccgagacatggaatggtggatgagacggaggcagctgccgtctcggctgaggcagagggtgcgcaaatatgagcgcgaacgctgggccgccgtcacgggagacgaggagatggagatgatcaaggatctgcctgaaggactgaggcgggacatcaagcgctacctctgcctcgagctggttaagcaggttccgctgttccatggcatggacgatctgatcctggataacatctgcgaccggctgcggccactggtgttctccagcggggagaaggtgatccgagagggcgaccccgtgcagcgcatggtgttcatcctgcagggcaagctccggagcacgcagccgctgaccaagggcgtggtggcaacgtgcatgctaggggcgggcaacttcctaggcgacgagctgctgtcgtggtgcctgcgccgccccttcgtggaccggctccccgcgtcgtcggccacgttcgagtgcgtggaggcggcgcaggcgttctgcctcgacgcgccggacctgcggttcatcaccgagcacttccgctacaagttcgccaacgagaagctcaggcgcacggcgcggtactactcgtccaactggcggacgtgggccgccgtcaacatccagctcgcgtggcgcaggtatagggcccgggcatcgacggacctggcggcgatggccgcgccgccgttggcgggcggacccgacgacggggaccggcggctcagacactacgcggccatgttcatgtcgctccggccgcatgaccacctagagtgatcaggaggggggacgggaccatcctagctgtgccggccgggtcatggtgtctgtacagtgtacactagtggtatgttgttgtcatcttctgcgtgagtgaactggtggttcgggatttgtcatttaaagaaggtcaataatggagaaatagtttcttagcccgattcaattgtcttcctttcaccaagaataaaaattacttctgccggactgcctctccgcgttggtctggattgcttttaccaagaataaaaattgcagccccggctgcagcggctgatggcaggacagattcagacgcgcagagaatacgtacaagtcgccgaag

SEQ ID NO: 31202 - DNA, 11560 bp, Zea Mays
ccaactctgaaccctccaagtttcctccctcttcaccccaaacaacaatcacagccctctctccctctcccctcctttacgtcgccgcctccgaatccccacctctttgctcctccgccatcctcctccgcggccgatgtgtgtgccccgccggcccaaaaccctagaggttacgagcaggtaagggtttcgatcggagatggcggctgcggctgcggcgatggccgcacatagagccagcttcccgctgcgcctgcagcagatccttgctggcagccgcgccgtctcacctgcgatcaagatcgagtctgagccgcctgcaaacatcaaagcatttattgatcgagtagtcaatattccactacatgacattgccataccgctatcaggcttctgttgggagttcaataagggaaatttccaccattggaggcctttatttattcattttgacacctatttcaagacatacatttcttctcggaaggatcttcttttatctgatgatatgaccgaggctgaccctatgccaaagaatgccatcttgaaaatcttaagagttatgcagattattttggagaactgccagaatagaagttcttttactggtcttgcgcatcttaagcttctcctggcatcgtcagaccctgagatagttgtagcagctttggaaactcttgttgccttggtcaaaataaatccttcaaagttgcatatgaatggaaagctaattagctgcggacctataaacacccatcttctatcattggcccaaggatggggcagcaaggaggaaggtcttggcatatattcttgtgttgtggcaaatgaaggaaaccatcaggggggtttgtccttgttccctgtagacttggagaacaaatatggtggcacacaacatcgtcttggttcaactcttcattttgagtataatttgggtcctgcacagtatcctggccaaactagtgacaagggcaagtcatctaatttgtgtgtgatacatattccagacatgcatcttcagaaagaggatgacttgagcatactgaagcaatgtgtagacaagttcaatgtgcccccagagcacaggtttgcattgcttacaaggataagatatgcccgtgctttcaactctgcacggacttgtaggatctatagccgcataagtcttctttcgttcattgttcttgtgcaatcgagtgatgctcatgatgaactcacatatttctttacaaatgaaccagagtacataaacgagttaatcaggcttgttcggtcagaggattctgttcctgggtccattcgtgctctggctatgctagcactgggagcacagctggcagcatatgcatcatctcatgagcgtgctaggatattgagtggctcaagtattatctctgctggtggcaatcgtatggtcttgctcagtgtcctgcagaaagcaatatcctcactcaatagcctgaatgatacctcatctcctctaattgttgatgcccttcttcagttttttctgctccatgtactgtcttcatcaagttcagggactacggttagaggctcagggatggttcctcctctcttgcccttgctgcgagataatgatccttctcatatgcatcttgtctgcttggcagtgaagactctccaaaagcttatggagtacagcagccctgctgtttctctgtttaaagacttgggtggtgtagagcttttgtctcagaggttacatgtagaagttcagcgtgttattggtactgctgatggacataattcaatggttactgatgcagtgaaatcagatgataaccacatgtactctcagaagcgattgattaaagctttgctcaaggctttggggtctgctacttattcccctgggaatcctgctcgttctcaaagctcccaagataactcattgcctgtctcactttcccttatatttcagaatgtagataagtttgggggtgacatttatttttcagcagttactgttatgagcgaaataatccataaagatcctacatgctttattactttgaaggaactcggtgttccagatgcttttatctcatcagtgactgctggggtaataccatcttgtaaagcccttatctgtgttcctaatggcctgggtgcaatatgcctcaataatcaaggacttgaggctgtcagggaaacttcagcactgcgatttcttgtagataccttcactagcaggaaatacttgataccaatgaatgagggtgtggtccttctagctaatgcagtggaagagcttcttcgtcatgtgcaatccctgagaagtattggtgttgacatcattattgaaataatcaataaactaagttcgtctcaggaatataaaaacaatgaaacagccaccttgcaagaaaaaacagatatggaaactgatgttgaagggcgtgatttggtaagtgctatggactcaagcgtggatggaagtaatgatgaacagttttctcatctgagcattttccatgtgatggtattggtgcaccggacaatggaaaactcggaaacctgccggttatttgtagaaaagggagggctacatgctcttttgacactcttgttgaggcctagcatcacacagtcatctggagggatgcctattgctttgcatagcacgatggtgttcaagggttttactcagcatcactctactccacttgcacgtgcattttgctcatctttaaaggagcatttgaagagtgcattgaaggaacttgataaagtttccaactcatttgatatgaccaagattgaaaaaggagcgatcccatctttgtttgttgttgaatttttgctattcctagctgcctcaaaagataatcgttggatgaatgctttgctctcagaatttggcgatgccagcagggaggtcctggaagatgttgggcaagttcaccgggaagtgctttggaaaatttcgctttttgaaaaaaacaagattgtcgctgaaaccagttcatcttcttccacatctgaagctcagcagcctgacatgtctgccagcgacattggtgatagcagatacacttctttcaggcaatatcttgatccaattttaaggcgaaggggttctgggtggaacatagagtctcaagtgtctgacctcattaatatgtatcgagacattggccgtgcagctagtgactcgcagagggttggttctgatagatattctagtctaggtttgccctcaagttcccaggaccagttttccagttcatctgatgcaaatgccagcacaaggtcagaagaggacaagaaaaaatctgagcattcctcctgctttgacatgatgagatctctctcctaccatatcaaccatctttttttggagcttggtaaagcaatgctttttgcatctcgtcgggagaatagtcctgtaaacctatccccagccgttatatctgttgctaacaatattgcttctattgtgttggagcacctcaactttgaaggtcattcggtaagttttgagagggacatgactgttaccacaaaatgcagatatcttggaaaggtggttgaatttgttgatgggatgttattagaccggccagaatcatgtaattcgattatggtgaattcattttattgccgtggtgtcattcaggccatcctgaccacatttcaggccaccagtgagttgctcttcacaatgagcaggccaccgtcttcacctatggagacggatagtaaaaccggaaaggatggaaaggagatggattcttcatggatctatggtcccctcaccagttatggggcaattatggatcatcttgtgacctcatcttttattctctcttcatcaactagacaattacttgagcaacctatttttaatggatctgtaaggttccctcaagatgctgagacgttcatgaagttacttcagtcaaaggtgttgaagacagttcttcccatctgggcccatccccagttcccagaatgcaacatcgagctgattagttcagtcatgtccatcatgaggcatgtttgctctggggtggaagtgaaagacactgttggcaatggtggtgctcgtttggctggtccacctcctgatgagagtgcaatttcacttattgtagagatgggtttttctcgtgccagggctgaagaagcattaagacaagttggaacaaacagtgttgaaatagcaactgattggttattcgcacacccagaggaaccacaagaggaggatgatgaacttgctcgggcgcttgcaatgtctcttgggaattctgttacccctgcacaagagggagatagtaggtccaatgatcttgagctggaagaagcaacagttcagccgcctcctatagatgaaatgttacgttcatgtcttcagctacttcagagaaaggaagcattagctttctctgtcagggatatgcttgttactatcagctcacagaatgatggccaaaaccgagtaaaggtgcttacatatttgattgataatctgaaacaatgtgtggtggcatctgagccttcaaatgatactgcattgtctgctcttttacatgttcttgctttgattcttcatggagatactgctgcccgtgaagttgcctcaaaggcaggacttgtgaaggttgctttggatctgctgtgcagctgggaggtgcaaattagggaaagtagcatgattgaggttcctaattgggtaatttcctgtttcctttctgttgatcagatgctccagttggaaccaaagttgccagatgttacagagctacatgtcctgaaaagggataactcaaatataaaaacatcacttgtgattgatgacagcaagagaaaagattcagaatccttgccaaatgttgggttactagacatggaggaccagtttcaacttttgaagatctgttgtaagtgcataggaaaacagttaccttcggcttccatgcatgctattctccagctctctgcaacactgacaaaagtccatgcagctgctatttgtttccttgaatctggtggtttgaatgcattactatcactgccgacaagtagtttgttttctgggttcaacaatatggcttctacaataattcgtcacattttggaggaccctcacacccttcagcaagcaatggaattagagatacgtcacagtcttgttacagctgctaatcgacatgcaaatcccagggttacaccacgcaattttatccagaatttggcttttgtcgtgtatagggacccagtgatatttatgaaagctgcccagtctgtgtgccagattgagatggttggagataggccatatgttgttctgttaaaggatcgtgagaaggaaaggatcaaggagaaagataaggacaagtcagttgataaggataaagcaacagtcgcagtcactaaggtagtttctggggacacagctgcaggatctcctgcaaattctcatggaaaacagtctgatttgaattcaagaaacgtgaaatctcaccgcaagccaccacaaagttttgtcactgttatagagcatctcttagatctgctgatgtcctttgttccgccaccccgtccagaggatcaagttgatgtctctggtactgccttatcttcagacatggatattgactgcagttctgcaaaagggaaagggaaagctgtgtctgtcccacctgaagagagcaagcatgctatccaagagtctactgcatcccttgccaaaactgcatttttccttaagttgctgacagatgtattgttaacttacgcatcatccattcatgttgttcttcgtcatgatgctgagctgagtaacatgcacggtccaaatcgaacaagtgccagactaactagtggtggaatctttaaccatatcctgcagcatttccttcctcatgctacaaggcaaaagaaagagagaaaaaatgatggagattggatgtataaattggcaacaagggctaatcagttcttggtggcttcatctattcgttctgcagaggcccgaaaaaggattttctctgaaatctgcagtatatttcttgatttcactgactcgtctgcagggtacaatgccccagtaccaaggatgaatgtgtatgtcgatttactgaatgatattctgtcagcccgatcaccaactggctcctcgctgtcagcagaatctgcagttatatttgttgaagctggtcttgttcattcattatcgacaatgcttcaagttcttgatttggatcaccctgattctgcaaagattgttactgctgttgttaaggccttggaactcgtcagtaaggaacatattcattcagcagataatgcgaaaggagtgaactcgtcaaagattgcttctgacagcaacaacgtgaattcatcatctaatagattccaggctcttgacatgacttctcagcccacagagatggttactgatcacagggaaacgtttaatgctgtccgaacttcacaaatatcagattcagtggcagatgagatggatcatgatcgtgatatggatggcggctttgctcgtgatggtgaagatgattttatgcatgagatggctgaagatggaactggtgatggatctacaatggaaattagaattgaaattccacgcaatagagaggatgatatggcccctgctgctgatgacactgatgaagatatatctgccgaggatggtgaagatgatgaagacgaagatgaggagaacaacaatctggaggaagatgatgcccatcggatgtctcatcctgacacagatcaggaagaccgtgaaatggatgaagaggaatttgatgaggatctgctagaagaagacgatgaagatgaggatgaggaaggagtcatccttcgcctggaggaggggattaatggcattaatgtgttggaccatgttgaagtatttggtgggagcaacaatttgtctggggatacgctgcgtgtgatgcctctagacatttttggtacaagaaggcaaggccgaagtacctccatatacaatcttcttggtagggctagtgatcatggtgttcttgatcatccacttctcgaagagccttcttcaacaacgaatttttcagaccaagggcatccagagaatcttgttgagatggctttctctgatcgaaaccatgaaagtagctcctctcgtttggatgctatattccgcagcttgcgaagtggacgtaatggacaccgctttaatatgtggctagatgacggtccacaacgtaatggatctgctgcccctgcagtacctgaaggcattgaagaattgctgatctctcatctgagacggcccactcctcaacctgatggccagagaacacctgttggtggtgctcaagaaaatgaccagcccaaccatggatcagatgctgaggcaagggaagtagcaccagctcagcaaaatgagaacagtgaaagtacactgaatcctctagatctgtcagaatgtgctggccctgcacctcctgatagtgatgcacttcaaagagatgtgtccaatgcaagtgagcttgctacagagatgcagtatgaacgtagtgatgctataacacgtgacgttgaagcagtgagccaagcaagcagtggcagtggtgctactttaggggagagcctcagaagtttagaggttgaaataggaagtgttgaagggcatgatgatggtgaccggcatggaacttcaggcacctcagaacgtttacctttgggtgatattcaagcagctgctcgatcacggaggccatctggaaatgctgtgccagtaagcagtagagatatgtctctggagagtgttagtgaggttcctcaaaatccagaccaagaacctgatcagaatgctagtgaggggaatcaggagcctaccagagcggcaggtgctgactcaattgatcctacatttttggaggctcttcctgaggacttgcgagctgaagttctttcttcacgtcaaaatcaagtaactcagacttctaatgaccaacctcaggatgatggtgatattgatcctgaattccttgctgcacttccccctgatataagagaggaggtgctagctcagcaacgtactcaaaggatgcaacaacaatcacaagaattagaaggacaacctgttgaaatggatgctgtttcaattattgcaacattcccttcagaaatccgggaagaggtgcttttgacatctcctgacacactactagccacactcacgcctgcactagttgctgaggccaacatgttaagggagagatttgctcatcggtatcacagtagctccctttttggtatgaactccaggaacaggagaggtgagtcctcccgacgtgacataatggcagcaggacttgatagaaacacaggtgatccctccagatcaactagcaagccaattgagactgaaggtgctcctcttgtcgatgaagatggccttaaagctcttattcggttacttcgagttgttcagcctctatacaagggtcagctgcagaagctacttgtgaatctttgtactcatcggggtagcagacaggccttggttcaaattctagtggacatgcttatgcttgatctgcaggggttttcaaagaaatcaatagatgcacctgagccaccatttaggttgtatggttgccatgcaaatatcgcatattcacgccctcaatcttcggatggtcttcctccattagtctcacgtcgtgtgctcgaaacgctcacgaacttggcaagaagccatccaaatgttgctaaactcttgctctttcttgaattcccttgcccatcaagatgtttccccgaagcacatgatcataggcatggcaaggctgttctcctagatgatggtgaagaacagaaaacctttgcacttgttcttctgttaaatctgttggatcagccactttatatgagaagtgtagctcatcttgaacagttactaaaccttcttgacgttgtcatgcacaatgctgagaatgaaattaagcaagctaagctagaagcatcatctgagaagccatctgcacctgataatgcagtgcaagatggtaaaaataactccgacatttctgtatcatatggatcagagttgaatcctgaggatggcagcaaagcccctgctgttgacaacagaagtaacttgcaagctgttttgcgaagtcttcctcaaccagagcttagattgctatgttcattgcttgcgcatgatggattgtcggacagcgcttatctccttgtaggtgaagtgttgaaaaagattgtggctcttgcccctttcttctgttgccatttcataaatgagcttgcacgttcaatgcaaaacttgacacttcgtgcaatgaaggagcttcatttgtacgagaattctgaaaaggctcttcttagctcttcatcagccaatggtactgcagttcttagagtagtgcaggctttgagctctcttgtcaatactcttcaagagagaaaggatccagaacagcctgctgaaaaggaccattcggacgcagtttcccagatttctgaaattaacacagcattggattctctgtggttggaattgagcaactgcataagcaagatagaaagctcttcagagtatgcatcaaatctaagtcctgcttctgcaagtgcagctatgttaacaacaggagtagcacctccattgcctgcaggaactcaaaacttattaccatatatagaatcattttttgtgacatgtgagaagttgcgtcctgggcaacctgatgctgtacaagatgcttcaacttctgatatggaagatgcttcgacatctagtggtgggcagagatcatctgcttgtcaagctagtcttgatgaaaagcaaaatgcttttgtgaaattctcagagaagcacagaagattgctgaatgcattcatccgtcaaaactctggattgctggaaaagtcattctcgctgatgttgaaaattcctcgcctgattgattttgacaataaacgtgcatattttcggtctaaaatcaagcatcagtatgatcatcatcatcatagccctgttagaatttctgtgcgtcgtccatatattcttgaggactcctacaatcagcttaggatgcgatctcctcaggatttgaagggtaggctcactgtccaatttcaaggagaagaaggaattgatgctggtgggctgacaagggaatggtaccagtcgatatcacgagtcattgttgacaagagtgcccttctgtttacgacagtcgggaatgatttgacgtttcaaccgaatcctaattctgtgtatcaaactgagcacctctcatacttcaaatttgttggacgagtggttggcaaagctctcttcgatggtcagcttttagatgcccacttcactagatctttctacaaacacatacttggtgtcaaggttacataccatgacattgaagccatcgatccttcgtactacaaaaacttgaaatggatgcttgagaatgacataagtgatgttttggatctcacctttagcatggatgcagacgaagagaaactgatattgtacgagaaggcagaggtcactgattgtgagttgattcctggagggcgtaacatcagggttactgaggagaataagcatgaatatgtcgaccgggtagcagagcatagattgaccactgccatcaggcctcagattaatgccttcctggaagggtttaatgaactcattccacgggagctgatatctatcttcaacgacaaagagcttgagcttctgattagtggtcttccagatattgactcatagcctctccagtcgtccagtggttctgggaaatcgttcaggggttcagcaaggaagacaaagctcggttcctccagttcgtcactggcacttcaaaggtaccgttggaaggttttagtgaacttcaagggatctctgggccacaaaggtttcagatacacaaggcatacggcagcacgaaccatctgccttcagctcatacttgctttaaccaactagacttgcctgagtacacgtccaaagagcagctccaggagaggttactgttggcaatccacgaagcaaatgaaggtttcggatttggctaatcagtcatgctcgtttgtccgtgagagtctgtacagatactgagcattgcaatgggcgagcagcacgtgtgtgctgatccttaccacattctgaactccacgtgtttgatggccggggagaacatagaagaatctccgtgggagaggtactgatgagagagagcgactattttgtgttcataatattcattacctttttttagcttttttcggtcgttgccccgttcgtagtttttgccttacattggacttcgctccgattttttttctctgcttttccttcatagactggtgtaagatgtaaccgaacactatgtcaaatgcaaatcatcttagggccccttcgattattactgaatggaggcatggaataatttctagccgtactgtttctctactatattaaagcatcagttttagttacacgattgtcctgcatctataaaaaaactaaaattatacataattagct

SEQ ID NO: 31203 - DNA, 3585 bp, Zea Mays
tcgctccgcgcatggctaccaccgatcccagatatcactcgtggagacgaagaagcgtatgtcggtgaggtaccgattgttcgtcgtctccaagtctcgactgcgctccatctcctctcttccccagctctgccccctccatcgatgccgttgtcgacgccaaaccgagcttgcctcaccacgtcggactgcgctccatctccatctcctcttttccccagccccggcccctccgtcgatgccgtcgctggcgccgccgaatcgagcttgcctcgctggactgcgctccatctcctctcttccctagccctggcccctccgtcaatgccgtcaccagtggctacccgagcttgcctcaccgtccccgctgtcgtcccgcgaatccacgaaccacgtcttccactagctcgatttggcgcgaacccccgcgccgcggagggcgccggccgctccgtggcggcgtcgccggccttgcctcgtctctcgcggggtgcctactcctcggtctcgtcgcgaccgcggcgatgctctgcctctcctccccgccctcccgcgcgcgccagcatggtggcagccgcgggatcgtgcccgccggcggcagtggagcgacaccgagggtcacgatcttctccgcgccgcggccgccgccggagggctcgcccgcgcggcaggagctggcggcgcgctcctggctggcgctcccgtggaacgtcagcgtcgtgctcctaggcgccggccccgagtccgtcgcgctcgccgcgcggctcgggcaccgcgtcaccgccgatgccgccatcgattttgcgttcacggggacaccgttcttccactcaatggtcgcgagagcacaggctgccgccgacaccgacgtttgcgtcctcgtcgacgccgagatcgtccttcttcccgaaattgtcaacgcgttggatcgtttcagcaaggttgatggcgactggttcctcgtttctctgtcacgtaacgtcaccgatccccgttaccagctcgctgacagtggaagccattgggtacaagcagacggcaaagaagtgagctttacggaggagattccagctgagtggtcatcatcggagggctctgacagagggctgattatggcgtggaacaatccaagcagtgctttacacgcaggagttctgccttcttttctgtatggaagaggagcacagaattggtggctggctcacgaggttctgtcctctgagatgaggcttttctttgatgcaagcagtctggttcttggactgtatcctgagagcattagcgccatgcagcatgtcatggcctcgagtaagaatggcaggttaccttctgtatcctgggagtacggcgtcaatcaccatcttgctgcggtttatggctcgtattgctgtcgatcaccagcgagacgctttcctatgctgcatagagtggtaaagcaatctgaagattatatgctcagcaaagttgacacactcgtatcatcagatttcttcatcagtaaacaaggaaatgcccatggagtagatagcctacggaagaaacaaaacgtttctctatctggatatctacacggttgttcttccgagacctcagcgcctgaccttccatattctttgagcatgctactcgatcttgtcgctgatgagaatggttccgttgtccttggcgtggctggaaaaagctacagggacatgctcatgagttgggcatgccgcctgcgtcgtcttagagttaccaatttcttagtatgtgccttagaccatgagacatatgagttctcaatcttacaggggttgccagttttcagagacccattgtcaccaacaaatgtcagctttgacgactgccactttggaacgaagtgttttcaacaagtgacaaaagtgaagtcgcggattgtccttgagatactaagactgggatacaatgtgctgctgagtgacgttgatgtttattggtttggcaatccgatgccactcctgtactctcttggtcttgctacattcggagcacaatctgatgaatacaatgagacaggaccaataaacttgccacgccgactgaactcaggattctactttgctcgctcagacaacgccaccatcattgcaatggagatgatagtaaaacacgcagccagttcaggcctatctgagcagccgagtttctacgatgtcttgtgtggggagaacggaacaaaccggatcggtgaagacagatgcttggagcccaacacgaacctgaccgttgtgttcttggatcgggacttgttccccaatggtgcctacaagggtctatgggagaagcgtgatgtacgagcaacctgcaaagagcttggctgtttcatcattcacaacaactggataaacaagaggagaaaaaaggtccaccggcaaatggtatctgggctgtgggactacgatcctacctctaggcagtgcttgcaggaatggagtgctcagaatgatggggcaattccatttgtttgaggacactgacagttagtagactggttaacttacctcatcccctgttattaaattcgaatattatgtgagggattgatcaatactttcattcgacttcttgcaatcacaatctaaaattgctaattggacattgtgtttgccacaaccgttgtgcgactccaataaaaccaggtttctgtaatttccagaacagaataagtaatccagcactcagttcagagccaacagcttcgtttggtttttagttgagcatctcgacggttcgccgccggctcagaggaaaacatggcatcgtttcacaaaacatggcggtgtgaaagaaaaagatgggagtccagatttcatttgtagtttcccacacaaaatgacaaaacactagccatctgctgcttgcagctcattggagcaggaaaaacacataggatcgttaatcatctgtctaataacggcataaaggtttctggtcgcaaaaggttgacaacttattacagttctgcattgtggagaaacaagatctcacttcatcttcgcttcggtaaacagaacatgcttgttcacacggggatcatactttctaaactcaagcttctcggtgatgcgacgaggattcttgcgcttcacgtagaagaatccagtgccggctgcagaaaccagcctgatgaagatcgaggcacgctttgccttccccatcagtgactatgaatttgtagcagaaggaactggaagccgagcagccgagcaccaggaagacgagcaggggacggtcgtacggggatcagatggagggctggaggaagagtggatgacgagcgcccgacccgaggaagaggagcaggggacggctggacggggatccaccggtcgctcgccttcttcctcaacccgccgctggactgcgtcgcctgcccgccgggcgcgctcctccaggagaacaagcaggtcggcggcccgcgcgcgttcggaggaagacgagcgcccgaggaagacgacgagcaggggccaggggacggccttccggtcgacggacggacggagcgcactgcgcagcgcaccaaagcagccgccacccgcaaggcaacagccaaacagaagctag

SEQ ID NO: 31204 - DNA, 3099 bp, Zea Mays
ccacgggaagacagactgagtctgagagagagagagagaagagagagagagagagcacacgcaagacgagcgtcgccttctccgaatcccctccttgccaaacacgagctgcctaaccaaatccgtccacgctgtctcgtcccctcggcatcgcagtctcctacccaaatcgtcctcgtttcctcctccccgaactgacccgctgttgccgacggctagtaggatgacgaagctgacctcggagctactgcggccggtggttccggcggcggcgctggacgaggcggcgctgctgcgctacctggtggccaacgtcccgggcttcccgggccccgcgcccgcgctatcgctgacccagttcgggcacggccagtccaaccccacctactgcatccacgcctccgcgcccggcggggggcagcccaggcgctacgtgctcaggaagaagccgcccggggccatcctccagtccgcgcacgccgtcgagcgcgagtaccaggttctcaaagctctgggggatcacacagatgttcctgtcccgaaggtttattgtctctgcacagatgcaagtgtaattggaactcctttctatataatggagtatctggaaggaataatatatcctgatagcgcgttgccgggggtaactccatctaaaaggcgggctatatatttgtctactgccaaaactttggctgctatacacaaagttgatattaatgccattggattacaaaagtatgggagaagagacaattattgcaaaagacaggtagaaagatgggagaggcaatatcttgcatccactggcgaagggaagcctgcacgttaccagaggatgcttgatctagctcgttggttgaaagaacatgtaccagaagaagattcctcaccaggaccaggaacaggccttgtgcatggtgattaccgccctgataatctagtttttcatccaacagaggaccgagtaattggcgttattgattgggaactatctactttggggaatcagatgtgtgatgttgcttatagctgcttgccatatattatcgatgcagcacccagtgcaaggacttcttatggagggtttcaagatactggcattccagatggaattcctcaactggaagagtacctttctatatactgctcttttgctgcaagaccctggcctgctgcaaattggaagttctacattgctttttctttgtttcgtggggcatctatctatgcaggagtatatcacagatggactatgggtaatgcatcaggtggtgagcgcgctaaatttgctggcagggttgctaacgctatgattgactgtgcctgggacttcataaatagagtaaatgtcctgcaagaactgccttctaagggttctcaagtcttaggagcatcgtggcaagaatttcacagagaggaagaaagttcaacttctgaaaagaatcaaggaaaatttgttcctagtgaaaaggttatgcagcttcgaaagaaactaataaagtttatcgaagatcacatatacccaatggaggctgagttctacaaacatgcacaatcaacctcaagatggacaattcatccagaagaagaaaatcttaaagcattggcaaagaaggagggcctatggaacttgtttattccgctagacagtgcagcgagagctagaaagctattgtttgaagaccattctcaaatttcccttggaagttcgaataatcttttgctgggcgcgggtcttacaaatcttgaatatggatatctgtgtgagattatgggacgttcagtttgggctccacaaatatttaactgtggtgcacctgatacaggtcctgttgaggtatggcactaaggagcaacagaagcaatggttagttcctttattggaagggacaattcgttctggatttgcaatgacagaaccacaagttgcatcttcagacgcgacaaatatagaatgctcaatatccaggcaaggagatttttatgtgataaatggaaggaagtggtggaccagtggagctatggatcctaggtgcaaaatcctgatattaatgggaaagacagatttttctgcacctaagcataagcagcagtccatgattttagtggacatcaacactcctggggtgcagataaagagaccattgttagtctttggttttgatgatgcacctcatggacacgcagagattacatttgaaaacgtgcgtgttccagtaacaaatatcctgcttggagaagggcgtggttttgagattgctcaaggaagacttggtcctggaaggttacatcattgcatgaggctagtaggagcagcagaacgtggcatgaatctgatggtagagagggccttaaacaggaccgcatttggaaagaggattgcacagcatggttcctttttatcagatcttgcaaagtgtcggattgaactggagcaggcaaggcttttagtccttgaagctgccgatcaactcgatcgacatgggaacaagaaagcacgtggtatcctcgcgatggccaaggttgcagctccaaatatggccctgaaggtgcttgacatggcgatgcaagttcacggcgcagctggtgtctcgtctgacacggtcttgtcgcacctatgggcaacggctaggacactgcggattgcagacggccccgacgaggtccatctcgggacaatcgccaagctggaactgcggagggctaggttgtaactcgagggcgatgtacagctcgcccgtcttgcgaatgaataaagaaggaacatcacccgtcgtcatttaacgtccatgtgaatacttagatgaataaataaatcctactttcagtagcagttactcttattttcaataaaccatatataatatcaatctttaataaatcatatcatttactcatcttcattaaatttatccatcttcaataaaccatattatatatgtgtacatatttacctacacacacacacttattctaagatactctaaatcttgttgagtgatttttttcttccaaaaaaggactcatgtttgtaatatgttattgtaatactattatacatataataagtatcagcgtatgcgaaggtcacgattg

SEQ ID NO: 31205 - DNA, 2867 bp, Zea Mays
gccccgacccggccgatgccccgtccatccaatccaatccaaaccgtcccttgtccctctcttcctcgaaacgcagctatggggactcggccgcggggggtcgtcctcgcgccatgggcggtggtgctggtgctggtgctcgcgcttcgtctggcaggcgcgtcgcatgtgatccaccgcagcctggaggccgaggcggcgccgtcggtcccggcctccattgtcagccccctgctcaggacggggtaccatttccagccgccaatgaactggatcaacgaccccaacgctccgctgtactacaaaggatggtatcacctgttctaccagtacaaccccaagggcgcggtatggggcaacatcgtgtgggcgcactcggtgtcgcgcgacctgatcaactgggtggcgctggagcccgccatctaccccagcatcccgtccgacaagtacggctgctggtcgggctcggcgacgatcctggaggacggcacgccggcgatcctgtacacggggatcgaccgggcggacatcaactaccaggtgcaggtgctggcgctccccaaggacgcgtccgacccgctgctccgcgagtgggagaagccggaggagtacaacccggtggcgacgccggcggccggcggcatcaacgcgacgcagttccgcgacccgacgacggcgtggcggcacgcggggcactggcggatgctggtgggcagcgtgcgcggcgcgcgcgggatggcgctggtgtaccggagccgggacttcaggaagtggaccaaggccaagcacccgctgcactcggcggcgctgacggggatgtgggagtgccccgacttcttcccggtgtccgggccggggctgcaggccggcctcgacacctccgcgcccggaaggaagtacgtgctcaagagcagcctggacctcacccgctacgactactacaccatcgggtcgtacgacggcggcaaggaccggtactaccccgacgaccccgccggcgactaccaccaccgcctgcgctacgactacggcaactactacgcgtccaagacgttctacgaccccgtggagcgccgccgcgtgctgctcgggtgggccaacgagtccgacagcgtcaccgacgacaaggccaagggctgggccggcatccatgcgatcccaaggaagatctggctggaccccaccgggaagcagctgctgcagtggcccatccacgaggtcgagaagctcagggggaaggccgtcagtgtggacgccaagctggtcaagcccggcgaccattttgaggtcacaggcatcgcaacttatcaggttagttttatactctagctacgttttgaattcgatggatcataaaactgtttttttttacttagtaactagtggcaagctaaggccggcggtaacatgtgtgcgtgcgcacacagctggtcacctgtcaagcttcgattcgcagcttgtcggtagtatacactacactagtactagcagggtatctgtctagccagcccagctgccaagatccaatggtccatgcatgcatgcctgttgtcggcggccgtaaaataatccctgctaggctgctacgtcacacacacacacgccggccattccattccgatgcttgtcttgcccagccacttgccagcgacaccacggcgcttcgttcgttttctcttctctttcacccctgccgtacgcgtagtttacgtcgtgcacttgtttctgatttgaagtccgaacaaacaatgaaacaatcttctgccacacacacgcacacgtacctgtcgcgtaagaaatcgcggacacatggggaggaggagaaggagaaaatcttccggtgcaagtgcaatgaaacgcacacgtatgcaagcgcgttattttccaaagagaaaaaaatgcaccgaaatacggacgatgttgtgtgatatggcaggctgacgtggaggtgagcttcgagctggagctggaggcggggacgagcctgctggagaaggcggaggcgttcgacccggcgtacgacgacgacgcgcagaagctgtgcggagtcaagggcgcggacgccaggggcggcgtggggccattcggcctctgggtgctggcctccgccgacctgcaggagcggacggccgtcttcttcagggtgttcagggacggacacggcaagcccaaggtgctcatgtgcaccgaccccaccaagtcgtctcttagtccggatctgtacaagccgaccttcgcgggcttcgtcgacgccgacatctccagcggcaagatcacccttagaagcttgatcgatcggtccgtggtcgagagcttcggcgcgggaggcaagacgtgcatcctgtcacgggtgtacccgtccatcgccgtcgggaaggacgctcacctctacgttttcaacaacggcgaggtggacgtcacggtgtccggcctgaccgcctgggagatgaagaaaccgctgatgaacggcgcctgaaattgaagggaaaaaacaaaagtctatccggccgccacgtgactttctttattttcgttcttcttcttcttcgtcaacacacgtctctgccgccaaaggagaaattgattgatttcaacgtacgtatgtgtacgtctgctgccgatcgaaagagaattggattattataaaattgtttgaggccggtccttccattttctcgtccttaattcctctggcatgcaggatcagtgaccgacgacttgtagtttgcttgagcatgttgtttacgctgctagcttcttgttgtacgatacacatatacaacaatatgacacgatgaataaaaaaagtgctgctaattaattttacagtgtgtccacaagcaacgagagctagcgctgcctttacg

SEQ ID NO: 31206 - DNA, 3051 bp, Zea Mays
ctctctgtctgcgacgactgggtggtctaccgccgttgtcttctccggcgaagagcgcccaccagattatgttgacctaggatcagataaccatgtgctgatgcaatggacacccttcatagcgacccttattccaggagcagcttgcaactgcaaattagggatggctccatgtcctttgagaacaacagtgcagttttggataaacatgaggttgtcagccctcgagttggcatgacctttgagacggttgatctggcatatcaattctacttagagtatggctatcgtgcaggctttggggtctcaaagagaacttcccacagtgttgatggggttaaataccgtgctacatttgtttgttacaaaggtggcatagctaggattaagcctggcctcaaagctcgaaggaggcttgttgcaaagactggttgcaaagcaatgatggtagtgaagtttaatgccagtgagaaccattgggaagtggtttttgtcgagttggaacataaccacccatgcaatcctgagatggtcagattcatgatgtgctttaaagaccttcctgactggcaaagggagcaccgcccattcaatgccaaaactcgattgaacccgaagattcactctggtagaggcaggccacccaaccaaaacaaagatttcatggtgagatccttctcccagtcaaattattccatcgatggggcagggaagactggaaagttaaggtttgcagagggtgacgttgaagcactcttagttttttttgataagatgcaagctcaaaactccaacttcttctataactgggacatggacgatgaaggtcgtctcaagaacgtttgctgggttgatgctagatccagagttgcatatcaacacttctgtgatgttatttgctttgatactgtctatttgacatatcagtttgtcattccattggtcgcatttttgggaatcaaccatcatgggcagtttgtgttgttaggatgtggtctacttggagacgagtctccagagacctttgcgtggttattcaaaaaatggctaaaatgtatgaatgataaatcacctgaagcaattgttacgactcattcaaggccagtagtcaaagcagtcagtgaagtatttccaaatactcggcacagatacaacctttggcatataatgaaagaacttcctgaaatgtctggaagagttgaggataaagaagcagtcagtctgagaatgaaaaaagtagtctatgatacaattacatcagctgattttgagagggagtgggctgaaatgatcaaccaatataatctccatgataaccagtggcttacaaccttgtttgaagagagggcaaaatgggtaccagcatatgtaaaggatactttttgggctggtatctccactgttcgccgtagtgaacgattggaggccttttttgatggatatattacaccagaaaccacaataaagacgttcattgaacaattcgatactgctatgaagctcaggtctgatcgagaagcctatgatgatttccgttcatttcaacaaaggccacaagtcctgtctggtcttctgtttgaggagcaatttgcaaatgtttatacaataaatatgttccagaaattccaggatcagttgaagcagctgatgaatgtgaattgcactgaagtcagtaggaatggttcaatagtgacatacacggtgacagtaattggaaaggagaggaagtttgactacagagtgatgtataacagtgctgagaaagaagtgtggtgcatctgcaggtcattccagtttaaaggtattttatgtagccatgctcttgctgtcttgaagcaagagcttgtgatgctaatacctcccaaatatattcttgatcgatggcgaaaggactacaaatgccctgaggaacctaaggaaacccccatttcacagaaagctgctaaagatacagggaagggctcaaaaccagaaaacattcgggaagatcaagtggacaatctctacaagcatggacaccagtactttgctgacattgtggaaatgggagctactgaccctgatgcgatggaatacgtcctttctgtgatgaaagaagctaaagagaaagtgcgcaagtttgaggagtctcgaaaagagaagaggcctggagagggtccagtttctgctggtaaaaaaggggcgaagttttcgaagccatccacacaagaagttggcaatacaacatcagtttcgactccgactgaagcagtggcttcggtcacagtggtgtcatctcctccaatggcggcagccccaacaatgatggctatggcgccaccttcagcagctgtggccggaggaatgtttttagtaccaatgcacccgcatcccttggtgttcccacccttcccccctgcagtcccaccagcggtagctcctgtagcaccacctgctgcaccagcaaccaatgttgtctccaacacctcaaagaagcgaaagaaaagaaaggggaataattgatcttctgatgctgatgaaatgatgaatgttttccagatctaaaacaagatcagatcggcgaagtagaaaatgagtttgatctcacactacgcatcaggcctcgacatgagagtgagctatcgatttatctcttctgcgcgggttggtctttcgagaaaaatctcttctgcgcgggttggtctttcgagaaaaatctcttctgctggctgtgctactgctacctatgagactacctactgcagtctgcatattcctggggtgttggcttcactgcttcagctagatgctctgctgtggctgacgcagttcagtctaaggagagatgcattttgggctcagcacactgatcttgattactgtagattactagattagattgcctgtagtgtacattatcgtcctcagtgccggaagtaatctaacatgtagtccagcttatgaatgtaaagatctgtttctgattatggattgcatttatggggaaggatctggatcttattaagaaattctgatttacaagcatttgccgtcatttgagtttattggact

SEQ ID NO: 31207 - DNA, 3202 bp, Zea Mays
gttcttgtcaagagcagccgtcagccccgtcaccagcaagactcgccccccactactcttcctcctccaacctcccctcctgtctctccctccctccctggcagcgactactccccaacccgcacgcacgccgtgagcataaagccgtcgcgcgcccacacgcccgttttcatttccatcggttccctttccaaactcaacggccgcggcagggagcaggcacagtcacctccctgacccgttgagccgtcaattttatcccgccccgcgatttcctacagctgccgatcgaggaggaggcgcattgcccgcattcttctccgcttccaccgagagggcctcgcctgatcggcgccgccttggcccccatgacgtgtgtgcgcgccgaggacgccgtctcgcccgccgccgccgacgacgtggcggctgccctggtttccaggggcggcttgatccagaaggtggctgccggcggcgggcggagaccggcaggctcggcgcgctcgctgcagcgctcagcacatctggccaccggggacggcaacgctccggcgccggcggtggaggccagttgctcctggtccggggatgggataggtaagagcaacggtggtgggaagagagatgatagacacaggatgcggcagtacaggtcgcagctcgaacaggaggtcaagaaattgcagaggcagcttgaagaagaggttgatctgcacgtggcgttggcggatgctgttacacaaaatgttgcgcctatactgaagtcttctatgaagcttccacacaaggcacaggagctactgattaacatcgcctccttggagattaccgtttcaaaccttgaaaagaagctaaatgatctgtactaccagctttgtcacgaaaggaacgaaaggttacttgctgaaaataatcagggatgcttgccatctacatcctccgatgagcaccagtcattgtcaacttgcacgtgtacgtgggaagagcacatatcatcgttgagagatttgaagtttgggggatctgaatcaatgagatcaatgagacaggacttattccccgagcttgaagatgaccaggatatgggagaagatcctgagggtcaacagatagtttctttaaacaggctgctagaaaagcaccgagattcttctttgaatagacttcttgaaaagcatcgagatgaagagatgcaagaatctggctccatggaaaatgaaggcaatgaaaatgagcagcctgacacgttatcctttgaacagtctattctaaagataactagcataaaaggagggaatctttggagcaacccaaatgagctctctgaggagatggttcgctgcatgagaaacattttcctacgcttgtctgaatccttgaagatatcgccgaagacatcttctgattgttcatcttcctccgtggagcgtctatcaggctccacgttagcatctttctcagattcatccataatgccctcaatgctacggagtccttcagttgattctaatcacaatgacgagacgatgaaggaagtcaggaactttgatccgtataaagttaatggaaaggaaacccgaagagatatcggaaactatcgttcagcagctgaagtatcttggatgtctgttggaaaggatcaactagaatatgcatctgaagctttaaagaagttcagatttctagtggaacaattgtcaaaggttaatcctagctgtatggatcgcgatcagcggctagccttttggattaacttatacaatgctttgataatgcatgagctcacttcaattcatcgcatctgccctcaatttctttcatcaagtgtcatgcgctcaccaattgtttaccgttgcatttttttatcggaatctatcaggcgtatttggcatacggagtacctcgaaatgacatcaagcttttttctctgatgcaaaaggcttgttacacagttggcggccagtccttcagcgcagcagaaatagagtttgtgattctaaagatgaagactccagttcatcggccccaactttctttgatgttgactctgaataagttcaagattactgaggatcacaagaagtactcaatcgatgaattcgaaccccttcttttgttcggacttagctgtggaatgttctcttctcctgctgtaagtagtacgccggctaatcttagccctgtcaagctgtgcatgtgcttcagcaaattcgtcacttaataagttgctggagaaactagagccatgctgtcacccattctgctattcttgtcctacctaatcttagtcttgttaaggcctgtcatccttcagttctatttgtctgatttaccgttgcttgagctggacggttataagattgctaaaacctaagctattgctgggtcaccctgttgtcgcacaggtacgcatattctccgctgcaaatgttaggcaggagctccaggaatctctgagagactatattcaggcgactgtcggtacaaatggcaaagggaagctgctgatcccgaagctagtgcagagctacgccaagggagctgtcgaggactctctgctcgcagactggatctgccaccaccttgcacctgatcaagccacggtcatccgggactcttcctcgcagtggaagcagcggctactcggagctcgaagcttcaccgttctcgccttcgactccaagttccggtacctcttcttgccagacagctgtggctcccagagccagaagccagaggcaaagcaatcttacaaacttcctgagccgtgttcagaatcagaatagataataagagctcagtttggtatatttggaccatcatacattcttttgcatagcgggccatgtgattggcagttgtatatgatgtaaattttgaggaagcttgaattgctgtgtttgcaaaaccggatcctctccacggagttggtggcaatttgggggtcgtattggttttcttttgtattcacttgtcttccatactgaagataacattcttttgttgtttttgttttatctgcataccttttcctttttttcccctctccttttctgtaaacctgtatggtcaatttgatctgtaacttctgcacaaataaaggtggtgagcagtctttacttaggtttttctgcacaactgattagggacgaagccagtcggtggggcgagcggggctcgacccccctacctcctatactaa

SEQ ID NO: 31208 - DNA, 2581 bp, Zea Mays
agacaagattgcacagatgccacaacaaacttcaccagaaaatgggtaaccccgaccccgaccccgagtctttcggtcttgcccacgctagggtctataaaaccagacgccgagcaaccccccatcatcccctagagccgagagcaaacccacccggcgccatagtagaaacagagaaagagcatagagaagcagtcgctatgatagattcacgtatggcagcgtcaggccctcggtgtgcgcgcagaatcgttccacggagggcaccgaagtggggagcagcgtgcgttaaggcgaatggtggtcgggcatagaggaattcgtcgccggagcatgccttccagtgccgaaccgcagaacacgtgggtggggtgcctcgtcgtcccaactccaggtaagagagccctagaactactcgccttagtctcagcaatgtgtagctaagtttcaatttgaaggggattcattgagggagctcatagtccggtctcggccatggcgcctccatggtggcctcggtccgaaggcattgaggggaataagggagagagagtaggagtcgtcgatctcgatctgatcggtcttgattagataattaggaccgcttcgaagggatcaaatatagatctcagatcgtacggattggagtggatcttggtgtttaaaatctagcctgtcgatctttgatcctgcagatagcgttgcgtgctggtccaaccttaggttcgatctaatctgagcggttggtcgttgatcggatggctcagcccgtctgatacccttttgacctcgtaacaaaaaagccctcaacttttggttaaacaaacccgccgtcctcagccattggggattcttacatctaggtccctgaaacttgtaaaacatcccctgggtttataaaggaattgtagaaactgatttatagtataaaaataattgtagaaggttagaaaaatcatatcttccgcgtttttactctgatttgacatgttcaagttgcgttagatttgtaatgggattgcctagaacaaagagggggaatgacaatgtttttatcgttgtcgatcgtttttcaaagatggcacatttataccctgtcacaaaactgataatgtttcacatgttgttgatttgttcttcactgagattgtgtgtttgcatggtgtgccaaatactattgtttctgatagggatgctaagtttttaagtcatttttggagaaccttgtggtttaaattgggaacaaagttgctgttttctactacttgtcatccccaaactgatgggcaaacagaggttgtcaatcgcactttatttaccatgttgcgggctgttttgaaggataatttgaggttgtgggaggaatgtttgccacatattgagtttgcttataacagatcaatacattctacaaccaagcttagttcatttatggtagtatatggttttaatcctcgtgctccaattgatttgctacctttaccaacttctgaaatagtgaacttggatgctacacaacgttctgaattcattcttaagttacatgaaacaactaagttgcaaattgaaaagatgaatgaaaagtatcgtattgctgctaataaaggcaggaaggaaatgaaattggaacctggtgacttggtgtgggttcatttgagaaaggataggttttctgatttgagaaagtctaaacttatgccacgagctgctggtccttataaagttcttgcaaaaattaatgataatgcatatacacttgagttgcctccagattttggggttagtcccacctttaacatttcagatttgaagccatatatgggtgacgaagatgagatcgagtcgaggacgaatccaattcaagagagggaggatgacgaggacatcacttctatacatacaatgaatggaccgataacacgatcgcgtgcatgacagctaaatctccaggtacgttctaccctagtcaattgtgtttcagagcttacgcttggggccatggatgttttgatgattaggaaccttggagagaaccagcaaggacttgggaaaggccaaggtgttgagtaggaggagcaagggcgcccacaacaggaaggagatcaagtccgactcggcagcgactccatctcggggttcaggaccagtctgcactaaaatgaacgcccaagatgcatctggactccgattgcgacggaatttatatggttggaacgataaaaagattatctaaccaacccaactggttccaccttaaaattcatccggagtcaacgggaatcgtcgaaaaaaattcagcgttcagattctgttttaatgctgcgacaccgtctgttgggccattgggccgtgtatcgcgtcggagcccattaggagtgagtctaggggtcacgcacgccctaatactctatttattcagcagccgccgccacattaggtttgggttttgcttagatcaattctgtcatcgaatagtgttgtcgtcatcggtttgtgagaccccatcccataatcaatacaattttggttgcgtttctttcctgttcttgcttgtgttcttgattgcgcttgcagggataag

SEQ ID NO: 31209 - DNA, 670 bp, Zea Mays
gtgcataaggacccagcgatcaggagctgactgttttgtcctccagcaatcggccatgtcgtccctggtcaggtcgttcgggtctctctactcccagaagctccgctccaccacccgtctcggatccgcgacggcggcgccaccgcgtttccaggcgttggtccgatcgggattctcgggctccagccacgggggagacgtgagacgtccgccggctcggccgagccagcatcagtctcaggacaaggagcggacgcctttcttcatcttggcaaggctggccgtcggttctattcttgctgctgcagcgccaatgctgcattccagatgggcgtcgttcctgctgattcagagtagagcaaagagccctgtaccgcgcgccgcgaaactctgcaccgatgcaaaatttaactctgcgccgatgccatcaggtgaggtggatatggtgaaagacacggcggaggtagtggcggaggccgtcgaggacgcggccaccgtcgcagagaaggtgtcgtcggaagtggccgagcagctgcccgagaacgggaggctgaggacagcggtcgtgctcctggagcacgcgtccaaggaagtcgccgaggaggcacaccttgcacagaacatcatccacaaggtcatcttcctgtgggaagtcacccatgagaacgga

SEQ ID NO: 31210 - DNA, 1489 bp, Zea Mays
ttcttggaaacaaggacgtgaaaccccccattaagaatagcttaatataatggtacattttttggggcccatagttttgggcccagacggctgcccaccctaccgccctcgcggaacacgaggcttattataataactatttttaggagtctgaactctgaagctgaccacggccaggtttggctgtccacgtcatccctctgcccagagcatcgttccgaattcccaacgaaaccggagtaccggacacctctcgcaccgcacccaccgctgctccaccttctccacgagcccggcaacgggaaccaaggaaaccgaagccgcgatggcgagcttcttcagggacgcgcgcctcccgcagcagcgcgtcgtcgagggcgtccccttcccggcggtgctcgtcccgagcgctcgtgcgggctcctgcgccggcggggtcgacaagttcctggcggccgtgcgctgcgagagagcgtcccggctggagccgctagtgcgggacgcgggggccctgctgctgcgcgggttccccgcgacgacggccgccgacttcgaccgcgccgtcgacgccttcgggtacgaggagctgccgatcgtcggcagcgtcgcgccgcggaccaacgtcgtgggccgggtgttcaccgccaacgactcgccgcccgatcagaagatccccttccaccacgagatggctcaggttccaacatttccgtccaaattgttcttcttctgcgaagtggagccaaagagtggcggagagacgccggttgtaccgagccattatgtctacaagaggatgaaggagaaattccccggatttgtggagaaactggagaaggacatgattgtatatacaagggttttaggagagggcgataacccgtcctcgtcaatcggtcgtggatggcaatcgacatttctcactaaagataaagctgttgccgaggaaagaatgctgctgccggatcaatcgaagggggtgctggagtggaggaggaaagatctgtttgctcaggtctagatgtgcggaataaatgtgccatggccgatgctcagccggtaaattattatgtgtcaaaaaaaattatgtcctgcacccactcgttgtattagtttggtcgtatttagttttttgggcagatctgttcgcgttggtcgggtcagacaactcatgctcaagtctggatgtgaggaataaatgtgcatgtgcgagatgtgaggaactggagacgaaaataaataagaatatttttcttgggatagtcttttttccaaccatgactgtaaactaaaaaactatatctaagtgatcattctgttttataccatcatgtcgttgcaaccaaacacatcaagaggagtctgaggtcgaagctggtagccagatagcggcccgtaatcatctttcaagagaaagttcaattctgtcctgctgcatctgtaaaccacatttgtaacaattactgagcttgtgcaaactgcaaactag

SEQ ID NO: 31211 - DNA, 3100 bp, Zea Mays
cgcgtcctccaatcttcgcccccggcaagcaataccgaaaaagccactccttttccttctccgcgcaaagccccaaaccgccgcctcccgttctctcgagtctcgacctctcctctcctctcctcttctcaggtctcacctgagtcacacctccacagacactgagacacacacatacgctatctctcatcgtcctccactcccggcaacggaagtttcactgctgccctcatctaactccccgtctcactgcatattgtcaactgtgcgtattttcagtctgtagaagccatcttttaaagaacattttgggcagaaattgccagtagcatttcttgtggttaacatggacttctcagctggttcctacttctcatcatggcctatcaattctgcttctgagagctacagtttggctgatggttcagcggaatcatatggagaaggaagcatgccaccgtcaacctatttcatgacagctagatcagatcacaatttaaatttcagtgtgcatgaacaggattccactatgcttccaaacgaacagttgacctatgctggtgctggccagattgatctattacctgctgagactctatctagggataagcttcctgaaaatcttctggagcttcaaggacttcagaatatcagcaacctacagagtaatttagtggccccaggggtgtttcagcacaatttaacacctggggtctttcatccacagttgaacactcctggactttcagaactgcctcatgccttatctagttcaattgacagtaatggaagtgaagtttctgcttttctcgctgatctaaacgctgtttcttcagcgccaactttatgttccacattccaaaacgcttcttcgttcatggaaccagtgaatctagaagctttcagtattcaaggcgcacaaagtgattgtgttttgaacagaacaagtcatccgaatgggaatatctcagtatgtgacagtgctgccttggcatcactacatgatagcaaggagtttatcagtggtagtctcccttcttttgctagtgtccaggaaacaaacctagctgctagtggcttcaagactcagaagcaggagcaaaatgcagtgtgcaatatccctactttcactgcacggaatcaaatgtcagttgctgcaatgcaaggagcacttgtccctcaaaagattccttcacggatcaatgataataaaagtgagggtcctgttagccatccttctgatgtacaaactcaaccaaattcagctgttaatggtgttggtgtgaaaccacgagtaagggctcgtcgtggacaagcaactgatcctcatagtattgctgaacggcttcgcagagagaaaatttcagataggatgaaaaatctgcaggatcttgtcccaaattccaataaggtactttttttggagggtgggggtgggttgacttgtctggtgcatactgcaggtattaaatttggacatggaactaattatcaaagctttgctacttatatacgtaacaagaacatgtattttctagttgtggcttgaaaactgaagtgacaaatagaagggagcagcaattaaatttaaggttctttgggatttgcgtgaaagagcctctagttgagttgattaggtggtctgagtatctcggccggggagggaaagaccgtcctcctggtattatattaagaagagaccgaaacatggtcccggccaataaacccccgaacatcatcactaacgggttgatcaactgcccactctgcaacggcccagatggagggtggcacgcaggatatcgatcccccgagagcgggcgggatacaacgaggagatttttttaaccaagtccaaaatttgcccactcggaagccttaaccattacgctagaggccctttcgcaggtggtatgagtaacactccttaggttctgagtttgggccaacaatagtcattacgtattttgccattggctcagttccaccccgatgaagcttcaaagacaggttttgtgcttgtttgtttggattggatgtattaaatgctacattccaacgaaacatcatttatccaattccaaattccttgttcctgttgatgcggagcttgtttaatgcatggctaaaataccatagcaaggaagacaacagtcttacctttcattaaagaggttcatttgtttagttctcttaataatatggagtggcaaatcttttggtgcaagcaggcagacaaggcatccatgctggatgaaattattgattatgtgaagtttcttcagcttcaggtcaaggtcttgagcatgagtagggtaggagctccaggagcagttcttccccttctcacagaatctaagactgagggttaccacggccaacctctgccacaaggattactggacgcactagactcggaagacagcttcgtcttcgaggaagaggtcgtgaagctaatggagaccagcatcaccagcgcgatgcagtaccttcagagcaaggggctctgcctgatgccagtcgcccttgcttccgcaatatccacccagaaaggtgtgtccgctgctgcagtccctcctgaacggtgagataaagacacgctcctcccccatgagcacgaggaaacagccgcagatgacagaactcagacggctgaagaatgcagcaatgcaaagcccgtagagtgcagcataggaagttagtctgtgaccagagcgcatggcctcgtctactaatttcgctctcagaatcagctttttttttcgtacctattgcgcatcagttgattttgcctttttgccttctctcttttctttttggccgtatttcatcaggttgcatataaaaaaaagtaaaatctactggttctggcgttctgctatatgggatcttgtgatcaggcatctccaaagtgatcctcttgcccggctgtcagtttgttagctgtagccatctactacctcagtttgaaaaactgagtttatgagctgccccaagaaacctacttagctttgctttgttgtcatggccatgcaatgaatttggctgcctcaaactttgaacaaactagaagtgtaagcaattagaatgaacaacaaca

SEQ ID NO: 31212 - DNA, 1924 bp, Zea Mays
cattctcagtggaagttttattgtacggtttctaaaagtgacacatcaacttttatctataaaacagtgtattctgagtttcatctagataaaatcctctcttctcccataaaaccctctccatctctctcaccataaataccttgccatatcatcaaatatgatgatgtgtcttatcatttaacgagaataaaattatgataaaacttctactgataatggctcaactaaggcctcttttgtttgtcccggattcatccaggaactattctagttgaccaaaacttatataaattagataaataatttagatcctgttcgattttcagggattcgagcctcggattgaattctagccggattacttctctaatttatatagattttgacgagctgtaacgaatcctggtctattccggtacaaccgaacaggcccttagctaggaaccattccacggttagtccctgcaaggaaccattagggcctgttcgcttcttcaggaatgaacccgaatttattccagctcattaaaatttatataaattagagaagtaatttggccaggaactatttcaaggctccaatccgtgaaaaccgaacaggcctttagctggtttataacggcctatgcggaatgtaacagctcgttaataaaagagaagcgaggaagagaaactgatcgtgcacgaagctcatgcttcagaagagaatcgaggaaagagaaattgatcgacgcacgatgtaccaagctcgtgctttagaaagagtagagagtagagaaaggtgtagagatttgccggtttggtggcggtacgcacgagcaggcgcccggcggcgtacgaaattagctcgggggcgtacaggtcgctctcgtctggctcggggctgggtccgctgccgtggtggccgtccaccgggcgagccgtcgaggtacccaatttctgccatggcgatccgcccggaccaatgctcgattctccatctgaccatcgtcggtaagcctcctgccccactaccgccctccaaagcggcgcgcgcgccaccgccatctccacccacgcccaccttgctgccgcggccgccccgtaccgctaccgcgccctcgatctgaccccacggggcaggatggacaaagggaaatcggtggtggccgagctggtggcgtcgttcagcgatgtccgtgtcacgccgcgccagccgccagaaccccaagccaagagcttcctaccgtcgccctccttctgtaagctccctgccgcctgttcgcttatgttgggtaactggctaggctgactgtgtattggttatggctgcttgaagttttccgtgatttatttcatgtgttggcgtctcctgcaaaacgagagatgcacataattaagaattttctaggatcataaagcagtgatgggtttgattgattaactttagggcatttttcctgattgcccaccaatttccgccatggcaatccgcccggactaatgcccgattctccatctgacgatcctcggtaggtttggtcctgcgtgattcacatgtctcgtcaggttcttgcgggttcttttgtttttttgttgttgtggttcgtcttgtggatttccttgttgcctggtcgagtatttatatttttcatcggcccattcgcgacgattctcttgctgtcgcccggagagaaaatgcttctggcgtcttcctcaccctcccgttctatattgcagaattgagctttttcctgcagagtcttggattttgttgcattatgactttgcgatcatcaatgaacatagacgaaaacatatactccatgacagcgaggatacaacttttcacccaaataaattgtgacagctactgcaccccttgttaatttgaaacacgtacgtattatatgtatatatgcatatgaagagcttaacttag

SEQ ID NO: 31213 - DNA, 2812 bp, Zea Mays
cgctttcttcttcctctactcgcgccgccgcgtctcaagtctcaacgctgcgccaaaacggcaaaaccctaccctgacctgaaccccaaacccgccgcgcctcctcctttctcgtactgcaattcgggactagccgccgccagtctcgatggggaagaggagcggcagcagtaggaaggacaagaacaaggtcattctcccaccggagctgccgccggaaatacacgacgatgaggtggatgtcagcgaggaagacatcgagttctatgccaccgacagcagtaacgttacacccttccgccacttcgacaagaagtccatcgacaggtatgtcgggagggttgccgggcgcgacgagggcgaggtcgagcgcctctacgaagagcgccagaagcggaaggccacagaatcgtcggggagaccccgcgaggatgatgattatttggaggtcgaccccgtcgacgcactccccaccaagacgctgcaaggggagctcgtctacaatagaggaggaagtgaaggaggaactttcagctgaggaattattcgaaaaaaagaaggctcaacttgctgaactggggatgtctatgcttgaagatcctgagtcgaacattagatctctgaatgatatgctaagtataagcaatgacagagaccaaaaggttgttaaacttggtgtgatgtctttgcttgctgtgtttaaggacgttattccaagttatcggattaggcagctgacagaaaaggagctagcagtagaagtttcgaaagaagtgaagaagacaagatattatgagtacacacttattcgctgctacaaggcctacctgcagaaattgatatcgttggagaagcagccctacttttatactgtggctgttcgttgcatgtgtgctttattagacactgccccacattttaacttccgtgaaagcctattggctagtgtggtaaaaaatttaagctcctcagatgatgtagtaaggaaaatgtgttgtgaagcaataagatcattatttataaatgaaggaaaacatcgtggtgaggcaacaatagaagcagttaggttgattgcagatcatgtgaagctcaatgattgccaacttcatcctgatagcattgaggtcttcctgtctttgagatttgatgaagatattggaaaagatgagattcaggaggaaaaggtgaaaccaaagaggaataaacgttggcaaaaaaatcaggaggttccgaagcaattgccagttaatgataagaagaaaaccagacaggaactgatctcaaaagctagaaaggaggttgatgcagaccttagagcagtttccttcactcttgacccgaaggagagaaaagggatacaaaaagaaacactttctgctctgtttgagacttacttccgcattctgaagcatagtatggccgcttcaaattcaaggactaaggtgaataatgtttcccctggtggctcacacccacttctcactccatgcctggagggtttagggaaattttcacatttaattgatttggatttcatgggtgaacttatatcttgcctcaagaagctttctgggtatagtgaccgacaagacgaaattcccaatgataatgcactgtctgtctcagaacgtctgcagtgctgcatagttgtgtttaaagtctggaggagcaaccttgaggcactgaatgtggatctgcaggatttctttgtgcagctctataacctcatactggagtatcggcctgacagggatcatggcgaggtattggctgatgcgctgaagacacttctttgggaaggcagacagcatgatatgctaagagccgctgctttcatcaaacgattagccacatttgctctctcatttggctctgcagaagcaatagcagcattggtcacactgaagcatctcctccaaaaaaacagcaagtgccgcaatatgttggaaaatgattctggtggcggttctctgtcttgcttagttgcgaaatacaaccccgaagctacggatccatatctgagtggtgcactcgcttcagtcctctgggagctcagcctcctagagaagcattatgacatctcagtttcctcgatggcttcgaatatcttgagtatggcaaacctgaatcccacccagaacccagttcctatcttgaacgtgaaccctcttgaagcgtacagagacctgtcattggaaagggaactatcaaaaccggctagcaaagcattgccactgaacctcaaaaggaagcggcgtgccaaggagtttgttgcgctaagcccagatgtgcttcagaaggcagattgctcggtggacaaagacgagctcgaagagaagctgcagagccatttctccgtgctaagaggcatctctgagaatgagaggttgagggcagagctgaaccacacactgtcatccataaacatgtacaaggagtacaagaagcagaaaaggaaaaacatgaaagttaagaccggaaggaaaaaaaacagcaaggctttagccgtttaaggctttagccgtcttatctgttccggaggtctttgcgctcgaccggtggatgggtgtaattttcagttttttttgggcatatttcccattgactactatagtgcagttttctgccacccttttgccgtttctgcacaccacactatgaaagacttgtttgcatttgtgattttgggaaatggtttagggaagttgtagtttttccccatttttctcagtttctctatacgattttgaggggaaagcggatagattcttccctaacgcattatacattgatattcacttttatcattctc

SEQ ID NO: 31214 - DNA, 1393 bp, Zea Mays
aagtgaaaacggagttcttcggagtcctatatttgtaaataactgtactattgcaaagagcgaacgggggcgacctccaggaaaatcgcagagaatgagggggatcctcttcgggccccggcggcagccgccgccgctcccgctcttccccgccgccaagcgctcctcggcacccgcgaaccttcttttcgctcgcctctatcgcttcctcccggccagccccatcctccggctccttctcctcctcgcactcctctccctcatcccgccggccttcttccacctccgtctccgccgcttccaccaaatgcgcgagaggaagtgcgggtggatcgcgaggccacccatggtgtgcgcgcacggcggtgactccaccaacgccttccccaattcgatggacgcatttcggatggctctcgacgcgcgggtcgactgtgtggaggtggatgtttcgaggtcctatgatggtgtgctctttgctctgcatgacagggatctacaaaagatgtctggtaattctacagcaaaagttggccactggaccacagatgagttttttgtagataaaagcactaaggacgaggtttcagttgtcaaaaagagtccaaaatgaggaagttcccatggcagaggaagctctggcgatgatatcacaatcatttaggcaggtcgttcttgatgtgaaagttggacccccttcatttgagaaaggtttagctgaggatattttgtctcttctcaggagaacaaattgcaagaattgtcttgtctgggcaaaaagtgatgatataggaagagagataattaaattgtctaaagatgttattgttggctatgttgtcatggtggataaatttaccaatagaagaacggagttagtgaggattgaaggggctaaagttgctggcatatatcatcctttgatccatgagaaggttatgaaggtcatgcgcaggcatgacaggagagtttttgcatggactgttgatgatagcagctccatgaagaagatgctgtatgagcatgttgatgccattgtgaccagtaacccttctcttctgcagcagcttatgcaggagaccagagctgagtgtatggaagatggttttgccttaccataggaatttctagctgtcagaacataagggtttaacttctcagcagagaggaccaactagcgagttgagtttgagggattattcataaattagatgataattactttagtttttggcacattccgcacttctgtcatataattgaaataagaaaatatggttagcttgtcatgaaatatgttgtttccttttacagcttgatcagatcaggtcagtgagaagatcgcaacaataatatcattgattaacagaatcatgctttagttaccattgat

SEQ ID NO: 31215 - DNA, 3014 bp, Zea Mays
atggaggccgctgcttctcacctggtggtgtcggtaggggacatggaggtggtattgctggatggtggcagggctggatcacggcacaataacatcgttggaggcgcggacgggggcgtagcgcaccggaagacaggttcccgtcgggtacgggtatgtggacgggcgggtaacggatatccgttggataatggatacccggcgggtacgggtactgatagatccgtacccacgagcgtaaatgggtatgggtttgattttatctcgtgggtatggatacgcgaaccatatatccgcgttctacccgcccgattgccatccctactggcgggggagttcgactgctggagaacacgtcggcgccggagggcagggcggcggaggactctgacggggggcgtggtcgggggcacaacgcgccggaggtccgaccagttgttgggattcacgggaaggcgggagcagtgggccccaaaacattttgggcttggggatgggcctttccctgctgcccagcgcaatcggcgggcaccacgcgcgcgcaataaagcaactcctcctgccgcgacgcccttctcctccaccgctccctgccccgtggctccgcttcgttcgtcgccgcatcgccgagggagagggcaagcccagaagacgcctccgtcgccgctctacctgaggtcggacaatcaggccccgctaccgctcctaggtcgcgacccctctccggttctccgccccgaccgcgcccttggcttccaccgccatcaccgcctccacggccatcaccactgcctcgcccaccggcgtcacggccccgcccttggcccccaccgacacgtacacggcctacttcgtggccgccgtcctccgccgttgcgcacgctgagccggaggttggagatctgcctcgtcgagctggagacggaggtcagcctccgcctacgaatcatcatcatcagccaacagtggttgattcgactccttgtgccactgagaagacctaagtaaacccaactagtctcgcttccttctgattcatttcgttggcacttaaagttcaagatagcctgctgtaggccatcggccgtacagatgattgatgatgaggccaactttggtaatatccttgatgcctcagaagaagttcaggttactgcaaagttccgtcccaaggaacgacccaaaccccgaaaaacagctctatcatccagatctgcagcgcctaatcctactgaagaaactggagataggaaagtaggaaccttcaatcaagtcaattcttctaaagagctcacttgccaagaaaggacatccttgatgtgccctagtactgagtcagttgatattatcgctggttctcaaggtattctcgatacaccattggaagatgcattggcagttccccagggttctctgcctggtgcttctgctgcaggtaggacttctcaatatggtgaacacaatgatgatccttctaagttagctacacaccaagaaaacttggtggtttcagatatcaacgtcccacctaacagttcatgtggcaaggctattgatgatatagttgaatttgaggacatgtgtgatgtccaaattgaagaggaaagagttacaaagttccaaccaaaggcgcaaacgaagctccttaaggaaatagccaaatctcggaagactaaccaaaaggtggaaacttccactgtagatgtggttacacaaaatggaaagggcaataatattcagacaaggctccatggcaatcaggtacaggatcctaaaagtcatgaaagtgtgcagatcccagattctgaagaattattagcaactgataatagtaaaggttgcaatttagctaaactcaacaatgtccttgaggagtcagtccaagaggaaacaatagctaagtttcgttctgatttgcaaccaaagcccaggaaggcttcatcccatgttgctgcgattaaaattaatgttgctgctgttgctccaatagttggagtttgtgacagcaacaatgacatgtacagagaacctaaagatcaagaaaccatcaccggtccagtggtttggtcaccacaggctgtgcatgctgatgttgatttagacaatcacaatgaaccaattaatcctcctatcgatggtactcaatcaatgattggcgaagtcccaagtacagcttttacaggaagagaaaagggaaaatcaaaatctgtatcttttgctctatcggatgcttctggggtagctacccctatagataccaattctgagatgggtaacatcggcgattcctgtagtgacaaattgactgatgaaaatttaagtaactcatctcggcatatcgctgaaaagcattctattaccaaggaccaatattcaaatggtcaggaccatgagcgggagccactagatcatgctgttcaacagcaaccaaaatcggatgttggagaaagagcatcatcaatgaaacgacgctgcaggaaaaaggtgcaaaaagttgggacacctaatcacactgttgatgattattttggtgaagactgtgttgaaccttcattagctgaagaagataacaatactggtgatgattacactactggtaataaccataaggctaggaaaaagtcaaggggtggtgtagaagagtcacagcagcagaaagttcaaaaaaataaaagcaaggtgtcttcacggggccgcaaaagaaccttgaaggatgaaacggcagagaagcctgagaagaagctaacccacaggatacgtcagaggataacaaaagaggttaaggctttactggaaacacctcgtgagcagataaaacccatgaagctaagcgcatcacatctcaggttgttacaagaagctagagagcgtgttaatccaaaagggattccatccgggccatcttctaatacaaggtatacttctttttttcttctatttctctatgcatgttattatctaaccaaattagacttgggacttttggttgggcataaatgaacatattggaccag

SEQ ID NO: 31216 - DNA, 1506 bp, Zea Mays
gcagctgagttgttgacaaacaacaagttatctgagttggcatgtttggcattatatctcatgtatgagaaaaagcaaggaaaggattcattttggtacccctacattaaggaacttgaccgacatcgaggaagggggcagctagctgttgaatcaccacttctatggactgaaagtgaactggactaccttagtggaagccccttgaaggatgaagttgttgctagagatgaggcaataaggagagagtataatgagcttgacacattgtggtttatggcaggttcactatttcagcaatatccttttgacatacctactgaggcttttccgtttgaaatattcaagcaggcttttgttgcagtacagtcttgtgttgttcatttgcagaaagttagtcttgctcgaaggttcgcactagttcccttggggccgccactattgacttacaagagcaactgcaaagcgatgttgacagttgatggtgagtctgttcgattggtggtggatcggccatataaagctggagaaccaataatcatctggtgtggaccccaaacaaactccaggcttgttctgaactatggttttgttgatgaaaacaatccctttgatcgcatatcaattgaggcatctttaaatacagaagatcctcaataccaagaaaagagaatggttgctcagaggaatggaaagcatgctatccaaaattttaatgtctatgtaggcaaagagaaacaaactgttgcagaaatgcttccttatttgagattaggatacatttcagatccagacgaaatgcagtctatactctcttctgaaggagatacatgtccagttagtccatgtacagagcgagctgtacttgatcagcttggtggttacctggaatctcggttggctggttatccaacaacattgaatgaagatgaagctatgttggcagatggcagtttggaaccaaagcaggaagttgctactaggcttgtgaggttggagaagaagatgctccatgcctgtctccaggccacaaatgagtttataactgacttgccagaccacacagtatcaccttgccctgctcaatatgcccctgaaatgaaatgaggttgcatgttgttttctttcccaaatggtcatatcattaagaatgtcacaatttgatcaatgtgcatatctttttgaagaccatatatgctgcaaggtggatataatatttgaaagaatttgctccttgttttctttagagattacgtaaacgcaattgcttgctagaaggaaatcacatctcttgatgttccaagttataagggtatcagtggtcttcagcgggatatggtaatggtctccaacgggatgtggccatgttgtagttattagttgcaatgcaccaaagtagtggcggacttaggatttgaacctcgggtattctaagacataaaaaatggtatgtaataccatatacagttcagtaacacatatatataatggtaggcgtttcggaga

SEQ ID NO: 31217 - DNA, 672 bp, Zea Mays
atggctcgccccgcgccccggcatgcggcatccccctccatccaggctccacccaacgctgccgcctgccgcctgccgcctgccgccgagaccctcgcgctcgtcgatcgccgtggaaatgcatctcgacagcgaccaccccgccggcgttcgtcccacgatacgggccccagggcctgcgccgccgcaccggcccggtcacgctcaacttctcgagcccccgcagcggccacgcggggaccggaggcgatcttccgggaggacgtcggtcacgccgccgccgagacgtacctcgtaacgggactcgccttcacccggctcggatacctcggggctggttatcggtggatatgaggatatcacatcttattgcactccgtgtatatgctgttttactcatgcccggtttcatagaaggtcaggttattagaagtgtagtactgtagtctatggagaacaaccaagaaatgggtcagctaagtttaaagaaagtcacgtgctatatagcgtcctcgagcacttataacagtagatccagagaaattatgtgtgttggaattgtacatgcccagagataacagcaaatcaagtccgttgtggcatttgtaactggaggagcttggatcatcgggtaagtgacagtttcctcataaatcacactacattacaggg

SEQ ID NO: 31218 - DNA, 198 bp, Zea Mays
cgtgtcgcgccctcgacgtgttcgacggaatatcacagtgtgctacacccgatctgtgcagccctgtcgcgacctcgtcgaaccccggtgaggacccgtttctccctgtgttcattcctcgccagtactaataccaaaaatcaagttattagatgctaatgttatgtatatgtgtgtgcgtaatgtgcgatatgtgag

SEQ ID NO: 31219 - DNA, 3923 bp, Zea Mays
cttgctcttgctcttgtattcttgcttatactgtgggccatgctcgggaactagggctgaagattgatgcagtgccattgtgccaataagcaagaaaggcccactaaagggcaattgacgctgggcggcgacggcggggggagactgagcggccgaggagccggtgtggcatcggtgcatcgcagcggcctgaggtcgcgagcagcacagcagggtgcgccaggcgccgacgcggtacggggcaccgcgcgacgcgtgagcgcgtggccggtctcagcaccaagacgcatcaaagccggcgctaggcagggcactatcgcgctgctgcgcagctgtgcctgcgctggtccctggaggattagtgacagcactcaccaatttgtgttttgcagaattgggagaaatcaaataacttcacaacagatcaggaagctttagagcttggcaatggagatgagagcccgggaatctgtaagcatgtcgaaggatctaactggggaaatcacaccttttgccactgccctacatgatgtgttcctccactcccattgctcatcatgcttcaccaagttacttccacaaaccccttgtgtcatgtcttgcatgacatgctgttctcttcgatactgctgttcagagtgcttacgtgcggattcagtggtgcatgtttcctctggtgaatgttgcttttttgtggatcacctcaagagagcctccccttcctatgttactgaaggaacgagtgatttgcgtgctgccctccgccttctgtgtgtgcttgagatacatggtcttgtttcgcctgattcaatcaatcactacagtagaattggtggactttcagcaagtggtattgaggaagctttgaaggaaggtgaggttattgctgagaggatactggaggggagcttattgatgtcatctgctagaaaatcgagggcacagacttgtgttattttttcagacaggcttaaacttgagaagatggcattatgggcagtgattatcaatagcgtcgaggtgcaacttagtgaagggttagctttgggagttgcagtgtatggcccgagtttctcatggttcaaccatagttgctttcccagtgcttcttaccggtttgtactggctccaaggaatgaagactgtgcttcacagaaatcaaaatccagtgtagtccctgctagcaaaggagttgcagctgatgtggtaaaggagaataatgaccattttgtttaggacctgctaaaattttgcttgtgtcatacaaagaataagataaaatatttgaatactgttcacaacatactttcattatcataaacaagtgctatttgaatgtttatacataaatggttcctcaaacactttcataggctgaatctaaatattcatgaatatactcattaactcatgtttaaatttcaatagttagacaatatttatatagaatttacttgagagaaaatcattaagcctattattgtgcttgtttttattgcagtggcatgcttggcaatacgaagatcattctactcatggtacttcattacgttctacgttagtgtgcaactattaaattcatcactataaactttctccgttactctttatagcactgtgcaaatatggcccaagagttgttgttcgttgcataaaaccaattaacaagggagatgaagtgtgcataacatacattgatcttctccagaccagggtactatttcttgaattttgctgaacccatattttgagtcaccctgacacatgaagtcagtatacccataatattatagatctccatatattatcaacatcaacatagccttttagtctcaaacaagtcggggtaggctagagttgaaacccaacaagaagtcactaaaaagagaaagagagagaaaggggaggggggaaagcttttgagagaactaaaaggaaaaagacctaatcacggttcaagcacgtggatagcttctttccaagcacttctatccaaacacaactcctttcggatatttcattcattcaattcccttttgattgcctcctctcatgtcaagtttggccgctctctaccgctcttcatatactatgtttccaagaatctaatcatggtttacttgtgcagttcattgtagtgttcgctgcctgagttactgttatacacagtatttaatatttacatgattgacatatcatattttgccttagaattttgggctgtaatttagaacaaaaatatcaaaggagtaaaggacctaacactcgcactcagttttggtatttttgtttcttttgagcagctgttgttgatacatgacagtgccctgattagtagtgtattggtaatttgcttgtgaaaaaagattatcttgactcacatggtcacagtcacacttactgtattctgcaagttacacactagtgcagtagtgcctagttcatagctacgccacttgataaaattgtcaacttatcttgaaaactttggtttctctgctttttagcagaggaatgcaaaatgttgagttgttgaccaaccctgtccgttttgatgtagctttctatacaatagtattaatgtttttcactagcgattagtcaatgtgtactggttatcttagcaaaatttagttgatattgtcgaagttccagattgaggccaccatccatagatggaaaatagacttttgtggtatttgtaccggatgtatttcaaattaaatattttattcgcttatgttgggatgctcataagagttcttttcaggaagcaagacattcggatttgtggtcaaagtataaatttatttgttcttgcaggcgatgtattgcatcaccagagccatacactgatcttattctgaattgtgatgtgagggacttggataaagcagaagcagagggtactgttacacctccagcaattgagaatttgggtgatgtcctacaacaggttggtgagtggtttgaagcaagaggatatttcagggagaaaacatatactacagcctcttcaccatatctgtcttactgcttacatgacacttgcctctgcttaccggtttcgcgccttaagtttagaagaagctgtccgttcagatggagaaaatactgatgaattttttagaatggctaaagcagcagcagcgtattccctggtacttgcagggagtacacaccatttgttcttatcagaatgttctcttatgatccccctgtctcattttttgttaaacactggacagtctctgttatatcttgttgagtctatcaagggaaagacaaggcaaaatatatccgaggccaggctcagcttttcttcatgtccagcaagttctacagacaatgattctccaccgtaccatgtgttcagatcaacctgtgaagcgtttggcaagcaaatgttatccctgtcactgcggtgctggtcatttctagtgcgaggtttaccctgcctggaaaagataaagagccccatggaatttagtatgcccggaacaacaatatttcagtctgtcctttctgaggaagaccatgccaacctttccgcgcacgagccagtaggtttcacggagagacaagcggggtgcatccttagtttggctctatgttgtatcacctactgcaaatatcttgctaccatatgctacggcccacatcattatctggcagaccatgcaaaatatctacttgaaggtatcgatcctgcacaatgaatcttctttcttggcataggtgtgttgtgaaatcttatgctcttatgagttaatgtaaaacgtgtcgtgattatcaaggctgttgagcttattttctatatgattgtatgctgagctcgttatttattattttgtatggaagcaccatttttctaaaaaaatttggtcactgggaagttgtatcactgatcttgcacctttcct

SEQ ID NO: 31220 - DNA, 3549 bp, Zea Mays
cttctggcccggaattctgaaccccgaagctgtagatttctgccaagtgttccatggccccggttttgttcgggacccaaatttccgcgcacttcgtcaaggtccggggtgaggcgcagcgcccgcaggatgccaaccgagcagaggcgctacatgcccccggcccattttcttccggcggagtcggaatcgtcctccttccctgacgagcttcgcttgcgtcctgagaggcaagttggacttttgaagcagggttgctttcctgagcatgctggcagatttgcttgttctcccctgcaaaagctcaagtgtattggcgcaacagtagtggatcagctagatattatgcagccacacaagctaatggaccagaaagtgccatttagccttgatgacaagttgttggatgttaagctgccaccatcttcctggagagaggatcaggatccagcaaaccaactcgattcttttcccaagccattggtttcacctctagaaggtagaaggggaagtgtaaatgggacccaatatgaaagtggacttttctctagctcccttccagaattttttgacaagaaaataagattaactccaaagaacagagttgttggtcatctggttggaaaagttaaccatgctgatgatgaaccatttgagttgacaaaggaaatcgaggcccaaataattgggcaacctgctccctgatgacgacgacttattgtcaagtgtttgtggtgatattgggtataataccaatgcgaataatcaggatgagattgatgatgatattttttgtactggaggtggaatggaattggaagcagatggaaatagcaaattgttaaactttaatggtggagccagtcagactaggtcaattgtccaactcaatggtgagcgatcctcgagaatcctttttgtcggaaacattgatagcaacgtcgaggattctgaattgaaattcatgtttgagcaatatggagacatgcagacacttaatgcttcttgcaaacatcatggttttgtgatggtatcttactatgatataagatcggcagaaaatgctatgagggcccttcaaagcaagccactcagatgtaggaaacttgacatacgttactcgagtccaaaggactatcctttggataaagatatcaacctgtccatggtaatagttaatcttgaagcttcgataactaatgatgacctgcaccagatatttggtgtctttggtgaaatcaaggagattcaccctacttcagataatgaccattacaaatcgatagaattttttgatgtcagagcagctgaagctgcacaatatgccttaaacaggagtgaaatttcaggaaataaaaacaaattggagcctagctgtctgggtggtactgaacgtttgatgcagcagatgtctcgtgcattggaacatgaacagtttggtgcatgtaaactcggaagcccaaacagtccttcaacatgctttggttctgtcaatatggcacccatcagatccactagcacagaaagtggaactgttcaggttttatgttctagagttcagacaccgataaaccaattccgagagggaaggaattttctggatcttccctcaactaccataagtagatcctctcctgttggaattacacctgcaggattacaaagcggccaccacgctcttgatgagcacatccattcacttggaaagatgaatgtacagaacaagggacgaatggattgtggatttcaagagagtactgctttccatcctcattctctccctgacttcaatgacagactaagaaatggtatctcctataactgctcaatacctcccatcggtgttaagagcaatgctagagctgctgaagcaatggatgtcaggcacatttacaaaggaggttgtgggcatctcagcaatcaatcttctgctcatactgaagcacttgggttttcaagaactggtagctgccctctctatggtcaccaactagcatggagtaattctaataacctacaccagcagccttcttctcccatgatatggcctagcatgggcccatttaccaataatatgccatctcgccagttgatgcaagtgcatggaatttcaagagcaccattgcgcatgcttgaaaataatatccctatgaatcaccaacatgtgggatctgccccagctgtcaatccatcaatttgggatagacgacatggatatgcaggggagatgatggaaacaccaggattccacccagggagtgctggaagcatgggtttccctggcagcacacatctgcatcagttggagaccaatggtatgtttcctcacaatggagggactttcatggacccagctatgtctcctgtgcacatgagtgctcgctctcctcagcagagggggcatattttccatcgaaggagcaatgtggctcctattccatcctctttcgattctgctggtgaacggatgcggagccgaagaaatgactcgaatgtaaatcaatctgacaacaaaaggctgtttgagcttgacattgagcgtatagtccggggcgaggactcccggactacactgatgataaagaatatcccaaacaagtacacatcaaagatgcttctggcagctattgatgaaagtcaccggggaacttatgattttatctacctgccaattgactttaagaataagtgcaatgttggttatgcattcatcaacatgatcaatcctgacaatattgttccattttataagacatttcatgggaaaaggtgggagaaattcaacagtgagaaagtggcctcacttgcttatgctagaatccaaggaaaatcagctctagttgctcatttccagaactcaagtttgatgaatgaggataaacgctgccgccctatactcttccactctgatggtccgaatgcaggagatcaagaaccattccctgtgggatcaaatgtccgttccaggcctggaaggtccaggattttgagttgggaacaaaaccaccaggacattgtgtctgatcataccaaaggtggaactccgagcagggctggtggcactccaggttacatcgccacggatactgatcatacggctgttgattgacgaacttgcgacaacacccgacattctgacaattgcaatccagttttttttttttttgaaattgcatcctctcctacctcttttttccttttgttatgttgtatctatatctacttccgcgtgatattttggcaccggaggctctagacggctgcagatttggtcgctgacaagtagcgaggagatggatgttgtgccgtcagtttctccttactttggcacagacccctcagcgggattttgttggacagtttgaccccctttcaccaggaaagatatccatatttgggggagtttccctattgctgtttggcagtgctgtcatgaacattttcctaatgctgtggatgtgaaatttcagaatgatcaaatcgaatgacggatgaatgagagccaataatatttttttacgctcaagcaatctttattcttaacaattc

SEQ ID NO: 31221 - DNA, 1497 bp, Zea Mays
ctgtcctccacctctccccccacccttctcttccttcttccatcgtggttggaaacggctctacccttcccgtcacctcagtaggtgacgcggtccttcccagtcctttccgtttatccaacgttcttgttgctccccacatcattcaaaatcttctcttcgtccgtcacttcactactgacaactcttgttccatggaatttgacctgtttggtctttctgtgaaggatcttgccaccaagacccttctcgctcggtgtgacagccccagaccgctctacacacttcgcctgcctacttccactacaccggcctctgcgccacgtgttcttggcttcttgcaacagccgcctcttctgttacttggcatcgttgtctcggtcaccccggtcgtgatgtgatgtccaagctctccagcagcacctctggttcaggttgtaggggatcttttgagcacctctgtcatgcttgtcagttaggtcgccatgttaggcttcccttccccatctcctcctctagagcaacaggcacttttgatctgatacactgtgatgtatggacatctcctgtaatcagcatttctggctataagtattatttactcattcttgatgacttctcgcattatctgtggacttttcctttacgtcaaaagtccgacacttatcccaccctgtctcacttcttcgcttgggtctccacacagtttagttgcaccatccggagcgtccagtgtgacaacgggcgcgagttctataaccatgcgtcccgtgacttcttcctctctcgtggcgtccatctccgcatgtcttgcccctacacgtctccccagaacggccgggctgattcgcacgacgaacgatgtcgtgcgctctctactcttccaggcttcccttcccgctcgttactgggctgaggccctcgccactgccacctaccttctcaaccgtctccccaccaaggcggttgcccaccccaccccttacttcgctctcttcggcatccatccctcttacgaccatcttcgtgtcttcgggtgcgcttactaccccaatctcgcttccactgctcctcataagcttgcccctcgctccacgcgctgtgtcttccttggttactctcccgaccataagggttatcggtgtcttgacctcgcctcccacagagtcctcatttctcgccacttctgcagtggctagagtttcgactgcggggggtgttagcgtacgtgtatatgggccaggcccactagggttctataccctgtagctgctcgggtttctctgtaatattcattctatactgcaatactaaattataagacattttggcatttctaggttcatagattttactgtgtatgaagacataatatatttctaggtgtgtaacaaaagctataaatctaaaaaggccaaaacgtcttatagtttgaaacttagggagtattaagttcagacatatttagtttgctgatgatgtagagtagcttattcc

SEQ ID NO: 31222 - DNA, 1905 bp, Zea Mays
ccgcggcctccccgatcgccatcgacggtcccgtataaacccgcctccctgcgcttgggcagcttccctcccctcccctcccctccccacctaacgttaccggccggtcagcctctagtccacccgagcgcggccggccggtccgtccgtccgccgcagcagagcctctagcctgtagccagttggttccccgcccgcggccggcgacagatcgatgcggcgtgcgtggacgcccgccgacgagcgagcagcgacgacgacgagcgagcaccggcggcggaggcggatggggaagtacgagatggggcggacgctcggggagggccacttcgggaaggtgaggctggcgcgggacgcgggcacgggccggtccttcgccatcaagatcctcgaccggcagcgcatcctcgccatgaagatcgacgagcaggtgcgcgcggtgtgcctgcctgccgtctgagtcgttttccgatcgtacgtcgtacttactccggtgctgaccgactgtgcggccgggtcaccgggcgcagatcaagagggagatcgcgacgctgaagctgctcaagcaccccaacgtcgtccgcctgtacgaggtttcagctagcaagaccaagatatacatggtcctcgagcactcaagggtaagctgacggagaaggaagggaggaaactgttccagcagctgatagacgccgtgggatactgccacgagaagggggtttgtcacagggacctcaagcctgagaatgtcctcgttgatgcaaagggaaacataaaggtttctgattttggactaagcgcccttccgcaaaaccaacgaaaagatggtttgttgcataccacatgtggcagccctaactacatagccccggaggtccttctgaacaaaggttacgatggctcggtatctgacgtgtggtcctgtggtgttattctatatgtaatgcttacagggagtcttccatttgacgaccaaaatatggttgtcctctatcagaagattctgaaagggaatgctcacattccaaagtggctctctcaaggtgcccaagatctactgcgaaagatcctggatcctaacccgatcacgcgcgtagatgtggatgggataagggcacacgattggttcaagcaaggctacgctccttctgcgccgtttaatgatgacgaagaagatatcaacgtggatgaagaagacagcctaaatatgactgagaatggcattcaagacaagatagcaatcaaccaaatcaatgctttccagctcattgggatgtcctcctgccttgatctatccggattttttgagaaagaggatgcttctgaaaggaaaatcagattcgcatcaaattatcccccagcttacttgtttgagaagatcgagagcattgtcagaaaaatgggtttccaggtacacaagagcaacggcaaggtgtttgagattaatgaatccctttacgttgtcgagctaaaaaagtcatctggagactgctccctgtacagaaagttgtgtgagacgctctcggaggacttgggcacatgcaaaagccagcaatttttaaagcaggattctatcagacaagagataggtagacataacagtagcttttaactaagagcccccttgttaaataggctatagacacaaactaacacaaacaatatactgaatttaaaacagtatattgggcatgcacctattacagatgtgctctctcatgccttttgtcatgaaaccttaagagacttagactatgaaaaattggcaactgacaatgtatcgaactccaaagggataatatgatgatgtaaacaagtaaaatacgcatataagtgattcagagctacctggtctctatgtttctcttatatattgattgatattggaacgtaagattgtttgct

SEQ ID NO: 31223 - DNA, 1544 bp, Zea Mays
atggcagcatccacggcggcggcggccgcgcggaagggagcgctgacggatcagaggttctcggagctttcccccgcgctatccccggaggtggtggaggcactggaccgcggcggcttccagcggtgcacgcccgtgcaggcggcggccatcccgcacctgctgtcgcacaaggacgtcgccgtcgacgccgccacaggctccgggaagacccttgccttcatcgtccccgtcgttgagatcctccgccgccgctcctccccgcccaagtcacacgaggtccttgctctgattatctctcccacgagagaattgtcctcgcaaatattcaatgtggcccagcccttcttcgcgaccctgaatggcgtgtcgtccatgctcctggtgggtgggctggatatcaaagcagagctcaagaaggtagaggaagagggcgcaaacatattggtgggcactcccgggaagctgtttgatataatgcacactgatgctctagagtacaagaatcttgagattttgatcctagatgaggctgataggctcttggatatgggattccagaaacatattaacttcatactttcaatgttgccaaagctgaggaggactgggcttttctcagctacccagacgaaagctgttgcggacctatccaaagcagggttgagaaatcctataagggttgaggttaagacagaggcaaagtccacaagcaaagatgctggacagcaagagcttggtccatccataacaccattagggcttcggttggagtatatgatatgtgaagcatcaaagaagtcatctcagcttgttgatttccttgtgcagaatagtgggaagaaaataatggtattattgggctgttgttcttccactaattaagtcgcttaaaggttctccaataattgcttaccatgggaagatgaaacagagccttcgagagaaagctttggcatcattttctgctctttcaagtggcgttctagtctgcactgatgttgcagcaaggggtcttgacataccaagtgttgatctgattgtgcagtatgatccacctcaagatcccaacgttttcatacatagagctggccgtacagcacgctatgatcaagaaggggatgctattgtttttctcttaccaaaggaggatacttatgttgagttcttgaagcttcgaggtgttcctctcacagaaagggaatgcctcgcaaacactgatgatgtcataccgcagattagaagtgctgcgctcgaagatcgtaatgtcatggagaaaggacttagagcgtttgtttcgtttgttcgagcatacaaggagcaccactgctcttacatttttaggtggaaagatctcgagattggaaaactagctatggagtatggtttactccagatcccatccatgccagaagtgaagcatcattctctttcactagagggatttatttctgttgatgatgttgatattacacaaatcaagtacaagtacctgacaagtggagaagtatattgataccgaactagaagaataagggagatat

SEQ ID NO: 31224 - DNA, 6393 bp, Zea Mays
atacttcgccagcatccagcctaattattgtgatctaagacatttatgcttcctatgcaaaaggtagaaaggccacaagattacataaattacatcattgatttgcgtgagtatgatgttccatatcatgttcgttttgctatagataatgatgtcagaagtggacagtggtacaatgttaatgtatctggttctgatgttttgcttcagagaagggaagacctgcttcagcgtgcagaagttcatgtctgtgcatttgatattgagaccacaaaactgcccctgaagtttccagatgctgaatacgacaacgtaatgatgatttcatacatgattgatgggcaaggatacctgataatcaacagagagtgcgttggagaagacattgatgatttggagtacacacctaaacccgaatttgaggggtattttagagttaagaatgttcaaactgagttggatctacttaaagcatggttttctcacatgcaagaggttaagcctggcatttatgttacatacaacggtgacttttttgactggccatttttagagaagagggctgcacaccatggaataaaaatgaatgaggagattggtttccaatgtgacaataaccagggcgagtgtcgggctaaattttcttgccatcttgactgttttgcttgggtgaagcgagacagttaccttccacaaggaagccaaggtctaaaggctgttacaaaagccaagctaggttacgatcctctggaggttaatccagaagatatggttcgctttgcaatggagcagccacagacaatggcttcgtattctgtatcagatgctgttgcaacatactatctatacatgacttatgtccatcctttcatcttttctcttgcaaccataatacctatgtcacctgatgaggtactgcggaaaggaagtgggacactttgtgaaatgctgctaatggttcaggcattcaaggctagtgtcatttgtcctaacaagcaccaagctgatcttgagaagttctacaataaccgtttattggaaagtgaaacctacattggtggtcacgttgagtgtcttgaaactggcgtctttagatctgatctccctacaaagttccaacttgaaccattagcatatgagcaactcattggaaatcttgatcgtgatctgcattatgtcattgctgtagaaggaaagttggatattgattctgtcacaaattatgatgaagtcaaggatgccatagagcaaaagcttgttgcattgcgtgatcacccaattcgcgaagaacgccctctaatctatcatctggatgttgctgctatgtatccaaatattattttaaccaatagactccagccaccatccatagttacagatgtggactgcacagcatgtgatttcaatcgtcctggaaaaaattgcctcagaaagcttgaatgggtctggcgaggagagacctacatggcaaaaaagaatgactattatcacataaagaggcaaattgaatcagagctgattcaatctggtggcattgcatcgtcaaagccttttcttgacctctcaaaaccagaacatttacttaaattgaaggatcgtttgaagaaatactgccaaaaggcgcacaaaagagttgttgataaaccaattactgaagtcagagaagcgggaatatgcatgcgtgaaaattctttctatgtagacacagtgcgtagctttcgtgatagaagatatgaatacaaaggtcttaacaaaacatggaaaggaaaactcgcagaagcgaaagccagtggaaattctatgaaaattcaggaagcgcaggatatggttgttctatatgattctttgcaacttgctcacaaagctgggaagaagctaactatatcttatccctgtgtcatgcttaatgctgacgttgcaaggaacaacactaatgatcaatatcaaacattgaaagacccagtaaacaagacatatacaacacacagtgagtgttccattgagtttgaggttgatggaccttacaaggccatgatcttacctgcctctaaagaggaagggattctgataaagaagagatatgctgtcttcaatgaagatggcactttggcagaacttaaaggttttgaaatcaagcgtagaggtgagctgaagctcataaaagtttttcaggcggaggtatttgacaaatttcttcatggttcaactttggaggaatgctattctgctgttgcctctgttgctaaccggtggttggacctactggataatcaaggaattgatattgctgacagtgaattgcttgatttcatatcggagtcgagcacaatgagtaaatctttagttgactacggagagcagaagtcttgtgctgtaactacagcaaaaagacttgccgaatttcttggagattcgatggttaaagacaaaggactacattgccaatatattgttgctcgggagccacaaggcactccagtgagcgagcgtgctgttccggtagctatattcgagacagatcctgagatcgcaaagcattatttaaggaaatggtttagattctcctctgatgcaaacattcgatctattgttgattggtcttactacaagcaacgcttaagttcagctattcagaaaatcattacaattcctgcagcaatgcaaaagatctcaaatcctgttcctcgagttcttcatccagattggttacacaaaaaggtcagggagaaagatgatcgatttcggcagcgtaaactgcgtgatatcttcagtcccttggctaaagaagaggggctgcataacttgaataggactggagatatggaagatttattaatttcaaacaaggatttgaggaaaaatccttctcatggtttagacattgacaaagaaaacaatccaaatggagcatcagtgggatctggtttgaatattagtaaaaaacaacaaaactgtatgactgggttaaatgttccttgcacttcacaaatccaaaatgctgcttcttatgaaacagttgataagggtactgactatcaaggatggcttgatgctaagaaaagaaaatggaaatatgtccgtgaacaaaaaaaacgtcgaaggttgggtgctgccgccacttttgacgatcctaacgctttgctctcggccagacatgccaatcagctacctgtcaacagtcggaatagatctacatttttccagaaacaagaattggccctctttagatcacattggcagataatccagcttgcttcaagtacagtgcctggtcacttttttgcgtgggttgttgctgaagggattatgttcaagattcctattaatgtgcctagaactttttacctaaactcaaaggctcctgtcacagaagagtttccaggaaggcgtgtcaaaaagattctcccacatggtagaccttgtttcaaccttattgaggttgtaacaactgaagaacagttcagggctgaaggcaaaaaacttgcagctcatctagcagagccagatgttgagggaatatacgagacaaaaattccaccagagctcaatgctgttctccaaatcggatgtgtctgcaaagtggacaagtctgcaaaaagacgaagtatacaagatggatgggatctagccgagttgcaaatgaaaacaaccgccgagtgctcatatctggaacagacattttcatttttctatttataccacagcttgagtgaaggaagggctgtatatgtattttacttccccacgtctttccgaatacatgcagtgattgtcaatcctttccgtaacaaagaaatatctccgtcatttcttgaaaagcaatttggagatgcttgccaagcccttggttctgtccctgagaatctgtctttccatgtggactaccaaacatcaattgatgctggaagcaaatacgcacaaagaatgttacttgagtacaggcaacaacattctggacctgtcgtaggcatcatagagtgccctaagctccaagctataaaggtagctatacgagcacttgatgatttgccatgtgtaaccattcctagcaatgcacgtgacaacaactatcaggctcttggctggcaagcaacagctggccgaacaagtatgcagcgttgtgctgcatcaacccaatggttcaatgaacggatttcactcgctaaatatgcacatgtgccactgggtaattttgaactagactggcttctttttactgccgatgtattcttttcaagggcattgcgtgatcaacagcaggtactatggatatctgatgatggcattcctgatttaggaggcacttatgaaggagagacatgttttgctgatgaagtcattcagcctgcacttacttatcctggtgcatatagaagagtttctgttgagcttaagatccaccatttggcggttaatgctctcctaaagagtagtcaagtggacgaaatggaaggaggatcaatcggtagctttggaaacgacgtgcctccgggttcaaatgccactgaaactgactttgatgatgctagcttatgtatacctgctttccaggtgctaaagcaacttattcaaagatgcatttcagatgcagtgtcgtctggaaatgtatttgctgatgcaatattgcaacatctctaccgctggctttgcagcccacgatcgaaacttcatgatccagctctccatcgtcttcttcataatgtgatgaagaaagtctttgctctattgttggccgagttacgaaagctgggggctaatgttatttttgcaaacttttctaagataatcatagatactggaaaagtagatttgtcatctgcacatgcatattgtgacagcttattaaggaccttgcagacgagggacctcttcgagtggatagaattggaaccattgcacttttggcattccttactgttcatggatcagtataactatggcggaattcaagctaaaacacaaaacgtagactcttcagatggtgataatgatattgatattgtctcaagctggaacatggcagaagatttgcccaaagatacacaggatcattttgtcttaatcgtatcagaattcctatatattccgtggaaattcatgaaggaacaagtagctgctcaagctaccataagggatgatacctcatgcactccatctgtaacaatcatggctgctgagaatcttgagggccaggtgatagaacacctccgtgacaagattagcaattactttgcagacaagcttctaagaactgtaagtgatatacttcaccatttcaaagggaaaagcaaacatgagtcagatgaacctgcaaaatctgatcctcacacgcataaaggcgatgctgcattggagttcattaagcatatctgtgcagttcttgctcttgatcaaaatgttcagcatgatattttgagaatgaggaagaacctgttaaagttagttcgtgtaaaggagtttgctccagaagcacaattccaagacccatgcgcctcattcactctgccaaatgtgatctgcagctattgcaacgattgccgggacctggatctctgccgcgactcggcactccagggccaggagtggagatgcgcggtgccgcagtgcgggcagccgtaccaccgcgagcagatggagaacgcgcttctgcaggtggtccggcagcgagagaggctgtaccacctgcaggacctggtgtgcgtgcgctgcaggcaggtgaaggccgcccatctgtcggagcagtgttcctgcgggggctccttccggtgcaaggaggagccttcgtatttcctcagcaaaatgcgggtgttcctgaaggtggcggtgagccaaaagttcccgctcctgcaggactgcgtgcagtggattcttgaagccagatgacgcgggctgctacttcaacatagttcattagttcacctgatcgctaggttgtacaacgtgcacaggctgtagctccgaagagtgtataaacgggtgtatagcgctgccacagttcattgtagctctgccctgcttgcaaaaggttgttgttgtattgtagatattcaaaggtggatggcgagaaacgatagtaaccttggtatcgaaacatctggataactagccctctcgtatgtgattgctgggcatagactattctaagttatgatgtgggcatgtggttgcataagcggtttcgatgacgtgaatagaaatacacgcgtcggaccgtatgctgccagcctgccagtacactgaccttggccacgtcatactagttgtctgtttctgttgccaatcctacactgtattatctgcacaaaggaaaatgaaacggaggacgttgtgctttcgaggggccaggactcgttgggtggatgaagcacgcgtgcccggtgacctcagccttta

SEQ ID NO: 31225 - DNA, 678 bp, Zea Mays
  misc_feature (677)..(678): n is a, c, g, or t
gcaggcagcaagccgaccgcgcctgcaacgaccgcgactcagctcggcgcccaggcggaccgacgccggccacccggccaggcccgcggagccgcagccacgcgcgcccagcaagtcgagcttatctgaatttgatgatcttgtgggccaccctggattcgacaagcaagggacacgcttcaagcggctcatcaaagaccagaataatcataaggacctcgaggagggaattaaccgtctagttctttgctctggaaagtttcaggtgtactacgaactggatgaagaaagaaggaagacggagcgcactgatgttgctatatgtagagttgagcagctctgcccattcccctatgacctcatccagtgtgagttgaagagatatccaaggacactgaaaggcggacgtgcggattggcttatagagaaatgtattgaacttggagcttctagtgttacccctgtcctgacagaacaatgtcacacaatagcggaaaatcgggtggacaggctgtaatgccttgtgctggatgcagttaagcaatgtatggagtttgggtatcacctccgttcttggcctgttaaacaatgtacggagtttggggttaaatgattttgtaaagtgtttgcaaatttgttcaaaacatgataatgtgtaggttttgtgaatgattttnn

SEQ ID NO: 31226 - DNA, 5480 bp, Zea Mays
cgcggatctagggtttcggagggcctagggttagtgccggcgatctggtgatggtggcgcggcgcggcgccggagctcggcgaggaagagggttcgacggcgacgttggggaagatgcagcgagccggatatgcatgggtggcgcggcgctgagggttgcgacgtcaggaggcagcgtctcgttcggctcatgtggccagcggcacgcgtagaggcagaagctccaccaccacctgcacaaggaccagctacttctccttctggctcatctgtccccccgtctcggacgacttctcttccgccggaatcggcggcgcagcaggagtgcatcgatccccctcgcccagtgtcacccggttcctttgtaaaggacggtcgtgagattagagtaggcgattgtgctctttttcgggctgttgatgttcctccgttcattggattgatacgttggattgagaaaaaggaagacggccatcccaaattacgtgttagttggctttatagacctaccgacgtgaagcttaacaagggtatacaactcagtgctgcaccaaacgagatcttctactctttccaccaggacgaagcatctgctgtttctctactgcatccttgcaaagttgcctttttacgtaaaggcgttgaactaccagctggaatttcttcatttgtatgttggcgtgtgtacgatattgacaataagtgcttatggtggcttactgacaaggactatattaatgaacggcaggaagaagtaaatcgacttctacacagaacaaggctagaaatgcgtgccgcattgcaatcaggtggacgctctccaaagcgtttaaatggtccatcagcttcccagcaactgaagactgcttcagttggtacgcagaatggtggtttatctaaaggaaagaagagagatagaagtgaacagggagttgatccagctaagcgggatcgagatcgtctacttaaggttgacgacagtgagcctggaatctttaacttggatgatattaagtctgaaatagcaaagataacagaaaaagatgggcttccaaatgctgaagcagttgaaaagcttgtacatcttatgcagcttgatcgaactgagcagaagatagaccttagtggtcgggttatacttgctgatgttattgctgctacagagaatcctgattgcctcggcagatttgtgcaatcaaggggccttcccgtgttggacagttggcttcaagaggcccacaaagggaagtctggtgacgggagtagtcctaaagaagcagataagcctattgacgaacttctcttggccctccttcgtgcattagctaaattgcctataaatctcagtgcattgcaaagttgtagcattgggaaatctgtcaatcatctgcgtagccataaaaatctggagattcagaagaaagctaagtgtcttgttgagaactggaagaagcgtgttgatgctgagatgaagtcaaatgatgtgaaacctttagtttcaggtcaatctgtttcctggtcaggaaaagcaggtttccaagaaatttcaaatgctggaaccaaacgaggtggttcaagtgagaacagtccaaaaaatccagtgcccactctttcatcatcaaaatttttgactgataagcctgggggcacagatgctgaagcgaagttgaaccctggggtatctgccttgtcaaattcacaacacgtgcaaccaacaaatgttactaccaatttgaaggaccagccctgcaaatcaactggtgggactggtcctgagctgcctactgtaaaagaggagaaaaccagcagttcaagccaatcaccgaataacagccagtcaatatctagtgagccatcgaaggatgcaagaagttcaactgctgcttctggtggtgctagtaaaacttctgaaagttcttcacgaagccatcgaaaggcaaacaatggtcttgtttcagggaacctgaaggaagcttctgtaggaagatctgtctcccttgatcgatcattgctgcaggataagtcatctcaaactggaacagcttctgaaaaaggacctgatatgccacttgatcatggaaataatcatagattgattgttcgctttccaaatcctggtcgtagtcctgctagaagtgcaagtgctggatcgtttgatgacccatctgtaactgggggtagagcttcatctcctatggttgtggataggcatgatcagactgagcgcaaggtgaaagggaagactgaaaatactcggcctcatttagcatctgatgctaacacagagtcttggcacagcaacgacggagctactggttcagaggaaggtgataaatcgccgtgtgctatattagacgatgacaacagcaggacacctgatgattctgttaaggatacacatgcatcacgagttgcatgctcgtcacatacgaatgaaaaaggtgtcggcgaaactaaggtgggaactccgttcagcccgatgaatgctcttattgaaatcaagtactctgaagctagtcattcacagcaagctggagatgacactgctatgaatcttcttgctagtgtggctggggaaatatctaaatctgaattggtttccccagcttcttcacccagaagttcttctgtaaagaaattggcccgtgatagtgacaacattggaaaggttaaagtagaaagtgacacgggcccatcacatccagggcaagcagatgctaagaaaggcgccatggggaaggaagtgaaaattgatgcttgtttggttgcaaaggaggaacaacgccaaactatgccatctcctgagctaccagattcaaaagcagttgtatcttcagctaagattgaaatctatgaagttgaagccaagattgcaaacaaatgcaactctcagcatgcttcaattgattccaaaggagaaagtcaggatgcctgtactgcccatgggaaagttgtagatggcagtatagacaaggatggtgccatggaatctgcattgggcagccagtgtaggttggttgttcccagtagaaattcaagattggtccatgctggggaatcttcattgtctgctgctgataaacaagcacagggtttgttaaaatcaactaatcataagcagcttctgagtgtgtcggacaacccaggcgcctttgatagacgtgacagtatggctggcaagatggatttgttggctgcagaggtgagaaaaactgatgccgtgggcaatagtaacatagtgcagaacgaggctgaaaagaaggaacatgcttgttcctctttgcctgatgttcccaaactagttgtcgcagcagcgtctccagttggtgtggcaaatgtgaataaggagatgaaagaatcaaaagacagttcaagtgaatccaatagccatgtaaaatctgaaggtgtcaattctcagcaaagcgagcaaagtgcaatgcagagttcaaagaaatcctgtgatggtgtgagtggaaaagaggacgaaaaagaagaccatgtcttatcagacgaaggttcttctctagccgctcacaccaagtcaaatgctacagccaagcttgatttcgacttgaatgaaggaatacctggagatgatgggcatcagtctgagccaactatctcgcctgttgtatgttcttcagcaatcaatttaactgggattttgccattcacttcgcctattacaacggggttgcagccagcttcaataacagtagctgctccagctaaaggaccctttgttcctccagaaaacctactaagagcaaagcctgagattgggtggaaaggttcagcagctacgagtgcatttcgtcctgctgaaccaaggaagattttggagattcctgctgctgcacgcgacattccagtatctcatgctgctgggaagcagtctcgtcccacgcttggttttgatttgaatgttgcagatgaccaagctctcgaggaagatatcccacagagttctgcacagactacctgttctgaatctggaaatacgagaagtcgagatggctcttcacgaagcgctggtattgaacttgatctgaacagagctgatgaagttgcagataatggccaatttgcaccaagtgcttcgcacagagttgaagtcccattgttgtcaacaagatcgttacatggagttttctctaatgctggcatgaatagcgcgagggactttgatcttaacagtggaccaggccttgatgatcttggcaccgaacctgcaccaaagagcctaccttctaaaagtacaagcagtattcaattcctaccacaagttcctgttaggatgaatagtgctgccatgagtaatatatcaccatggcttgcctctgccagcccttgtccagtagctatacaatcttttttatcaactagagaacagccatacccaattgaggcagcacctggagctcaaaggatcattgcgcctacagctgatgctggccagtttggaggtgatccctgcaggcctccagttgtttcaacgtctccagcgatggtttttcatcagcctgcatatcagtatccaggattcccttttcctcccagtgttcaccttcaaacaccggcattttcaattggatcagcaacatttaataattctgcatctgcaggagttccatattttccaactgtctccccctcttttgttgggccagcaggagcgttaactccccaacatttaaggcagtatgctataaaccttgctgagggcagcagcagcagtggacgagacagtaatcgtaaatgggaaagtcagggccttgatcttaactcaggccctggaagtatagatttagaaggaaaggatgaacgggtgcctttaccggtcagacaaaatttgatcccacccccacacggctttgtggaggatcaaggaagaatctaccagatgccagttgtaggaacaaagagaaaggaacctgatggcagctgggactcagaaaggtctacatacaagcaattatcatggcaatgatggctctgaagatcgttctgcactggactggtacctgcatgtagaacttgggcggtgtgttcttcagtcactgcaatattactcgattcagcccatgacgttgatgtgggatccaggaaacgaaaacttgctgtaattgttgtagattttttccctagctgttaggcttttgattctaatttactcaggagggggtatggctgcggaggaggaatctttgtgatcctgagctctggggctactgtaattagacggtccgctctgtttgtcggtgatatactgtttatcacatgctgcagctttacattacataagaatttagatgtgaccttgttccttgctggggaagcgttacgtcagctgaccatatgaacactggtgcaacaatcagctcgagttgatacgccatgtatctttaagttgcagtgcagctgtatgtataaggattctagcagatcagcaagctataattttttgctgtttttttggc

SEQ ID NO: 31227 - DNA, 5815 bp, Zea Mays
tggccggcggcggtcactctgcttacacaccacgccgagccacccactaaagcgtcgccgtgaaaaactaccaaaccccttcactgctccctcccatccaaaaccctaaccctacagccaccgcagtggctggccatgggggcgccgcgcgagctcgagctctccgacgaggtggagggcgaggaggacggcaccaccgactttgttttccgccttgccggtgaccccatcccgctcctcccgaccgactccaacccgctcccgctcttcgacctgctgtcccctcccgcgcgcccgctcgccgtctccgaccgacacgccaccgtcttcctcgcccaccccagcgggtttatagctgtgaggaccaaggagttaatcgaagccagcaaggaggcgcgcgagaagggcaagtcgagcactcgctgcgcgcaggactgctgcgtcgccgacgtgcccctccccggtgtatcccttatcgcgctctcccatgatgagtccgtgttagccgcctgcacacatactgagatccagttcttctcgctggcgtctctgctcacacataaggacgtggtaccatcctcatcatgtagcctggaacgagctgtcactgtgaaagatttcaagtggttaaatcatgcctctgcagcatatattgtactctcaaatggtgggttgctgtgtcatgggaatttgggtgaaggcctgaaagatgtgatggaaaacgtcgatgcagttgactgttgcaaagaaggaaatcatattgctgttgcaagagggaacaaacttaccatattatcaccagattttacggaaacatgctccatgtccctcttgttccagttgtggtctgacggaagtgattcaaagggcactaccatcaaagtggattctattggctgggtacatggtgatagtattgttattgggtgtgttcgattaaacgaagatgacaatgaagaaggataccttgttcaagttataaggactgaagaaagcacattttgtgagagcccaggcaagacagatgtttatacctataacgattttttccatggcattatggatgatgttttaccacccggagctggacctaatcttcttttgggttatctgcatcgctggggtctcatggtggcttccaataaaaagagcgtcgatgaacacattgcccttcttaagtggccatctgcacatgatgatgaaaaaactgtaacatatcttgaaatgttggaggataaatacagtcctaggattgacttgcaagagaatggcgatgacaatgtcatactagggtttggtgttgagaatgtttcattatttcaaaagatcactgtaccagttggacctgaacaaaaggaggttgcccctcaacatattctcctatgtttgactggtgagggcaaagtagctgtatattacctcgccaggatttcggacccttctgatttacctcatgctactgtgtctaccaatgaggactatggtgaaaaacatatttcacctgcaactgtatctgaaaaggagttgactccaagtgttgcaggctcagtatataagagtactctcacagaacatggtgctgagccatctagtgcgcaaacaggtagcaaccagcaggaatcaataaatgtgaaaaacagtagctcagcttcaaaagaacaggaaacaactgacaattcattgtttatctcttccaataagaagcccttagacaccaagcaagtgaatgtgactggtccacctgcagccttgcgtagcttagcgttaacaggaaacacaaaacctacaatattttccagcttttctactgaaggcatgaatccaacaggaggcaatgcacctaatgaattagcttcttccttgcaaccaagcagcagaagttttggaaacaaccaaactggtaaagaaggcctggattcagttcaatcagtgggaatatttggtggatctcaaaactccaataaagatggcaatgtctatggtttcaagtcttcattattcacctctagtggatctgtccctgccaagatcggagaaaggaatgaggttggttttggagttccttcgctgcaaaccagttacaccgctgatagaaaagtttttggtgctccagttgccttaagctctgtaccttcatcatctatatctccggctaaaccttccccaattggatattcatcaagtggatttcggacagcaaactctgaagcacctcaatcattgcgtggatcacctccgtcacagcaatctatgggcaaatcacataacagcaggacacaagcaccggcagaatattctagaaactccaagaagggcacaggattcgattctgaacaagacttgtctaaaaaattttacagtataaatgaaatgacgaaggagttagatgccctactagcatatatagaaaaggatggtggttttagagatgcctgcataaccatccaacagcgtcctctttctatgtttgaggatggcttacaaaactttttgcagctgttgcaggtcttcaagggcaaagtagaggagcaatgttcaaaaattgaagatctgaggaacaacatgtttcaagtttctgctaggcaaacttacatgaaaggaattgttagccagtcttcagataatcagtactgggatatatggaaccgtcagaaattgagtccagaattcgaagtgaagagacaaaatattctcagagctaaccaggatttgacaaatcagctggttgagctggagaggcacttcaataatctggagatgaacagatccagtgaaacaggaagagtggcttctaatcgaagagctgtttattctaacaagacaagttcgagtcagacacaattatccagtgtatatagtgcactgaactcgcagttggcagctgctgagcagctatctgaatgcctttcaaagcagatatctgtgttaaatattggttctcctagtaggaagcaggggatggtgaccaaaaagttgtttgagtcaattggtttagcccacacaactgatgcaaccaaattttcaggcagcactcctaagccagttaagcggtttccatcagtgaatgagcattcaaagggaatattagggtcttccaagggtggtgagcctgagactgctcgaaggaggagggaatcactggatatgagcctggctagtttggaacctcagaaaacaactgttaaaagaataacacagcaacaacgcctcaagatcagcagtgatctaccattcaggtcaaacaagaaaatatttgattctcaaatggcagcaatatcacaggaaaagtcaagcgatagctccaattcatctatagtagaatcatatgtaagcagactgcgttctctgagtgaagatgtaaacgataaactgtcaggaccccaacagaaccctttgttcaaatgggtaaaggaatcaactgggtcatctcaaacctcagagcaaaagcatttcgagttaccagggcaaatgaaaagtactgcacagtcttcaaaactgacaccatcttcaccaccatcattcagttacacacgtatgggtgcacaagatagtatcaacccatccagtgttccatcctttggaacaaaacatactgtgtctaagccaaatactctaaccttcaaaaccactataagccctaaaagtaatgccaacacagagccaaatatattaccttctataacagctccaaaaacttctctaagtccactgtctgtaaaaactgctggggagtctggagatttgcctacattaactatgaagaacagacaggatggtcagtcaatgccatctttggggaacataaaaggaccgggtgcttctctgcagaacaagggtggcatatttagagatctcgacaaatcgtcttttaattctgaacattccaagcctgctgcattacatgagaagactgaccagctaagtggggttggcgatgctgtgcagaacactgtgaaagatacctccaaaatggcacctcaaccttctgctttcttgccagctcctgttactcagaccaattcatactccttaaggccgactgtttcttcttcagccacatcaggtgcgaaaacttcagatgttttatctagctcaatgcagaaagtttctccaatagtacctgggggtactgtgtctagctcagtccctactcctgctaaggattcatcaactggattgagtcaaaatgcttccaaacctgaaacgctaatatcaaaggtaactagtaccatagtttctgcaagttcgacttctgtcatatcagtcactgaaagcaaaccttcagtgcctccaacaactggcgccagcttgccttctactcatgtctctgctcctcaaacagcaccaacaacatcggaatcagttttcacttccacaggaaaaaatgtaggaccaaacactgacaccatctcaaccgatgaagatgacatggaagaggaggcaccttctgcaagtgccgaactgaacttgggagcccttggtggattcggccttgggtcccagccttcttcaagtcctcaaaagtctaatccttttggtgcctcctttggtacatctggcaataaaagttcaggcacaccatttactttgacaaccagtccaggacagcttttccggccagcgtcgctaagcattccttcagctcagccagcccaaccatctcaatcaactagttctagttctttttctaattcgttctcaagtgggcttactggatttggacagcctgcacaaattggatctggccagcagtcagcttttgggaagcctgcacagattggagctggccagcatgcaggatttgggcagactgcccaaattcaatctggttttggccagcctgcccaaattcaatctggttttggccagtcagcacaaatcggaactgggcaacagtcaggatttgggaagcctgcacaaattggggctgtccagtcaggatttgggcagcctgcacagtttgctgctcaacagacacttggatcagtgctgggttcttttggacaacctccccagttaggaggcataggttctggaggatttggtggattttcaagtgcttctacatctgctggttttagttctttatcttcaggtaatgctggatttgctggtgctgcatcaggtgggggcttttcagcaccaactgcttctgcaggtggtggttttgctgctgctgctactggtggaggttttgctgctcttgcttccaaaagtggtggttttgttggtgcagcttcatctggtggtggttttggaggtgcctcccagggaggtggctttggcagtggtggtggtggattcggatcctttggtggtaatcaaggagctgggttctcggcatttggagcaagtggggctggaagaccggcagctgatttcttgacgcagatgagaaagtgtcaacagcagcatcgacggttggtcttggattccctactggtttctctccagggcgaccaacttgctaaggctttcatggctctctcttcaggttccatggctgcatgaaatgtagaagaaaaaaaaagaggtcgtgtaaaggtcattgcttggacgtgattcccctccagctttgtcaatacaattcccagcctctttcccacaatattccctgtcacgagcctgcccgcgcatcaagatgaaacccgccaccacaccaaagagcttgctgcgatttgcaaaggcatggagaagaaagggatcgagagaaacaaaagcataagatacccagacacttaaacaagtaacaaccgaacacaatctttcgccaaatatatatatatacacgatataatataagaacggaacaaag

SEQ ID NO: 31228 - DNA, 1641 bp, Zea Mays
tgcgctgcggctgtttgtctggcaccggaaagaaaaaatccttctcggctcggcacaccgctgccggccatcgccgcagccggagatggaggacatcgaggacgtgctgggcccggtcggcctctctgtcggcggagcgcctccggtgctccgcctcctgctagcctccgtcgcggcaagctcaagcgccggtcgtccagggctgcgcatgcgcggcctcagctcgaggcccggatccccggcacgcagacgattcacgtcaagactatcgggtgctcacataaccagagtgacagtgaatacatgtcaggtcagctctctgcatttggatatgcaatcattgaagagcccgaaggagcagatttgtggctaattaacactggatcgtgtgaaaactgttgtcggcttgtcgctgaaggtgtccgggagatttggttgagtagccagtagcgaagataccggtgcttatggacaggatatcggtacaatcttccaaatttgttaaacacgattgttgcggagcatcctgttgaccgaagcacattgctccgcataggcatgacaaatccacctttcatactagagcatctgaaggagatatctgccgttttgcgtcacccctgggtttattcgttcctccatgttcctctgcaatctggaagtgatgctgttttaacggcgatgagtggtgaatacactgttggcaagttcagaaaggtagttgatgctttgtgtgagcttgtccctggaatgcaaattgctacagatattatctgcggctttcctggttagctaaacaagttcacggcttagcatttcattcttagttatcatttatgagtacatctgaacgacattttattaactgaatgccccaaaagacgttgctgctaatagtttgcactaaactgacatcccattttgagggacgccctgctgctaggatgaagaaggtatcgagcaatgaagtgaaaaaagcggagtcgtgaactgacttcagttttcgaatcattgtcaccgtaccaaggaatggtaggcaaagtagagaggatctggatcactgagatcgcgaccggtggtgttcgcttggtaagtgcataccaattcttccgactaattgctgattatgttcatgcctggcgcaaagcttactcctgcacaggttgggcataccaagggatacatccaggtgctggtaattgcccctgatagcatgttaggagcgtcagcaaatgtgaaggttacatctgttcggcgacgtctttggtgaagtggtggaagaaggatctgttgcggcaggagaagcaccgaagcgaactagcgcgacttgtagtggtggttcttgagcgagcgtgtcgatggtcgattttggcggtttgttttgtttactcggtctgttctgtatggcgttgcaaaattgtgctactgtacaaatacatggttgcgaacaggttaacgcggagtcttctgatgctgcgtcacgacggatcagggtttgatgaaagtgaagaacatggtgcgatttgctaccgtgttcggaaaaatttggtagtgcatcgaaacccaaggcgtgacgtgttctctgtgtcatcactttaaaaaaaaaaagaaaactgtgttcgcacacgaggcaaaacagaa

SEQ ID NO: 31229 - DNA, 2317 bp, Zea Mays
cctgaactagtagcggtatgtttggcagagcggcaagttagagcgacgtattttgccaaattcctccttctaccccgagcgcaacaatttcctcccagccgcgacctgtctctgtctgttcttctgccccgatcggccgatcccacccacgcatctctctccgcgcccgcggtagtgttcgtgttcctcactcctcccgcttccttccccgacactgcctcagctcagatccgcggcggtttcccggtccctggatctaaagcggccggtgagcaggcctccttccgccgacgcggaccacctggagggaatttatcctggagccgtcttcctcctcgcctcctctcgcggcgcggcgcggaggccggaatcacttggaggtctagctgtgtgtggattgatttcttcgtttgtggtggctagaggcacctggtttgtttcttgccgaagcccgtggtacatgtgaacagcagggcctgtcttctgcttttgcttcttagcaatggcgaatgcaagcaaacacttgcaaccttcaagcaaatcaggcaatgacagaaagtaccagggcacactggttgcttctccagcaaaggacatttcaccgaagtgtgcgaatcgcattgttccatcgaaacaactgatcttgggtggggattcaataggccatctggcatcgattctgattaaggtcgttgctctcgaggcagtcagaagagtttctaaagcaagataccctttcatatggaattctgttcaagcattgcaaatccttgtgtatcctccatttagttggatccaaagatgggcaccactcaaatttcttgtgcagggaattcaggttattcaatttctcatctctccacaacgcatgctatttcgttccttgacataggggaaagacagaaactatccatgccactgttgtttttgtcagtcacaacaacagtaagtgagctgtcctccaagcgtgatgatgaaccagataacaatacagaacattctgaaacaaatgaattggcatcaacttctggcacaagtgatgctgctgatggcacaaaggaaatcgtacaagagaactggcttgtgttacttttcagggagcttgagaagcaaggcatcactttacccgagaggtttactgaagatgaattacgcagattttatgttgctgcaaatggtgacttttcaagtttactctcttcggttaagaagacaattcgttggagggaaacgtttcacatacttacactgcaagaacttgataaatggtctcacttagtcttttggcatggatttgacacgatgcttcggccttgtttagtaattcgtcttggacttgcatgctccagcataccaccttgtgatagaccccgttttgggcaagcagtagtttctcaaattgaccatggtgttgtaaatttgaccaacaaagaagattcaagaattaccgttttgctggattgccatgggatttctccattcagatttccaatgcaaatgatgaggtcatttgtcactgtagctcaagaaaactacccaaatcgtcttggagtattgtttgttgtccgccttcctccagttgtcagagttattgcacagacatttcttcaagttttgaaaccatctacaaagcagaagttacgttttgagggagattcatacaagaagacgttggcggagttcttgcaggccgtgccagcgtttctgggcggtaaatgcagctgcccacgatgtgagaagcctcgtaatagttcagtggtgcaggcaggggaagggagcaagaaccaggctcgcttggtcagcgttgatggcggatcacctgtcgtggacttcgacttcgatgaagaagagatcccatcaccttatagctgcgagaacgccatcagggctgcgataatctgcctgctgatggtgtgcatcttcatcgcgtttctggctgggatgaacgaccctgcatccgttccgcccagtgcctgagagctatggaatcgcctagtctcccatagtagagcttagattgtcagttgagtatatacacatctgtgttgctatttaggatgctactagggtgttgtattccctggcagcttctttctcggttgtcgtcagatcgccttctctcctaatgtgagcggagcagatgaataaatatcctgtgtgtggcaaatgttggttagcagttcaattagcccttcgatagtgtctttctttgcgtgcttgctgcagtagggcagtgtgatttctcgttagtgtacgtaaactcaaagttttcaaccacaaggcaacaacacactgactctagtggtttcagctcttt

SEQ ID NO: 31230 - DNA, 920 bp, Zea Mays
cgagcgcgttcctgccccgccacagccgaagctcccagcgtcctcctgcaggccgagctgaaggttcagcgcgccggtggagttcgacgacgaaactccgtcacgtcatacctctccacctcccgtcttccagacgtctccaatcgaggctcccagcgtctcggagaagaggagcagcacgacacggcggctgtggcgaggaaggctcctgtcccatcccaacccagttagcagccgtccaaggaggaggagatccaatcggcgtgcgggcgtccgcggtccatccatcgatccaattccaatctgcagatacgcggtctgggactgatacttggaactgaatttgtcgacaacaaatctccaaatgatccatttccagctgaatggggtgttggttcgatatttggcacggagtgcgagaagcgtgggatgctcatcagggtggctggggacaacatcatgctgtcacccccgctgatcatgactcccaatgaagtcgaagaaatcataagcaaattcggcgatgctctgaaggctacagaggaacggattggagaactgaaatccaggaagaattagccgatgctactggttgtaacgacgacatgcaattgaaaatgacaattgatcttttttatgggcgaagtgttgaagatggctttggtgaaggaaatgtcttgttagcatcaagtaagtggcgacatcacaacccctacaagcttgtgccttaaaacaaaaggatacaagaagttggagtgcttttgtgaaagcttttgcgaatcacttgaaacgttagtacttttgtgaatgattttgtaaagtgtttgcaaatatgtgcaaaacataataacatgtgtaggttttgtgaatgattttgttgtggtgcctgttgatggtttatgtatgtggatctatcatgg

SEQ ID NO: 31231 - DNA, 272 bp, Zea Mays
gtaaatttatttctgtttaagggctaaaatacaaaaaattcgggcccatcggcttcgctccacccacgtacctctccgacgtttacgcgacggcgatgcccgcgcgcgcgcggttcgatcgtgaggacccgcggaaatgcatgcgcgtccggcaccggccggcgtcacgtcgcgcgacgacggcgacggatgccaagaagaaaggagagcccgcgagcaagacaaccccctgcaaacattgatgatggtcgtcagcctgatggagatcgcag

SEQ ID NO: 31232 - DNA, 4141 bp, Zea Mays
cacgttcaaaaaggaaccaaagcacacacggccagacggcctccagtccagatcaaatccacgctacctcggagacccgttagcccgtttgctgtatcactcccctctccaccgcgtctctcctgcatgctcgtattcgcaaatctcctcccctctccccgcgcggcgcgcctgcacctcccggtccggcgagaggccaccgcccgcgcggccgcgctcctcgcactccccccactccggaagccctaggagcgccgtctccaccgctgcacctccgccagtcgcgctcctcgcctcgcctcgccgctgcctccgtagccgtcgcgggcgccgccatgccgctccggttggatatcaagaggaagctcgcacagaggtcggagagggtgaagtccgtggatctgcatccgacggagccatggattttgtcgagtctgtactcgggaagcgtatgtgtatggaactaccagactcagacaatggtgaaatcatttgaagtcacggatttaccagttcgttcggctaaatttattgcacgtaagcaatgggttgttgctggtgccgatgatatgttcatccgtgtgtacaactataacacaatggacaaggtcaaggtttttgaagctcacactgactacattaggtgtgtggctgttcatccaacccagccctttgtgttatcatcgtccgatgacatgctgattaagctgtgggattgggataaaggctgggtgtgtactcaaatatttgaagggcattctcactatgtgatgcaagttacatttaacccaaaagatacaaacacctttgctagtgcttccctggatcgcacaataaagatatggagtcttggttctcctgacccaaatttcacactagatggccattccaaaggtgtgaactgtgttgattacttcactggtggtgatcgaccatacctaattactggctctgatgatcagactgcaaaggtttgggactaccagacaaagagctgtgttcaaacacttgaaggacatgcacataatgtgtccgctgtatgtttccatccagagctacctataattattactggttcagaggatgggacagttcgaatgtggcattctactacctacaggcttgagaacactcttaactatggccttgagcgagtttgggctttaggatatatgaaagggtcaagaagggttgtgattggatatgatgaagggacaataatgataaaaattggtcgtgaagttcctgttgctagcatggatagcagtggaaaaattatatgggcaaagcataatgaaatccaaactgttaacatcaagagtgttggtgcagacaatgagatcgcagatggtgatcggttaccattggccgtgaaggagttgggaagctgtgatctttatccacaaagcttaagacacaatccgaatgggagatttgttgttgtatgtggagatggagaatacataatatacacagcattagcatggagaaatagatcatttgggtctgcacttgaatttgtttggtcaactgatggagaatatgccatcagagaaagcacctcaaggataaagatttacagtaaaaatttccaggagaggaaaagtataagaccatcattttcggttgaacggatatttggtggtgtgttacttgctatgtgtacaaatgacttcatttgcttttatgattgggtggaatgcagattgatacgtcgaattgatgtcaatgtgaagaatctttactgggctgacagtggtgatttagtaacaattgcaagtgatacgtcattctacattttgaaatataatagggatgtagtttcatctcatttagacggagggggttcagctgctgaggaaggtgtggaagatgcctttgaactgcttcatgagatcaatgaacgtgtccggactgggctatgggttggcgattgttttatctacaacaattcttcgtggcggcttaattactgcgtaggaggagaggttacaaccttatttcacttggatcggccaatgtatttactaggatatcttgcaaaccaaagccgtgtctatcttattgataagcaatttaatgttgtggggtatactttactccttagtttgatcgagtataaaacacttgtaatgcgtggggattttgatcgtgcaaatgatgttttatcatctataccaaaggaacaatatgacagtgtggcacgtttcttggaatcacgtggaatgttggaggaagccctcgagatagcaactgacactaattacagatttgacctggctgtgcagcttggtcgacttgaaatagcgaaggtgattgctactgaggtgcaaagtgaatccaagtggaagcaattaggggagttagctatgtcaaatggaaagcttgaaatggcagaggagtgtcttctacatgcaatggacctcagtggtttgttgcttttgtattcttcccttggggatgccgaaggcattaacaaattggcatctgtagccaaagaacaaggaaagaacaatgtttctttcctttgtttcttcatgctaggaaagctggaagagtgtcttcaattgctaatagaaagcaatcgtattccggaagcagcattgatggccagatcttatcttcctagcaaagtccctgagattgtagcgttgtggaaaaaggatctccagaaggtaaacccaaaagcagcggagtccctggctgatcctaatgagtacccaaacttatttgaagactggcagattgctctgaatgtagaagctgctgttgctccgaaaagggttatctatccaccggctgaggagtacatgattcatgctgaaaggtcaaatgagaatttagtggaagcttttaaaaacatgcatgtacaggaagagatggtgccagatgataatgaagagtatgttcacgaggttattgaagatggtggagtagaagagagtcaagaagatgctgttgaggttgatgcagaggatgatggagtagaagaaagtcaggatgaagctgttgaggttgaggctgaggattcaactgatggtgctgtccttgtgaatggaaacaatagtgaggaacagtggggtatgaaaaatgaagaaccatcagcataaaagctgtagttgagcaagtgtacagtcctaaataccttatttttcctggtcttacctcccagtgcacgatattaggaaagctgggtgatatccttaagttgcccttgtctttagcggtatggcagttcagggagttttgaccaacctaggattcataaattttattaaaagcttagtgaaacgtttttaaaagtatcccttagattttttttgtttaaaacgttcctgttcctgttactggtgcctgctctcttgctaccgttcccatattttgttatgttcaatctatatatgcagatatggtaaatggtcaaatcgttaggcaatctacattgagacattcttctgaacagtatcgattgcagtataaattattgttttgacttttttttatttctaccagttttctcagtatttgtgtttgatgtacacagtttcactagaatgtttctaatggttgtcttttctttgcagtgctgactcctgagcaatagtggatcaacgggacagcaactttgcaagtggttaagtttgtaaaggttgctgactgctttctagagtacgaagtccattttctccagcagtattaagcatgagacgtgctctaggattggcttatccacatacgaagttggaccacaattaatcaaaacttcatcattgtgctcgataggaaattttgtgcttccttttttacatatagatcaggtctttaggtctcagaaaacttcatcaaaagtactcttgtttcaccgagatggaaatatgggatgtgattggtgatcggagtggtatttttacaaggtacatagagtagtagcttgtggaattgaggatgttttacatgtgatgtacatcggacttgggagctttgtatcaacagcatacgttttcaacagtctgtgtttagtttagtgaataatttgtgttgagctatgtttttgatgttgtgattgctaggctacttgtatagttgtgtatatccgactccgttgagaagctatctggccggagtgatagtgacagcggag

SEQ ID NO: 31233 - DNA, 1833 bp, Zea Mays
tgtcaaagaaaaataaaaagtcaatcagaataaccatgtgaaggcaaaagcagtcccaaaggtcatacatgtgcagggactattgactctgttgttctcttcctgagaaagagaggacgggctcacatggaaagtttcctttctgtagccctgggtgaattggtgactagatcaataaatttcatcatcaacaagttctcgaagccgccgacacttgccatggaggaaagcctacaaaggactcttctccgagcacaggtcatcgacgaggaggccatggggcggcacattccaaatcaagccatgatccagcagttaggcatgctgagagatgccatgcaccggggctcttacgcactcgacgccttcaggtacaagcctcactatggagaggacgacagtgttcaagttgtgagtggattcatgtccctatccaagttaccctttgcaaaggatccctatttcttcagtcgaactgcacagtctcgggaacaactacaagaggcacttgacagattgggctccatgattgttgatctgaatgagttggtgatgttcttggcgagctaccctcgtctgcatcgccaaccttacagcatgcatatcttactgggtaactgcatgtttggtcgccaggtggaagcagaacttgtcattaattttttgctgcacacacagcctcatagctctgaagaactggaggtcctgccaattatcggtccatgcagagtcggcaagagcaccctagtcgctcatgtttgcaaagatgaaagagtccaagatcatttctcagaaatcttgtggctgaatgaccttgcttttacagatgacgagcgagctttcagacagggatatgcaatggagcatcagaatcaagtgtcgaactggaacaaagacaagagatcgctagttgttatagaactatctggaaatctccatgaagatgcttggaacaggttctatcttgcttgcaaacggagcttttgtagcgggagtaaaatcgtagtcacaagcagttcagacagagctgcaaagtttggaacagcacaggctctagctctgaagcatctatctcatgaagcatactggtatttcttcaagacacttgcgtttggaagcatggatcctgagacacacccaaggcttgcacaggtagccatggagatagccagaacgcagaatcgttcaatcaacgccgcgtacatcatctgttatttgatgaggaacaattttaacatccacttttggtgcaaggttctgaggttcttcagagtgttcgtccagaagcatgtctccagattcggcacgcatccatacgatcttctgaaccagaacagaccaataaggattagccgaatgggtacagcttctgaatatttcactattcatcgtcagtatcattgctcttcacaagaggaggttcctaagataagagtccacgatgtggtgtatggaagcatgaagacttgcagaaaatttgaggtcctatcatggagatctccaatacccccctactacagctatgccaatacttatgagattcaagagcgaaggactacaagtgccaagaggaagcgttctacggaagatggagtcacattttgctaattttgccattacctgtgtcatgtaggaatattgtttcgttcagttttttctgggtaggatgccacaagttacaacacagaccaagtgtaaataaaacctgtgaagtgtcacaggttatagttacagcataatcaaactgtactataataactcttgtatttccgttatgctataataactcttgtatttccgttatgctataatggaaatgaggttgctatataa

SEQ ID NO: 31234 - DNA, 1712 bp, Zea Mays
  misc_feature (1711)..(1712): n is a, c, g, or t
agcccggcaaggtgccgtcgccgctgtacccgcagcacgagggggagcgggagtgggtgccctggctcgtccccgtcatcttcgtcgccagcatcaccgtcttcgtcgtcaccatgtacgccaacaactgccccgcgcgcgacaccaacaagtgcgtcgcccgcttcctcggccgcttctccttccagccgctgcgacagaacccgctcttcgggccctcctccgccacgctcaccaagatgggggccctggtgtgggagaaggtggtgcaccgccaccagggctggcgcctcctctccagcatgtggctccacgccggcgtcatccacctggtcgccaacatgctctgcctcctcttcatcggcatgcgcctcgaacagcagttcggatacggtcgtgaggatcggcgcgatctacgtgctctccggcgtgggcggcgccgtgctgtcgtcgctggtcgtccggaaccgcgtcaccgtgggggcctccggggcgctcttgggcctgctgggcgccatgctctcggagctgctcaccaactggaccatctacaccaacaaggcggcggccgtggccacgctcctgtccgtggccgccgtcaacctggtgctcggcgtcctgccccacgtcgacaacctggcgcacctcggcggcttcctcgcgggcttcctactcggcttcgtcgtgctcatgcgcccccacttgggctggatggagcgctacggactccccgccggcgcgccctgcaccgccaggaagtacctcgcgtaccagtggaccctcctcgccgtcgccatcatcatcctcctagtcgggtaagcaggacaggacatcctgattgatttatttatttatttattatatatatgcccttcgtagctggccaggccatttccttcgtccagcatgtacatataacaggagtaacgtgactggattctcctcttcctctctcatggctagccagcgtgttgacattgacaaccacgctgtgcacgatactctatgccgttttgtgtgcgctcatatataattcaaaagtctcaacaactcattattccttgcgtgtatggtttcctctctctgcagattcgcggccggcatggcgatgctcttccgcggcgccaacgccaacgacagctgccactggtgtcactacctcagctgcgtgcccaccgccagatggaactgcaccaactgatgatccatgcatagcggcagcagcacgagttggagttgccacccattttcatcttccgatccgtatagtctcgttactgtagatagcttctttgtcattcattcagatctcaacacacacgtcggtctcctgttcatttgattcattcttttacataatgatgcaatgcaattattgagatttcgaatctcgtcttgcgtgtctagtcagcatgcgccgcctttttcgaacccgtgcaaatgcgccaacgcacgcacaagagcaaccaccacgtgccttcccttctttttcttgacaacacatgtgtacgttctcaactgcacatgttcccaagataccaactatcacaggttggttggtgaaagtactacgcacagcgcatcacgaaggcccccccccccccccccccccccatgtcaacatcaacaatcgttaaacaacaaactatcctccactgcagtccaaactgcattgattaaccccacacggcgcagggcgccacatgggccnn

SEQ ID NO: 31235 - DNA, 958 bp, Zea Mays
attttgtcagctacgttgaaagccatgtttcgtattaatccgttgtcacataaagttctttctttcagcccttttgtgtatatgctcagatataaggattaaattgactcccgatgaatgatcatgaatacaactcagaaagctaatttggtggaacaagatgctaaggtttttgtgaaacaagccccacagttcaaaaggtgggggcgaaaacatccatttgttcggtatgggttaccactcatttccttgacagtgtttggtgcagtgggacttgctcaccttatacagggcagcaaagaagtgaccaaggaaaaggaggatatggaatgggaggttgtagagacaacaaaagctctaagtcgaacagggccagtggaaggagcctataagcctaagaaactctctctagaggacgaactgaaggctttgcagcagaaggttgacataaacagctacgactacaagcccatcccaagacccagtgagaaataagtgaagatgaagaccgtttgctagtgcgtcgagtggatgtttgtttcttgatactttcgtcgtctcgtcttgtcacaagttttgtatgaatgtacggagctgattcaagtttgaaattagaatatgaataggaataagtgaagctgtagagaactggtacgaggatccttgaaccgtttgcatatgtttgtttccccccccccccccccccccccccttttttgggttagtaaattctgatgtgtctgatcagttttctagtgtttatttacagaggaaaaaatataaaggtacagtgcatcgtgttgatctagtttttttgtcgtattattaccagcttgtgtttcattttttttgctcttcatttgttttttattacacatttgtatggttctggcagacaaagaggtaataattcattttttactcacagtgcacataagcaaccggttgtgaatctaag

SEQ ID NO: 31236 - DNA, 2993 bp, Zea Mays
atgtctcgtgtgaatggagtcactgacgccttgagcatcggtccctccgcagggtacattctattcttagtaattgtgcatattttactattttttactgcttatgatcgttcatatacactcttagccatccaaaaggttactcttttatgctccgcttgcaaggcgccaaggacggacggaggcgacgactcgcaaggtagctctgctcgggcgaggcagcagcagcacgcagcagtactccgttcagaatcaggagagaagacgttgttctccgggcactcgagtcgaagtcctgacgagatggacggcaatgcgaggtcggcggcaacgaatcagaagaagcccgtcgtcgcggacgacgacctcgtggagctgctgtggcacaacgggagcgtcgtcgcgcagccccaggcgcaccagaggccggcgcccacctacgaccccgaccgcccgggcaccagcggcctcaccggcgaagagaccgccgcgtggttcccggacaccctcgacgacgcgctggagaaggacctgtacacgcagctctggtacagcaccatcgccgacgccgccccgcagcacgagggcacgctcccgggccctacctcgcagccttcgccttcgccgcccgttgggagcagcggcgtcgagtcgagctgggctggcgacatctgctcgaccttctgcggaagcaaccaggtgctcaggacgccggcaaggatcagggggaaggacgcggcattgcagtcggagttgccgagcaataccggcgcgcacgacggcacatcgtcatccggcgggtctggaagcaactatgggggattcgggctgcccagtgacagcgtccatgtacagaagaggaaggggaggtgtagagacgactcagatagtccgagtgaggtgtttcttggtctactctgttcatcatttttggaaatagggatgctagagtggaatataattgacgaggaaattgcaggatgccgagtgtgaggaggcaagtgaggaaacgaaaccatcaaggcgatatgggacgaaacgccggactcgtgcagctgaagttcacaatctttcagagaggaagggaccggatcaatgaaaagatgcgcgcattgcaagagctcatcccgcattgcaacaagactgacaaagcgtcgatattagacgagacgattgagtatctgaagtccctccaaatgcaagttcagatcatgtggatgacttctgggatggcgccaatgatgtttcctggtgttcaccaattcattccacagatggctctaggaatgaatccaggttgcatccctgcagcacagggcctaagtcagatgccaagattaccatacatgaaccacaccctgccaaaccatatccatctgaactcgtctccagctatgaatctaatgaatccactgaacgccgcgaaccaggtgcaaatcggtcacctcagggatgcaagtagccacttgcttcacctagatggcgggcgagcagcagtggtacctcaggtaccaggaccaggaccccatgttcatggacatcaaatagcacaagccgaagaacacaataagatactggaagtggcagctagtactgttataccaacttctaaggcagggcaaccaccaactttacatagagtttagagtgaccaaaatcatgccttgagctgtatatctgtacagaagtgtcagaagcatattctttgacatgtaagcttagttctagagttattatcaggagtcttgtataggttacaagataacagcctgtctaccgccgtattctatctacggaagaactcagctgcatactgctgtgcagactgcagtacagcgttcaagagagaattgaatgggatcaagaaagggtctttctttttctgggaaccgctgaaaatactgacgtgatgaggagcggatggcatctctgtagctgcgctgcgctgcagtgtatctacatcaatatggcaatgcttgtctggacacgaatgctacatctacatgtaaatgcagagttgcaggtagatagcaacccctctcccctgagatgccaactccgactcctgtcctactgtatgtactgatctgtacagcaagcaatattcaatcagcagtcaattcctaggatgtcgtaaggagatgagctcgccagacagtccatcacactgccggcttgattgcatcttcacaggacgtggacttgtgggcacatgctccacgggcaacggttcggcatcctcctggcgttcttgtggctggcagcagccgcgagaatctgtgtggagccctgggctgggctcgttgcaagatatgccagcctctcatcttcagactggaggaggaggggggggttccctctccaggctttttccatgatgttacaggcttacagcattcagagtgcatgttacactcacggccctatcagcacatgctgtgggcagccggtgatgataggatcagatgctcatatctcctgcggttttctgtctaccgcatttggattggatttggaccccccctgtactgtacttcctccttgctcccctgctgcttggcgctttgtccatgtgcctggttggaattgctactatacatttttggagggtaattgtttcaccggaacatgtagcgtggacgtgtggtaataacaattgaattgatgcctttactgtctgagtaataacaaagggaagcgatgagcagcacatggtaagcttccggtgccggttggaggcttcgatgtcgatgtctgcattgagtttatttgatgctgtgtgttctatagctagactaggctagagtttggatagagttcatgggacaatgttgtctgcatcttcatctcccctttagtttaggacttatctgagaggtacggttctttgcatgacagaacaaaactagcagcagcaaaaaaaaaaaaaaaaggaaacaacgacaaaatataaaaaattggcttcgcccgggttcgaaccggagaccttcagt

SEQ ID NO: 31237 - DNA, 2841 bp, Zea Mays
gcgcgacctctctcccgagtctactactctacccggccagccccctcccctgttttccttcccatctcatcacaagcagaagaaaatcgagataacgagagctagggttttgattccagtactcacgccgcatcctgtctccttctgcccctccctctcggcaccgcctccgccccctcattctctctcgcgtcatccggcggaggctcgaggaaactgaggccgggagcgccccgaagaatattctccacccagtcgccgacacccctgcgcgcgcgagagttaccattgtactgttgtagcttggcagttggttgactgtgtgacaactttgagctatgtcatattacgaaagaaggggtggagacaggggtagtggccgtattcaaggaagtggtgggcgaggtggacatgtcctgcgtggaagatcaggattggctccccgaggacctcttggggttaactcccgtccatctgcacgcactattgctaaggcaaggccaaacctgtcactatgtttttgttcatggtcaggttcctgactaaagtagaaactgaatggggagagcatgcctaagcttacattatatggaggggcaggagtatctgtgatgtctgtgactaatgtgttctctgtcagtattgtttggaggcttggaggggcagatgcaactttggtagaaattttgcagtagatcataaggttgaatttattgaggggcagaagtaaatggtggtcatctctaatgggaattttgttggaacaccaccatttcttcaaacatatggaaggaaatagatgaaaaataaagctggcggactccagtttgatgtgtctaaatcatgatatgctgaagggaagactccatcaatcttcttgccatatatggaaattgcaatgtgccccttattcaacagttctggattccatactcccatggaagttcttctagtctgcttccatagcaagtgcacaagccatttgtctcctggacttttgtgatattggtggagctctttccttctcagctgttaacttaatgcagtacttcatggttttgctatttctcggttataattattgctactcttcctctaaagaccaatgataagtcaatgtggttcgtgatgattggcatgatcatatgaaaagtttgaagagatattcttttataatgacatgttccctcacatgcttggatgtttggcatttttcagtcatttagcagaaccaaagacatgacatggcgacctgatctatttagtgatagcatggcggctagtggaatagaaactggtacaaaattgtacatttcaaacttggactatggggtctctaatgaggatataaaggagctgttttcggaagttggtcatttgaaacgctttgctgttcactacgatggttatggccgcccaaatggcactgcagaggtggtgtttacacggaggagcgatgcaattgctgcactgaagcgttataataatgttctacttgatggaaaagctatgaagatagaagtcatcggaaatgacttaggattgcctatgacacctcgtataaatgttgttggggcttctaatggcagagctacaagaacagttgttatgacgttatgaaaaacaccccattgctggcagagattactggtttacagcaagctagtcttctttctattatacctgatctgcctgagtttagtcaacgtggcagaggttcaagcagtagacctctaaggtaaggcttctgtcaaagccgaatttttgttttagttgtcttaatttgttgcatttaatactagataaacatggtcccttttatttgcttggcttcgtccatcccatgccttattactagtagactagtagtttactacggcatcagattttcaatgttgcaatagcttgatctttattgttagctttagatgtttgacacctgaatactcttttataaacaaacatgatgtgtgctggttgctagtcgctaattaaacaatgagcaatttcttgtttatcatgcaaagaaaacatgttttgcacggtatagatgtactggaggcatgcaaattctataatgttttgagaggtcaaattttacatattgagttgtggacttggacatttgacaaaaaagagtgaggaaagaagtgcgcttcagttattaacttgttagtatggctggacatctctcttgagtggatgcacctaatacactgcaaaatatgtttttaacaaaaagtttgtttgaccttgtcctgacccatgaccttacatattgccgttcaagtaatcccagcaacaggtttaataaccgtggtggtttccaagctggtcgaggccgtggccagttccagagctgggggagaggccgtggtcagttccagagccgggggagaggccgtgcccagttccagggacgagggagaggcaggaagcctgagaagactgcagatgagctggataaagacctggaaagctatcacgcggaggcaatgaaaaccgattgattgcaaggccggtagtgccacaaggttgtggttttatccatcattttctgggagcaacgaacatgctttgtgctttggtttcaggagactagactcttgtagtaaattcgaacaaaagattgccagtttgtagtgtttgcatgaagtttgcaacctgatgtgtttatttttgtatcggttgctttggagattgtgttaatttttaggttcatgcttagaataaccgtaattggccaaaacatgcacccggccctgttccgctctgcgatgtgccttcgcagcattgtgttatttttagcatattgcagtttgtcggaggttagtccggtgc

SEQ ID NO: 31238 - DNA, 462 bp, Zea Mays
aggaacaggaaaaccttaaaaacttatcttgaccgaaccgacgacgccatcaagtgaaagagcaccacctgaacgtgcacgcaacatgtcaatattatccgtgcatcacccactcaaaagtcaggacaaatctccacagcaagcaatcactttgtcatgctctcgagagagttctttgaaaataactgggaagaactctttactcctcgacgacaacgctgatctggcccttgtcaagcatgtcatagaaggacctagtcttcctctgctcgttccagtggtgcatcttccacatgcctcccgcgatcagacccagggtcagtccaatgaagatctccttcaccacactcgggcccttgagggtggcatgcgcaaccctgccgcctgccatttgctttcttgcttgttgaggtcagacgccaagtactcttaataaatgcagacagcgtcacatttcggccc

SEQ ID NO: 31239 - DNA, 1975 bp, Zea Mays
tccgggaacgctgggccagaggagaaacaacatccgtccagcttcacttgtgcatcatgaacaaggaacattagcagccctgcccgtaattacctgccactcgccacagcatcagcagtgacgtcggtggtgactcctcactcactcgccgctcgatcgcctcccagcactagcttgctcatgttcgtgtctctatataaccccacgtatccggccggacctatcacctctcgtgcgaagaagaaagtgttctcttgcttgatccgccattcagaagccggccactaatccgagctaggcacgctcccatccgacgtcgtcccagctagcacagccatttctgtttcgtttcttccactgcagtcagaacccagaagcagaggccgccgttgcaagcatgccgccgatggaggccgccgaggacgtcgtcatcgtcggcgccggacttgccggactcgcggtggctctcggactgcacaggggtgaggagcctggtgctggagtcgtcgccgtcgctgcgcgcgtcggggttcgccttcaccacgtggacgaacgccttccgggcgctggacgccctcggggtgggcgacaagatcaggaggcagcaccagcaggcgcaggcgctacgcgtcatggcttcttccaccggagaaatcgtacaggaagtggacctcacgcagcaggggaaacgagggcccaacgagatccgttgcgttcggcgggacctgctgctgcaggccttggaggaggagctaccgagaggcgccatccgctactcgtccaggatcgtgtccatcgaggaggaggacggcaacggcgacaaggtcctgcaactaaccgatggttcagtcatcagagcaaaggtgctcgtcgggtgcgacggggtcaactccgtggtggccaaatggctcggcctcgccacgccgtcctactcggggcgctcggcggcgagaggcttcgcgcgttacccggacggccacggcttcgagcccaagttcctgcagttcgtcggccacggcttccgctccggcatgctgccgtgcaacgacaccgacatctactggttcttcacctggactccttccgagaacgacaagggcgtcgacgagagcgcggccaagatgaagcagttcgtgctggccaagctccggggctccaataaggtgcccgcggaggcgctggcggcgatcgacaggagcgagatgagcgacgtgctcgccgcgccgctgcggttccggtcgccgctgtcgctggccaccgcgagcatcgccaggggcagcgcgtgcgtggccggcgacgcgctgcacccgatgacgccggacctcggccagggcggctgctcggcgctggaggacggcgtcgtcctggcccgctgcctcggcgacgccctgctgccgccgcctggcagtggcagtggcagtggcaggggcaaggaggaccgggtccaggcggccttgcgcgagtacgcctggatcaggcggtggaggagcgtcgagctcgtcgccacctcctacaccgttggcttcgtccagcagagtgacagcgcggtcgtcagcttcctgcgggacaggctcctgtcgggagtgctcgctcgaaggcttctgaaaatggcggactacgactgcggcacgctcgaaagctactagcccccttgtactgtttcctgtgtgtacatcagtacactacacgtgttgtgttgtgcctgctgctggaataatatgcctactgttatgtgttattagtagaaaattgtactgcaatatcatcacctctgttgcacatttttttctacccttgtttatgcatagcataggaaccgtcacatcgatgtaacttttgatttctctgcttatcaaccatgcactaacatcacctgatcaccgtaaacaaaaggtgcagtgcagagtcgagatggcctcgcaccttccacgagtgtgcgcgtcactagccgccggcggcttcagggaaggaggca

SEQ ID NO: 31240 - DNA, 4634 bp, Zea Mays
cttaaactctagccagaaatcttaagccccttgatgtgatgaaagtttttgtgttgcacggctactttgcccccggaggatccagcgaaatgcaatgcaactcatcttcgtcggggcggacaaacagacgacacaaggcgaaggcaccgcccgcacgccgacacgcgcggctacacctgccactcctcccgatctcgccggccggcgactggtgcctcccgccccagccctcctccgggggcgatggaggcggccttcgacgcctacttctgcgccgcggatctggaccgcgacggccggatcagcggccaggaggccgtcgccttcttcaagggctccggcctcccgcagcccgtcctagcgcagatttggacatatgctgataaaaatcggactggtttccttgggcgcgaagacttctgcaattcgcttaaacttgtcacagtagctcagagcggtcgagaattgacacctgatattgttaggtcagcattatttggtccagctgctgcaaagatacctgctcctcggataaatgtttctactgctggtcctcagacaaacagtgtagctagccccccgaatgccactcgagcactagggtctggtcaacagaatcctgctgtaagaggaccacaagtgcttcctggggcatcatcaaatccacaagtgaggccgccacaacctccaaatgcaaacactgtgccccctgttcagggagttgcatcaaggccacccgtgggaggtggtcctagtgggctaaaccataccagctcaaccacaacaaatctcgctacggattggtttagtggtaagaggagtgcaagttcgttgggtgcaacttcacaagctccaaccagaggtatttctccgcagggcaaccttactactgcaggaatttcagcacagaattcaactcctctgccagtctacaattctcatatgccgggtgctacaacacctgccaatgcaaattcaacaaacgtaaacatgatgccttcacaaccatcagttagtgactccaagacattggtacccttgggtaatggattgccatctaactcaacttttggtgttgaccctttttctgtgactctacaagcgaaacaagagtcagctttgacccccaatgttccaaataatcttcccagttctacagctcctgcctcagctgctggacctcatcaccctcctaagccaatgcaggccggtcctttgcagggtatatcgtcgcttccttctcatactagccagttgccacacagtcagccagctcctaggcaacaacaatttaatgctattccaagcactccaggaccagtgggtgcaaatattcctggtggacaaattccttcaaacccataccaatctcaggccccatggccaaaaatcactcaagtggatgtcaggaaatacatgattgtatttatcaaggtagacagagatcgtgatgggaagatcaccggcgaagaagcaaggaatctatttttaagttggaggctgccaagagatatcttaaggaaggtatgggatttgtctgatcaggataaggatgggatgctgtctttcaaggaattttgtgttgccgtgtatttaatggagagacaccgagagcatcgtcctcttcctgatgtactaccagatggtatttgggctgagggcacctcgctaccctctaccggccagtttgcaggaaaccctagtggaccgccttctcatgcaagtacaggattcgcaagtagaggaatgcaaggaccacatcatgggatgcttccctcatccatgaagccaacatctcgaaggcctcttcctttagatgctgacgatactgttaaggcagagcaacaaaagccaaagatccctgtattggaggaacatctagttggccagttgagcaaggaggaacaaggcacactggatgcaaagtttaaggaagcttcagatgctgataagaaagtccaagaattggaaaaggaaatccaggattctagagagaagaccgagttttatcgcaccaagatgcaggagcttattctttacaaaagtaggtgtgagaacaggcttaatgaagtctcagaaagtatgtctgccgataaacgtgagttatcagttctatatcaggttcaatcccttgcagcaaaatatgatgaaagatgcaagaaggagaagaaacttgaaatttataacgccatagttaagctgcaaaaaggggatgaaagtgatgaaaagcttcaggagcgggctaataagatacagtctgatcttgaggagcttgtgaaatcattgaatgaacaatgcaagagatatgggttgagagctaagccaactacattggtggaacttccttttggttggcaaactggaatacaagagacagcagctacatgggatgaagaatgggacagatttggagatgaaggattctccatcataaaggaactaacagttgaagtagagcctcccgttgtaccaaagagtcaacctactgttgaagatgtcaaagtgtctacaaatggggcatcaacagagaaagaagacaataagtttgctaaatctactgctgctgctgctgtggagcaggcagttgaacctgaagcaataccatccaatagcaaactagagtcaacaaaaagtcctccagttagtcctgtcaagaacagagacgatggttcgaccgatgagcttgatacaaagcaatctggaccaaatgacgtcttaccacgtgccactgagagcgtcagtaaccgtggaatggattcctctgcccatggagataaaacttatgatggacattcatgggccccatcatttgatcatggcactgacaatgactccctatggaactttggtcataaggatggtgagaatggtgattcagatctcttctttgggccacaaggtcttccaccgataaggactggaggttcctcatctaatagtttgtttgtcaaggaacagaaaccatcttttgattctgttcctggtactccaatggagaaacctttctttgattccatcccaggcacaccagttcagaagtccgtcttcgattactccgtccctagtacaccgatgcaaaactcagtctttgattattccatcccaagcacaccgatgcaaaagcctctctttgattccgtccctggtacaccagtgcagaaatcagtatttgattctgttccgagtacaccgatgcagaaatcagtatttgattctgctccaagtacgccaacgcagaaaccattctttgactcttttccaagcaccccaatgcagagatccatgtttgattctggcccaagcagagcagaatctcctactgctggcagcgtgtacggcaaagagcaaaagggattctttgattcttcagttccgagtacaccaatgtacaactcaaacctcacgcccagatacagtgaagcaggagatgattcatttgacacaatgtctcaatacagctccttcggcatgcacgacaacaattcttttggacagatagacagcttctcaagatttgattccttccggagcaatgctgataatggcggtaatgacgcctttgcgagatttgattctttccgcagcacttcagatcaaggcgggggcaacagcttcatgaggtacgattccatgaacagcagcagtgaccatgacagaacggatacatttgcgaggtttgattccatgaagaacagtgacttcaacaaccagggctactcatttgatgatgacgacccctttggaactgggccgttcaaatcaacagagacatcgaacagcccgacgagacatgggacggatgcgtggagtgcattttgacaggtattgtattatagaggtcatgttcttgtgcaccttactgcagatatacatacacgtacaagggcaagacattattttttttgcatgggcctctgctccgcaccttttggacgggacggggcttgcttgtgtgtttaattttgtacctaggctgggaacatgtgtttggagggatggtgctgcttataaacattctttataccttgtattgtacaagtacacctacaagatgctagtcaacccgttgggttgaagaactctccgagtgttttcttccattgtgtagggttttttttctctctcagtttcttctgtttctgcaaaaagttctgagctctgtacatacattttggctaagtcaacctagttatgaggatattgtgagcaattaagtcggttcagcgagaagctagggatcagtttgttcgttgttttaacaaaccgtgagggttgccctccataggggtggtcattctaaggctgaaacttgaacccgaactaaactcgaatagaccgaattgtcggtctatttgggttttttggttcaggttcgattcttatatgtgctatattttggggtatgggttctgttgggggtctgctgctctgcttcgtcgtcgaaggttctttaaaaagaaataccttcgaaagatcagcgtataatcaagcacaatgtgaaggtatacacgaagctgctgtcttcgaaagatcagtgtataatcaagcacggtgcgaaggtatacacgaagctgctgtctgaggagcttcggcataatgatagcttgagatgaagggctgcaccgacttaaaaa

SEQ ID NO: 31241 - DNA, 2010 bp, Zea Mays
atgccattgccatcggccgcccagagcgctctcgtcgtggcggccgtcgccatagccaccgccaccgtcctcctccccttcccacggacgccgccgcgggaccgcttcgccgacatggtgctggccaacggcaccatctacaccgcggaccccgcccgacccttcgccgacgccatgtccgtccgcggcggccgcgtgctccgcgtcgggacctacgagtccgtcaaggagctcaagggccctcgcactcgtgagctgaatctcagtgggaacgtggtgctgccggggttcatcgactcccatgttcacttcatagacggtggattgcagctagcgagggtgccacttcgtggggtcagaagcaaagatgacttggttgccagggtcaaggaagctgtcagagataagcaacctgggcagtggatcttgggcggaggttggaatgatgattttgggggagatggtctcccggctgctgtttggctggatgatatctcacctgataatccagtctggctctctcgcatggatggtcatatgggagtagccaactcattagctatgaagattgctgggattgacaaaaacacaaacgatccaattggtggaactatcatacgaacaactgaaggagaagagaggctcttcttagagcaagtagacatgccctaatgaggggagtgactactgttgttgatgttggaagttacttccctggggcctcagctgagaaaacgtggcaagattttgcaggtattctgtaataccttcgcttgcattgcatggacaagaattagaaggattcacttgtcttgtttttatctatgaccttatttgtactcctggcatactgacacaagatcttattagtgaacatggtcgatcgctaagtcagtggatccatctaggtggtgttaaagctttccttgatgggtctctgggttcttcaagcgcgttgttccatgagccttatgagggtgatccggataattatggtctccaaatgacagatttagacagcctacttaatagaacactagaatctgacaaatctggactccaggttgccatacatgcaattggggataaagctaatgacatactactggatatggttgacaagattgttgatttaaatggagcgaaggaccgtagattccggatcgaacatgcccaacatctggctccaggtgcagcaaaccgctttggcaagcatggtaccattgcatccgtgcagccagatcatctactagatgatgccgaccatgcttggagcaagattggggtggaaaggtctgagcgaagctcctacacatttcgatcactgttagatggcggtgcgcagctagcttttggttctgactggcctatttcagacatcaaccccttgcaagctatccgatccgcagtgttccgcaagcctcctggatgggaggtcccctggatccctgcggagcgcttgaccctggatgaatcactgaaagcgcacacgatgtctgctgcctacgcctgcttcctggaccacgccgtgggcagcctttctgaagggaaatacgccgattttgtggtggtaccttctacatcgtgggacgaattctccagcgatttgccggggcatgtcctggcgacgtacgtgagcggcaggcaagcttatccatgacagatagcagttgtgtaagtgttggagaccaaaaagagcagcgcggacagtccggccctgaggccggaaggccggacgatccgcggtccggacagtccgcggtgatggcgcggacggtctgcgcgtgcgcagagtcagttaggatttctagtttctcgcgggatttgttacctaaaaccgcgggattaactcggaaatctgttggaagcggatccagacctcccctttatatcgatgaagggctacggccgattgaactccccaacaatcgaacaaatcaagtctatttctcgtttttaccttacgcattaggaatagttctagtctagttctagtttagcctctcaatc

SEQ ID NO: 31242 - DNA, 4285 bp, Zea Mays
ctcacgttcattccgcgggcgcagggttctctctcgtggcgatcgctgaccgtagcggccaccctccgccaggtggccaggttttcgtgtggccctccgccatgtcttcgcaggaccctccgccggcgacgagcacccaaaagaagcaatcggagagtttggtaaacctactggcagaggcaagcaggttctaccgcaaagcatataatgaactgttctcaggtttaattactgagtgggagcctgaatcatctactaatactcctgactatatgctttttgggtggcatctcttcttaacgcttcgttcgagatcaccagaattgttcaaggacctggtgtcctgcatccatggattagttgctgtattggccatactattggttcacgtgccagctaaattcaggaccttcacgattgaaggctcttctcacttaatcaaacaaactgagaaaggcgtggatcttattgcttctttatgtcataattatcatacctctgaagaatgtttgaaagaaatgatggacaagtctcacaaggcaatagaagaagttttcagtatgaaagcactaagtgcttcagagtgcaaaacagagaatttggataagatagacacagatcgcctgatgtatttcaaaggtctcattgatatggagtgtttccagtcaaatctggaaaaaatggagaaactatgtaattctaataactgtgaagcggagcttgattttaaattaattttgaccaataatgattatattccctgtgccgagaatttgtcgagggattccactaatttaggatgttcaaagtgtgcctttgaaacattggcatctcccacaaagacaataaagaacatgttgactgttcctagttcccctttgtcacccaccaacggtggttcagtcaagattgtgcaaatgacaccaataacttctgccatgacgacagctaagtggcttcgtgaggtgatatcttcattgccagagaagccttcatctaagcttcagcagttgatgtcatcatgcgatagagatttgacaaatgccgtcacagaaagggtcagcatagttctggaagcaatttttccaaccaagtcttctgctgatcggggtggctcattaggcctcaattgtgcaaatgcctttgatactctatgggcagatgccagaaaaatggaggcttccaagttgtactatagggtattagaggcaatctgcagagctgagttacaaaacagcaatgtaaacaatctaactccattgctgtcaaatgagcgttttcaccgatgtttgattgcatgttcagcggagctagtattggcgacacataagacggtcatcatgatgtttcctgctgttcttgagagtactggtctaacctcatttgatttgagcaaaataattgagaactttgtgagacatgaagagaccctcccaagagaattgaaaagacacctaaattccttagaagaacaaattttggaaagcatggcatgggagaaaggttcatcattgtataactcactgattgttgccaggccatctgttgcttcagaaattaatcgctttggtcttctggctgaatcaatgccatctcttgatgacttagtggcaaggcagaatattcatattgagggcttgcctgctacaccatctaaaaaacgtgctgctggtcgagacgacaatgctgatcctcgatcaccaaagagaccatgcaatgaatctaggagcacagtagtagaacacaatttgcagacacctccacccaagcaatgccacatggtgttgactagtttgaaagcaaaatgccatccactccagtccacatttgcaagtccaactgtcagtaatcctgttggtgggaacgaaaaatgtgctgacgtgacaattcagatattcttttccaaaattctgaagttagctgctattagaataagaaacttgtgtgaaaggattcaatatatggaacagacagagcgtgtctataatgtcttcaagcagattcttgatcaacagacaacattattttttaatagacacatcgatcaacttattctttgctgtctttatggtgttgcaaaggtttgccaattagaactctcattcagggagatactcaacaattacaaaaaagaagcacaatgcaaaccagaagtttttttaagcatctatattggaagtaggaatcataatggggtattaatatcacgccatgttgatatcattactttttacaatgaggtctttgttccagcagccaagcctttcctggtgtcattaatatcatctggtactcgtccagaagacaagaagaatgctagtggccaagttcctggatcaccgaagctatctcctttcccaaatttaccagatatgtccccaaagaaagtttcagcttctcataatgtatatgtgtctcctttgcggcaaaccaagatggatttactgctgtcaccaagttccaggagtttttatgcatgcattggtgaaggcacccatgcttatcagagcccatctaaagatttggctgctataaatagccgcctaaattataatggtcggagagtaaacagtcgattaaactttgacatggtgagcgactcagtggtagctggtagtctaggccagccaaatggtggttctacttccttggatcctgcagctgcatttagccccctttcaaagagaaagccagatacttgatcaaatataaatggcgatctctctcgtatatagctcacagctccatagcagtctattcttctgaataagtgggttgactggagtgatttaactgtacatgtatgtgttagtgagaaccagcagtttataggcagcaaactgttttaaattagctttgaggttttatcaccatttccctgctgattgaacatattttagattgtaacatctgctttgtagaatgctaatgaatctttagttttcagtgggttgacattaaaaatccttatcctagttggctggttgttgggagacattcatcaaggttatatttggtcgtcaaatagtactgtacttgattcatatctttcatatttttcactagcgttggcaaccgtaaattgctttcctgactaggaacatattcttcacaagtatggcaactctaaactatttgaccttttatattctcatttttaagtactttctctatttctgctacttttgtactgtgtatttccagcttctccaccagactgattgttagagtgtatgctcctatattatccatgtatgtgtaaaatgggctgctagcccattagggttagggttcccctgggtctatatatgtaaccaccctctatgcaatagaagttgaatatcagtttctatcactaatgattccatattcagtgggctgcaagtgatttgacatacgtgccttatccttcaggcgagataaggaaaatctgaaatgctatcaccatttaaaacattggctcctggaagttcaggtgattaacaaacctccttcatctacatctgacattggcatgtatggtagagtccagcaactcttgtgatggcaggagtcgttcttaaacagcaactgctccttcgttcagcgcttctcatttctgattgtattgaccgagagcatccacctttccttctggtatcaactgaatgagttgccgacaccgacccatctgcgcataatggcaggttaggtgttgctgtagaatgagatggttaccatctttacaagctcaggctatatgatttcagcagcactgtaacctggggtgcaaatgttaaggccctgcaagcactttccaggccacaccaattctgcttggttcttgaagatacattcttcctatggtgccccctatataaaagccatttctggttgttatgtttatccttgacatgtcaacagattagtgttgggttgcagtcatgcggtccttaagtctcggagaaggcgagaagtcattgctgctagcattgtgatcgtcggccacgaaagtaatcaaaaagtgagagctacttgttcctagcaaatggagaagggcgatatataggtttatgatcaaattcagtgtatgcaagcagcatattttgtttagagttagcttttgaggttcatcatttcatttcacagctgattctctatgttgtaactccttagtcgtgtagaaattagaatgctatctgcttaatttttagtgaataatttgctagtatattttttaatgtaattgcagtagctctgcctcttcattaaggaattgaccccgttttaaggaaaaaccagtcca

SEQ ID NO: 31243 - DNA, 923 bp, Zea Mays
tgcgggtatgagtaatattttatatccgcgagcgtatatatgggtaacccgttgtcatccctaacccacatagacctcgcccttggctcgcatggcttccggcttcttctcctcgccgttgcgtgagaccgcgctaaaaccctaggctttgagaccccaatggcgtccgcgacggcgacggcgcccgcattcgctctcgcgtcgtccctctcgcgccgcggtttcctcccgctctctcgtcgcgccggccggcccgtgccccagtcgctgcgcttcgtagcgtcagccgtgaggcggcgccgcagcgcggtcgtggtggcagcggacgcggcggcagcggccgggagcgcggagttcggcgacgaggagaacccttatgagcttctgggcatcaggccgcttgatagcttcgaccacatgaagatggcctacaagaagaagcgcaaggacgccgaggagactggagacgatgagttccttgccaagttggatagggcccacgacactgtcatgatgcagcagctgcggtatcggaagaagggagtcacatacgggtctgttcaggtgtccaaggatatcaagtatgctgacaatcaaccaatagtgctttggggaccaagattctccagatcaacagtgaaggacatgcgcataaatatggcaatatcagcagcatttgttgtttggatagctattatgggcaatgcagactggaagcctttgcagttcctatgttttgctttcttctgcagaatactacagaagctaagagctactgaaccactaataactccaatatacaatgaatatggcgaggttgaaggacgaggaataagaatggcaaaaagagtagtccgtgctctgggtttgatttttggatgtgtgttcactgcatccctgtttgattgtcctcctaatatttt

SEQ ID NO: 31244 - DNA, 1575 bp, Zea Mays
atttgcctatttccggtgcaggcagtctggcagagcaggcaggcaactgggccagagtcagacaggcctgcccgccacgccgtcccgacggccatggcccgacccttctcttccccacacatcccgtcttcatcctgggtgactcgccgccctcctccctggacctcctcaccgtccgtctccaccacgagaactagcgcctcgtctattaccgcgtgcagaccgcgccgcagggcagtcgcgccggcggcctccctccacctcggcccgggggagatcgccgagctcgcgcgcaacaaggttttgattgcggcgacagtggcgagcgcgatcgggcagctgtccaagcccttcacctcggtcaagaatgggggcgtcggcgccggccttgacctcagaaccgtcttccgctccggagggatgccctccacccactccgcggtgaaaacatcggattacctaccccactcccttaccaaaaccttttcttttccagtttttgcgttactcgcaatctttggagatacctcttccacatgtttgcactgttgtgctaagttgtggtgtggataacctagtcacagggaaaatgtttgccttatgtggtgaactgttatatgtagtttgcacaatgaatgattgaggatggctctatagatctttgaggagttctgaaatataaagtatcccaaacggctttaaaattgaattgaaacaaatgtggtggtttgtcaaacaagaagtgctgcaaggtcctatctgaatctgctgtttttttattctagagtaaagtaattctgttttagccttaccttttcatgtaaacctttcaaatccccttgtcattgacccttctaacggttctgagttctaacaaaactttcctatcttgtagagcgttgttgcagttgctacttcgcttgggctagaaagggggtttgcagactccatatttggaatgtcagtggtgtttgcagcaattgtaatgtatgatgctcagggagtaagaagagaagtgggcaaccacgccaaggtcttgaacaggttttggatcctcaaagagaaggcacctctggagtattctgaagtggacatggcagctcctgagtttgtttcggtctccgaggaagcgagctccaatgcgagcccctccttgaagcgcggttgtagcaccgaatcaccaagggtgaatgggctccgtgggtctgagctgactgagctgaagcaggcttacgtagaggaggattaccggttgagtgaatctgttggccacacggagcttcaggtcacagtcggcgccctgttgggttttgctgtaagcttagcagtgtatgcaacactgtaagagcaacttttcatatcacgtcccttaattggttacacatttacacctttttttttacacagaaacaatacatgcggtttattgttcccaccgtttaaatcagaaatgcctatgctagctcgtttcacattctgtaaccaaatatactgagttcttaatcttttttttgttttagatagaagtgagtgaatgctactctccccataaaataagtgccattatgatatttg

SEQ ID NO: 31245 - DNA, 2482 bp, Zea Mays
atttccgagcagtctgcgcgtgccggcgtgcgtcagtctccgcgaccgcccgtgagccgtgatctgacgaggaggcgcacctgcttcgcccgcgctgcgacgactgacgactgacgaggcgtgcggcgcgcgtgaggaggaaggcttctccatctggcaaccggcggcaggaggacgatcaactccgcgactccacttcctcacgcggcgtgtcctctccccggaggaggcggaggcggctcacgggctctgattggcggatggcgcgtcggatcggagcagtcgagcttcggggatttcctgtccctctggaagggatgaaatgcggcgactacctggtgaactgggtggagctctagtgccagccagtgttcctgctgacgcctgcctcatctagtccccccttcgttcagttcttgtggcgagttgttaatccaccgtgtccgggatccgtttggcctggggttttgaggagatggacgacgaggactactcgtgggtgcggcgcaccaggttctcgcagtccatcgtcagatccagctctggcagggagcagtatggcgcgttcatcgagcagttcagccgtggcgccgagctgaggcagaatgggttgggcacagggtacaggaaccctcgccagagtgtacagcccttggcgaagggatccggggtctccaactctgcaaggctgccgattcccaaggcgaagtcagcagttgcccagtcggaacggaagctgaagcatgcgtcttccgaaggccaattgaacagagacggtgatcgcccgttgcaagaatcatcggcgaagcagagccggaaaggggccgtcggcctcagtctggacattccgcagctgcatgtggttcggccatccaaggagagcccagacgcgctggatttctctttccactcggacgagcacagccagaggctccagagagtgtgttccagcccggctcctttctctacgaaggatggtacggcaccagctggtgattccagagcgagcagtgcatctatgaagatcatcggacaagtgtccaaacccgcgccgaaacgaagagccaagtcccctatccccaagcgcgtcatctcggatgtgtttaaggaggcgaaagcagccaccaagaggttctccagcccgcagcggcagaggaagcccacatctccacggtcactagatgacagccctccattcggctttgcttcgctaagaacaccaagcaagctgaagattaatagcagaacctcctcatggccgagaaggaacctcgacagtgggctggcgaaagttgctgcactggagatccttgagaggtggacggtcgatcgctctgagttgctcattggacataggtttgcatccggggcttatagccgattgttccatgggatctacaaggagcaacctgttgctgtaaagtttatcagacagcctgacgatggtgaggatgacgaattatctgctaagcttgagaagcagttcacttcagaggttaccattctggcaaggctccaacatcgtaatgtcattaagcttgttggggcctgtaattgcccgccagtattctgtgtaatcactgagtttctgtctgggggttctttgagggctttcttgcgaaagttggagcgcaaagctcttcctttggagaaggtcatttccatcgctttggatatcgcccgcggcctggaatatattcacctccagggaatcgtacaccgtgacgtcaaacccgagaacatcttatttgatggagaattctgtgctaaagttgtcgattttggagtggcgtgtgaagaaacatactgcaatttgttaggggatgatccaggtacttatagatggatggcaccagagatgtacaagcacaagccctatggccggaaagttgatgtgtatagctttgggcttctcttgtgggaattggtcaccggttcactcccttatgaagatatgactccgcttcaggcagctttcgccgttgttaataagaacttgaggccggtcattccattgagctgcccagcagcgctgaagcttctgattgagcagtgttggtcctggcaaccagaaaagaggcccgactttcagcagatagtttctatcctcgaagatctcaagacagttcttgaaacagacggaacactccacaaggtcccaagctcgatctgccaggccttggaatccaatgatcagaacaagaagaaggccggtaactggatccagaggctgtcatacgctcaacctgatttctccgggcctccacccccaaagttactgtagctacgcgtcttcttgttcttggtagcttgtttatctggttggtagcaactgtgtaaattgaacctttcttgtttcttgttgagagaccacagatttcgtcatggtatatactcggacaaagtacatacatcaattcttttttcggctaccttaacaacttctatcttgatgatacatgggagcgatatgatagcaatc

SEQ ID NO: 31246 - DNA, 2388 bp, Zea Mays
cgctggccgactccgcgctgtctgtgactgtgactgtgattgtgagacacttctcttctatctcctccatttcatggcctcccgcctaaccctcatttacccgcccgttctcccgccgctcagcattctagggttttcagtttttcgagctccagtgcgccgcggccgccgcccgtgatgcctgactcaccggagctagtcgtgagggcgctcgggaagcgcctggcgcagccgcgcttaggcaaggacgcccttatcaagctcctcaagcaagctgaaagtgcattatcagagtttagtcaatcatcctctctgcaggatcctcttcatgctctgagcaaatctcttgtccagaccactttactcaaccataaggataaggatgtcaagcttcttgtttctgtttgtttaatcgaagttatgcgtgttcttgcacctgatccaccttttagtgatgaaatacttaaggaaatatttaagctatttatcagcatatttgcggaccttgctgaaactagcagtccatttcttactagaaggatgaaaattttggaaaatgttgctgcacttagatgttctatgatcatgctcaacattggctgcgaggacttgattcttgatatggtcaaaattttcttctccacagtgaagcatggtcttcaaaagagtgtgcaccaagctatgctatcaatgatgacacaaatattgaatgagaaagttactcagtctcttgtagatgtgattttacgcaatttagtaaaagatgacaagggagcatcccacaagctagcttttaacatcattgaaaattgtgctgacaaattggagcctatcattcacagttttttgtcctcatgcatttttaacaaggacatgcctgttactgaacttaggagattatatcataaaattattcttgaaatattccagtgtgcaccccagatccttttcgctgtcattccgagcttgacgcatgaacttcttagtgaccaagttgatataaggctggaggcagttcaccttattgggaggcttcttgccctatctaatcttcagtttggtcaagaaaacaagatggtttttatagaatttctaaggagattctctgacaaatctgcagaagttagaattgccgcaattgatgcagccaaagcgtgctatatggatgtgtctagggatgaagcacaacatatactttcatcacttgaagggaggttactagattttgatgagaaagtgaggatccgagctgttcacacagtctgtgatttagccaaatcaaaccttagctcttctgctaaactgatattacatgcagctgagagactacgtgacaaaaaattatttctctacaatgcttcacccaaacatgcttttcaggcatccgttagaaaaaatgtaatgcacaagttgttggagctgtatcgggattactgtgagaaatgctcaaaaggaactgccacagtcaacactcattatgaacaaatcccagctaaacttatagttctttgtttcgataatgatattgaatccttcaggccacagaatatggagcttatatttgctgaagaactctttccattctctctttctccaaaagagagggcgacccattggattgcgttcttttcttatttcaaaccagaacatattaaggctttgaacatcattttttctcagaagagacggttacaactggagatgcaaacatatttatcacttcgagcaaggaaggaggaatcatcagaagaaatgcagaagagaatccgtgcggcattcagaaagatggcaacatcctttccagatatttccaaagctgaagagtgctttgaaaatttgcaccagatgaaagataataacatatttaaggatttggatgaactaataaatgagggaaccagttttgcaaaaggccgcgtgaccagagatatgtttctcaagagaatcgggcagaaacacccaatttacacattttccagagtgctgtctataaaatgtttgcattcaatatttaatcaggagatgatctgtgccatcctcgaatctcttttgtcccgcggaaatgaattaattgattatgttgagtctgcttgtgatctattactggtaattgcaatggtgtttccatcattattccgaggctcagaggagtacttgcttaagttgttcttagaagaaccaattctgataaatgtgaagactctccagatgttggcacatttggcaaaatctacacactgtttgtctactaattttagcaatgttgtgtacccattattggagcaaaagtgcattgaaggtactcgtgctgaatcaaaatacgcaatcactgcaattgctgcactccactcagatgataagaaatttgctaaattatttaaggtaggc

SEQ ID NO: 31247 - DNA, 1773 bp, Zea Mays
gggtgcagaggacggcctgccaagtttgttgtaacctgacgcatctacccgctctccgcggcttctgttgcaagctccggcaagtggcaatcatacattctggtatagggtcctcgccgccgagctgaggaagagaaaagacctatgtggcgtgcgacgtgacgcggacgcgccactcgccgccgtagccgttggcgttgcggtggtggcgtgcaagcaaacaagcgtcgagcagtggccgatgatggattggaatgggcaggcagatgcaggaggacccctaatgatggcctcggcacttggcttgcggtccttggtcttggggtccaagaatcccctataaaatcgtctccccctccgctatgcgtatttctcgaccatttcccgttcccgttgatcgaaaggagagaagggtgaaaaatctcggcacaagtgtcagtcgttcactacctggcagtccgtagtcggtccacttcacctatcactatcagcttgcgaggagaggaacaagggcgtcttctccaatcctcggctgtattgccaatggctttccgcgcaatacttgcctgactcgacgatgcgttgttgccatttcttgatgtttcgtccgcttcgcctcttcgcgcttgtcatggggtattaaaggtctggaggggttgaaggcttccgctaatgcggtgggtatccaccgactgagcagtgggtgggggatatcgagcggttcttgttcctgcaagaaagggggccatggcgcgagcgccaagcatgccggcggcgacggcggtagggatcgtggtcgtgatgctgctggccgccggcttccgcggcgcggaaggtaaatcgtgcacgaacgcgttcccgggattgacctcgcacacggagcgcgcggcggcgcagctgcggccagggccgccggcaacggtgctccagcccatcatccaccaccaccgccacggacgcgagcagcacctcaccccgaccgacgagtccacctggatgtcgctcatgccgcgccgggcgctgcggcgcgaggaggcgttcgactggctaatgctctaccgcgagctccggggcggcggtggctccgcgcggcccggggtcgcggctggggcgttcctctccgaggcgtccctgcacgacgtgcggctggagccgggcagcatgtactggcgagcccagcagaccaacctggagtacctgctcctcctcgacgtcgaccgcctcgtctggagcttccgcaagcaggccggcctgacggcgccgggaactccctacggcgggtgggagggccctggcatccagctccggggacacttcgttgggcattacctgagtgctactgcaaagatgtgggctagcacacacaatgacactcttaatgcaaaaatgtcatctgtcgtcgatgccctctacgattgccagaagaagatgggcacagggtacctgtcggccttcccatcggacttcttcgattgccttgaggccatcaagtctgtctgggctccttactacacaatccacaagattatgcaaggtcttcttgatcagtacacagttgctgggaattccatggctcttgacatggtgataaagatggctaattatttcagtgaccgggtgaagaatgtcatacagaattatagcattgagaggcactgggaatctctcaatgaggagactggtgggatgaatgatgttctctatcagctctacacgataacgcacgatatgaagcatttgacactagctcatctcttcgataagccatgcttt

SEQ ID NO: 31248 - DNA, 3296 bp, Zea Mays
gatctaacgggaacgcgtctcacagcttccacgcgactgcaccgtgccacccgaggctcgcccccgctgagccagcggagcgaatctccatggcctccacatcctcctccaggtacgcgaaacatcgtcggatcggagaggacgatgagttggaggaggttgaggaggaggccgaagaggagcttgagcggttcgatgatttcaccattgcttcgtcatgggaaaagtttatatctgagatagaggctatttgccgtcaatggcttgcagatggcgcaaagatcttaatgcaaaaaggtgcagagggtgttcctccttttgaaaacttatatatgatcaagcgtgaattgaagcatgggaaaagagtctattctatggagtaccatttcatgaaatctgcaaaaggtcaaaactcatattgggacgatgacacacatagcatgcagctctcatttggagttgatgagtttttgataattgctccgctgagtgccagtggtgtgatcctcgatgatccagaatcaactaagcttttgagttctgtagcaattgctctttctaattgtggcagcgtttgtaccagttcacgacccttcacggaaagcctatatagggattcaaaatctgggaactgtatttactcgaagatttgaagctgaccgaattggtagtcaagtgccaataagactcatgcatctggaggggttacatgagctatttctgtcaaaatttgtcctatcctcgtcagattttccagctagggtaaaggttcacttctcaatgaagcttagctacaagaccccagaatatgatcatgataatgaaactttagattctgaagctactgagccattgactgaaaatgaagttgtgaaccaccctagaaaactatgggacgatgattgcccttgggcagagtggtactctgctgaggatcctgttaaaggttttgagttgactgccatctggggagagaggacatttgaagagacccttgagatggctgaagtggaaaatgcctcgtcctttgatgctgatagctggttccttcacccagttgtatctcgatacatggtagatgattctattggaaaatttgttgggtttgcatcccagctacatcttctagtaaatgcatatgaatcatcagtggaggcacaatttctagaagactttgttgcaggtagcagatacttcaggccaggataatgcaaaatctactgctactgtgcctccaccatcagttattgatcgtgttatgaaagatcttttcagtgatgagactggcaactatatggaagcagaaaacaagtatagtcgtgctatgcgaggtgcacctgcagattcactttttggccagttctgtttgcatgcactgtggtttggcaactgcaatatatgcgcaattgctacactatggattgattttgtgcgggaaattcgttggtgctgggaggaatcagaaagattgcctaggatgaaaagcacttcaagcattgatctctcttcttgtcttatccaccaaaagttacaaatgctcacgatatgcattgagaggaagagatcactgaaccgtgagaaaggtactggctacaaagatgagacttcaaatagtacggcagtgaacaagtctaggaaaggatcagctggtgttgtgcctaaaatgatgctcctgaatacgtttcaggaaatgcatgctccatatactcaggttctgtttgcccttttcttcaggtttaatattgtgatccacatgcacccccttatgtttccattagttccttaggatgcacctttgatgaccgaagatatgcatgaagaaaggctccatgcagctgaagcttttggcaatgccattggtctatctggacagctggaaagggatatattatgttccgatatgtctgcttttaaagctgcaaacccagatgctgtctttgaagattttattcggtggcattcacctggtgaatggttgagcgaggacaaaacagatggtaatgcaggctggcctcccaaaggaaagctttctcaccgtatgtcccaacatgggaatgtgtggcgcaaaatctggaatgatgctctgccattgcctgtttctgaacagaagtctttgcttgaccctgttcgggaaggagaaaaggtgcttcattaccttgaaactttaaggccacagcagctccttgaacaaatggtgtgtacagctttcaaatcatcagctgatatcctgaataagaccatgtatggtggcttcaaggaaatgaagacaaaaatggatcgactatatgtcaccatggcgtcaacactgaaatcttttctagggaattctgatgtcaatgatttggttggaggcctgaaacggctttgtcaagtttttgagcacatcgagaagttactgattcttgctgcttccatcaatcggaagcttattgatgctccacgactagctcaagcaatattttacgactactacaacttctaccttccaaaaatgggaactagcctggaaagcatttgctatgagaaggagttcacaactaaggaaaaggtcgggatgtatgagagagatgctgtgtcgaacctgtttcctccccctactgctaatcagtcttggaggaaagttttgagcatgggaaatcttctgaacggccatgaaccgatgcaaagggaaatcatattctcagtccaggagagaataagcaacggtcattattcgagcccaaccccattatgtaccaacaatgagaagatccagacacataggatgtatatatctgggacatctaatgacctttgggttgcattgtctgtaacgtcctgggattgagctgcacgatgtatgagaggagcaattggtgttttaattagcttagaatcccgttggtgcagataaactatcattgtattttttttttgttggatgtaccagaagtccagaaggggccaccaggacatggctagtgacgcactgaggacaagcatccatttttgacatcagatcaaagtattgattatttacgtcttgtagcagtcagaactcagaaatgctaatatattcttggcttcctctagagaaatggttgtagacaagctctatttggctgacgtttttggtctgttaggtggtgggctggtgagttgcaacacacacactggggttgatgtacgtaaacatcttgtatgacttttgcaatgagctaggctttgttcaatactcgagtccatgaaattttcaatatttgatatctgcccgcatttttttagatgggttcatcccatgtattcgcagttcgcac

SEQ ID NO: 31249 - DNA, 3131 bp, Zea Mays
ctctcttcgcctcggtgtccatctccaagcgcctcgcctctcctgtccttgtcttgcccttcgtcgcctcggcgcggccgccatccgtcgctcgggcgggggcctcggcgcgctcgtgttttacgtcacttccttctctatatactacgtttcgatttcgaggcgggtcggcttcttcttcaccggttgatttgttccgctgctttgcgcctccgtgctctcgcagatcccttggggccgtctcgcctccgcgcgacgccggcagcgagctgagtttggtttcgccgggttgctcggtttgcggtttattcttcccgcgattttagtttttgcgtcgatcctgtttcgtcctcgccttctcagcgtgtgggttgcaggattttgggtccgatccggtcttaggcgttcgtcatggcgtcgtgtggcgaggagatggaggcaggtcagtcttctgtcagatccggcggttcattggttatcgagagattagttgaagggtgtaggtttgcttatggttcattcctcgttttggttcattcctcgtttttcgttttgatgtcaccatattggtgtgaagattgccaccggacttttactataaggttgttgatccttcattggagatgctgctggctggatctgcaggggcaacaaagttttggaagtagattgaggcgttgactggactgatgttcatagtatcgggagaagatcgttcggatatatatatttacctaaatcgctcatctgttagttcatactcattttttgtccgctgcaattcttaattgcttaaattggggctggtggttttctccagcaactcgattgaatggatggatgggtcggaggcgagtttgatcctgcttctccttgtgcaatcaggagttcggaactgtttagagttccttgcgtttgttcactaaccatcctctctcctgtcttccttcaaaaattggcattataagcttgattacccttcattggaaattctgcttgctggatctgcaggggcagaagagttttggaactagattgaggcgttaactggactgatgttcatagtatcgggagaagatcgttcggatatatctacctaaatcgctcttctactattggttcatatttaatttctgtccgctgcaatttttagttaattatattggggctgatggttttctccagcaacaagattattatatggatggatggatggatggtgttcaagcgccttgcctgtcctgtcttgccctttgtcccttcgtcgcctcgggcctcggcgtgctcgcattttccattacttcgtttcgattttgagccgggtatcatcttcacctgttgttttgttccgctgctttgcgcctccgtgctcccgcagatccctttgggccgtttcgcctccgcgcgacgctgggagcgagctgagtatggtttggctgggttgttcagtttgcggtgtattcttcctgcaattctagttttcgtgttgattcggtatcgtcctcgacttctcagcgtgtgggttgcaggattgggtccgatcggtgttgtgagagttcgtcatgatggcgtgtggcgaggagatacaggcagtcgtcctgacttcagaagcagaagaaagggtccagcgctggttacggagatattagttgaagggttgaggttttcttatggttcattcattgtttttcgtttgatgtcgtcatattggtgtgaagatcgcaaccggacttactataagcttgtttgcacttcattggaaatgctgctggctggatctgcgggggcaacagagttttggaagttgattgaggtgttgactggaccggtgtatcaggaaaagatcgttgggatatacataccaaaattgcttttgtattggttcgtcttcagtttctgtgcgctgcaattctttgtttcttatattggggccggtggttttctccagcaagattatatggatggatggggttggaggcgtgtttgatctggcttgtgcttgtgcaatcagaagttaggaactgttcagagttccttgtttgttcactaaccatcctctctcctgccgttcttcgaaaattgacactataagcatgattacccttcattggaaatgctgtttgctggatctgcaggggcaacatagttttcgaagtagattgtggcattgactggattgatgccatagaccatagtaccgggagaagattgttaggatacatctacctagtcgtaaatcgctcttctattggtttatggtttatactcattttctgccggctacaattcttaaatgttttaaattggggttggtgggtttctccagcaacttgattatatggatggatgggtgggtgggttggaggcgagttcgaccctgcttctgcttctgcaatcagaagatttgaactgttcagagttacttgtttgtgttcactaactatcctctctgccaatcttctttgaaaattggctttcctcaaaggtttcccttcgttagtaaatctgcagttttaggagacaccactagagttcgtcctcatagatacaaaaggacattgctggttatggagagatgcacacaagctgagatagaatttccaacaattggtgttgtctccagagcccatccttgttccactggccatttggttcgccttggatttgaaggttcattaagtatatccttgagccaaaatagaaaaaaaaaatcatagaagagctctttggtatccagagaaaaccctccgagtagtgtgcaactgtgcattaatgtgaagtttgataacttggactgacatgttgttttcatgctctgcggtagtttgcgctaactactctgactattccagttcccttgttttgtttgagacatcttaatattcttcaatctaaccagagttcacctaaaacttttgctcatatcagccatttattttggatccagttgtctgatttaagttgatggatgtttggttggatttctgcagttggagctaaggtgcgggttgctagttagacatgagttctagacatttcccactatggagtcttccttccagtgataaataattctttgcgctaactttatttgaagctgtccttaacctatatgcctcatatgatggtgc

SEQ ID NO: 31250 - DNA, 3116 bp, Zea Mays
tcagcctctagtgccaccccgaactcccagacaccacggctcgtcacagtcgtcttcctcctcaggcgaggccagatccaacctgccgcggccgaccactgccatggctcccaccgtcccttcggcggcgaagtccgcttctccttcccaaccctccgggaagagcgaggtgacggatctgaagcagcagctgcggcagcttgccgggagccgcgctcccgatgcggacgcccagcgtcgtgatgtattcaagagggtgatctcctgcatgacggccggcatcgacgtgtcggccgcgttcggggagatggtcctctgctccgccacctccgacgtcgtaaccaagaagatgtgctatctctatgtaggcgcccacgcgcgcgcgcacccggacctagccctcctcaccattaacttcctccagcgggactgccaagatcaggaccccaccatccgcggcctcgctctccgcagtctctgctccctccgtgtccccaatcttgtcgagtatctcgtcacgccactcacgaccgggctgaaggaccccagcgcctacgtgcggatgattgctgctgttggtgctgccaagttgtatcacatatctgccaccgcctgcattgatgctgaccttcctgcttcgctcaaggcgctcatgctatccgatccagacgcacaggtagttgccaattgcctgcatgcattgcaagagatctgggccctagaagctgctaaatcagaagcagctgcaagagagattgagacattgcatagcaaaccagtggtattttacctgttaaacaagatcaaggagttcagtgaatgggcgcagtgcattgttcttgagttggcatcaaagttccttccatctgataataatgaaatatttgacattatgaatttgctggaggatagacttcagcatgcaaatggagcagttgttttggcaacaattaaagtttttctccatttgacaatgtctatgactgatgttcatcaacaggtgcacatgttactcccagagaggtttatgaacgtattaaagcacccttgcttactctggtgggtgctggcagtcctgaacagtcatactctgtgctatgccatctacatcttctggtgatgcgtgctccaatgttattttcctcagactataaaagcttctactgccaatttagtgatccttcatacgtgaagaagttgaaacttgagatgttgactgctatagcaaatgaaagcaacacatatgagattgtcaccgaactgtgtgaatacgctgggaatgttgatgtaccgattgcaagggagtctatccgcgcagttggaaaaatagcactgcagcagtatgatgttaatgctattgtggacaggcttctacaatttcttgaaatggataaggattatgtgactgctgaaactctagtcttggtaaaagatcttctcagaaaatatcctcaatggagccatgattgtatagctgttgttggaaatatcagcagcaaaaacatccaggagcccaaaggaaaagcagctctcatatggatgttgggagaatattcacaagacatgcatgatgctccatacatccttgaaaatcttgttgaaaactgggatgaagagcactctcctgaggttcgcttgcatctcctgacagcagtgatgaaatgtttctttaaaagacctccagagacacaaaaggcattaggagctacattatcagctggtctatctgacacccagcaggatgttcatgacagagcacttttctactacaggcttttgcaatacaatcctaatgtagcagaacgtgtagtaaaccctcccaaacaagctgtctctgtatttgcagatacacagagcagtgaaaccaaagatcggatatttgatgagttcaacagtctatcagttgtatatcagaagccatcttacatgtttacagatagggagcatcgtgagccatttgaatactcagaggatcttacaagcttgactgttggggcagaggatccagaaaatgtaatttctgcccaaagatatcaagaaaacgataatgatcttttgctaagtacttcagataaagaggacaatggtacaagagccagcaatggttcttctacctctgcatacaatgctccttctgatttgattagcccttcattgataagctcccaaacaccagctgaaacttcactagtaaatactggtgggccgacacattcctcacaatcaaacttcagtctcgatgaccttcttggcattggcgttactgaagctcctgctccaacaccaccagcactgacccttaactcgaagcctgtgctagatcctggtacgttccagaggaaatggggccagctagcattggcgctgtctcaggaatgctctttgagtccacaaggagcagcttcattgatgaatccccaatcactcatccgtcatatgcaaagcaattacatccaatgtattgcttcaggtggtcagcctccgaactacaagttctttttctatgctcagaaagatggggctactgctttcttccttgttgaatgtattgtcaacacagcatcagcgaaggcacagctcaaaattaaggctgatgatgggactgctgctgaggcattctcgactttgtttcagtcagccttgtccaaatttgggctttcttgatcctgagtattttgtctgagcgattcactggtccacaatttttttccggcgttcacagttttgcccccactctgccgcggtgccgcctaagcttgtccagtacttgatcaatttgttggagaatcagcgtagaaggtgcgattagagggcaatatattattatcactaaattcagcaagagagcaatggagttttgcggagtaaaatcttatttgtattaattgggtgaactgtgcatttgtacatgactacatgtcatctagataaatagctaggttatttaggattgtgctagtgtgatgccttgacttcttctgaagggccttctttttcttgaaggatgtagaaacaacacacacctccccctttcatgtatgctgtacttacctttctttcttgcacaggtgaccaataaagatgtttcttccattttgattcacattaagggcctg

SEQ ID NO: 31251 - DNA, 5099 bp, Zea Mays
gtctgcctctcaaatctcaccgcctgctcttcttcggtcccggctcgggctcctccatatgagcgcgcgctaggttctctctcgtcgtctctcgtggcggctggcgacgactggggaccgccggtaggcgcccaggccttcgtcgcgctggtctttctagggcccttcgccggcgacgatcaccctccgcgaccagagcttgtagaggttatggaaggtatgggtgtgccttcaccaccgacagttgggactccgtcggcctcgccctgccgcattacgtcccccgttgatgataccaatgcgtcgcttggccaagaaccagagtgcgcattgacatatatcagacaggacgatcctgacacattcattatctcgggaaattttcatccaaggcatcaaatcgattgggattcaattgaagtagaagaaaggtggaatgaggaaggaagacaggatgttactagtgaacgaggattgtatattcaactcggtttgcataatgaagatgagagggtatttaagcaaagggaagatgattcaagtgctcattgtgctggaaataatagggaagaatttcacgatgaagcttcaactgccatgccttgttctgattttgtattagatgggacaaggactatctatgatatgaacaatcctgtaatggagcctggtagcttgtacgcatcaatggagcagtttagacttgcaattagacagtacgccataaataaagaatttgagttgggcattgaggctaccaacaagactagattcagagggtactgtaaagggcctgattgtccttggagcattcatgcgaggtctgagatgaaaggatcacccactattcaagttattgtcttaaacgatgagcacacatgtacatcgagcgggagacgcaagacaacgacaccaacaggtgcttgggttgcggcaagggctcttccactacttatgaaaaaaccacatatgggtgctaaggagttacaaagtatgttgcaagatacatttggatgcactattacatatgatacaatttggcatgggaaagagaaagctctgaagcaattgtttgggagttgggaagagagtttccaacttctatggtcttggagagaagcagttatacagaagtcaccggatagtattatcgagttggatgttaaaatggatgagggccggccattttttagcagatttttttgtgcacttggtccttgcattactggtttcaaagagggatgtagaccttatcttagtgttgactcaactgctcttaatggaagatggaatggtcacctgtgttgtgccataggggttgatggacagaattggatgtaccctgttgcttatggattctttgaggcagaaacaacagaaaactggacatggttctttcagcagttgcgcaaggctgtgggagatcttcctctactagcattgtgttcagatgcttgcaaaggtctaaaaaatgccatgaacactgttttccctcaagctgaaaaaagggagtgtttcagacacctaatgcagaactacgtgaagcaatttgttggatccgagtacatgtatcctgcagctagagcatataggagggaggtgttcgaccattacttttccaatgtccaagaaattcccaaggtgtctagttggttatatgagcatcatgatagtttgtggtatcgtagtgggtttaatccagccatcaagtgcgactatgttaccaacaacatagcagaagtgttcaacaattggattaaggattggaaagatctgcctgtctgtgacttggctgacaagataaggaaggaaatcatggagttgtttcataggaggagggaaataggacagaggttgcaaggtcgaatactaccctccgtggtccatatcctccatgtaaggactagaggtttaggtcacttaacagttaagaaagctgacaattacattgcggaggtgagggataataataatgtgcactctaagcacattgtgaatgctcaattgagacaatgttcatgcaacgagtggcagcatacggggaagccatgtcaccatgcccttcgcttaataacaacacaacaatttagagatgttcggatggaagattttgtggatgactactactcagttgataagttcatgaaggcttactcgagggtagtggagccaattggtgacaaatctttctggcctacagtgccatttgcaaaagaggtgtgtgcttctattgggaagcgtggagttggccgtcaaaggaaaaacatgattaaagggtgcctagagggaggaagtggtaagaagccaaacgaaaatgaaaatgtcaaaactaagaagatgattcgtgggaagttcaagtgtccaaactgtggtgaattgggacacaggaaagccagctacaaatgtcctttgaatggaacaaaaaaacggaaaaggagagcaaggaaaaatgttactaaaggttggttcccaaaagatgttgaggcatgatgatggtgcatgcactagccacacaaccacccccatgtgatgattgtgatgccagtattgcgaaaatctctccactttcatctcccagacctatctagaggctagtgctggaccagtgtaccctaggagctgggtgccaggtgcggtggcgggcggggcctagcaaagcatgacgctgtaggagggatccagtcatccgatacgtcagcactccggcacagcagtaggcatctcggaagctggcagggccacagggcaccacgcccaaggcttagccgcgcaggcactgagcagccaagtagtcaggcagtcagtgagcagcagcagacggcagcaaggctggaagcgcgaagtacctatataggcatataagtttagttcgaccgggagtttacttctctgttatctgtgacttgcccgaccccgacttgatgtgcattgtagattatcagaaattgattaatgatttaatcacagattttaatcaactcaacacgtcgagaagaatatttttgtgctcatagttttttagttcaagcaatgttaatactagtggtacttccctgagttcatatcaatgcttagtcttgggctcctcagaaatgcaaattctttctttggcttgcaattagaaacaagtgttggactgctgataatctggagaagaggggttgcagcacccaagcagctgccctttgtgtgaccaagaaagggaaacgatacaacacatcatcactacctgtgtttttgcccggcaattctggtttcttatctttgacactcgggatgagtcacctcgctcttagggctgatgagcggtcgtttgaggactggtggaggaaggccagcaacagtacaaggataagagaaaagggatcaactgtgtcattattttgggggcttggtgcctctggctgcatagaaatagaacgttttttatgggaatcatccattcagagggtgcagcaacatttcagtgacgagttctcctgttggctcttggtgcgcgccaggagtttgggtcagcttggtctccctagttccatgagtaatatcggatctaatccttttactcctctataacctttttgcttttcttttgtttcttttttctgttttagctatggatgtaagtcatgttttctctctctctaatataaagatgtgcagctctcctgcgcgttctagaaaaaatgaatgtaaaatttgatcttcaattgtttattggcccattataaaattgtacaaagcttctccaaatatgccaattgatccattacaattgtttcataactactgtttatggattttgggactgcagaactgatggattctaacagatgtaacagacctacagtagggatgctaggccaaggagttaaaatatatccacatgttagaatatttcgtaactgtagtaacttcaacattatatagattaatcatgaacttttagttgtattaaacaaataagctctgtatgttcattgttgtagaactaagtttattgtgaatttgtgaacacatatatttgttcatgaaactgcattggatttggactaacaaagtttgtgtatgtgatatgtttttagtctggatctgcccttggtcaagattcaaatatggcttctgcagggttggctcgggtgggtgagtggtgcgactcgtcctctcatgaggctcgtcaccttgagcaacatgccgatcctgcagcagctgcacctggaggagcagctcctgcgccgcacatcggacaactggtgtgtcatcaacgatggcatggcccctgctaccattctcatgggaaggaagattcaatcatgtattggtctccttgtgccccatgttgagttgctaatttggttttgcgtgatggcaggactgcaggagagtctcggagcttgtcgacatacagccggtcctctgggaccaagtgccgattgtgaggaggttcagtggaggtggcacgtcattgttgattggggaacggtggttgtgactttcatttgcaacaagaatgccgttgccgggctgcagatttatggcaaaaaatttgacagatttggtgaatttcatctgcgtgagaatggcaagaaaccacagatttcttgtgccgcatgaaggagtacataccttcgcggtcagttttcaccgatgaggtcactgcggccctgggagaacacttctcagttcagcccgtggatctacaagcagttctttccggtgatgaaggatccgtgccttctacaaagctgctgtcacaacaggacctagaaagaaattgtttcgtccaaagaatcccttaacaatatagaaagttgaagcgtgaccatgcttgtcgtttttgttgtgaaatatgagcagttttgtcgagctgtgaattcattcaaacattatggtcaacccagtacgtacatacgaatgcccaccaccatctttagtaacaaatggttatgttttggattgtaggtctaccgttccaagcttgggttacacgttatttgcctatgggctctagaccgagtgctaaaactatgagagactggctccaacatactctgtaaatggttatgtactctaaattataaagaaattttttgtcttcttat

SEQ ID NO: 31252 - DNA, 1883 bp, Zea Mays
ctaactagtctacaaacaggcgttcctcagcgcgctcttgcaggccgatagtggcacgggttcgcgattgggcggcagcgtgctgcgacgacgggaggtagtgtgccgccagcacggtgaactgccgctcgttgttgcggtactctattgatccctagatttcacaacgaacatggcggaggcggctgccgattcctccaactcggccgtcgatggcggcggcagtaacgtccaaaacgactatcccaccattgaccccacctcgttcgacgtggtgctctgcggcacgggcctcccggaatctgtcctcgccgccgcctgcgccgccgttgggaagacggtcctccacgttgatcccagcccgttctacggctccctctactcttccatccccctctcctccctcacctccttcctatcccctgaggcctcccctcccacctcgtccgcggcggccgccgcctctgattcgcgcaccgtcgtcgatctccaccgacggagcgtgtactccgatgttgagacttcggggacggtgccagagccggctaggcggttcaccgttgacatggtgggacctcgtgtgctgtactgcgccgatgaggcagtggacctcctcctgcggtcagggggcagccaccatgtggagttcaagagcgtggaggggggcagtctcctctactgggagggctgcctctacccggtgccagactcgaggcaggccatcttcaaggacaccacactcaagctcaaggagaagaacatcctcttcaggttcttcaagcttgtgcaggcacacattgctgcagcatcagcttcatctgatgagacgggacagggggatgcatctaccaagatacccgaggaggacctagatctcccctttgttgagttcctcaagaaacaagggcttcctcccaagatgagagcggttgtgctgtatgcaattgccatggtggattatgatcaagatggtgctgacccttgtgacaaactgactacaacaagggagggaattcagaccattgctttgtactcctcgtccattggaaggtttgctaatgcagaaggcgctttcatttatcctatgtatgggcatgctgagctgcctcaagctttttgtcgctgtgctgcggttaagggtgccctatatgtgttgcggatgccagtggttgcacttcttatggatgaggaaaagaagcatttcttaggtgccagattggcatctggtcaggatattttgtgccagcaattgataattgacgcgtcttataagattcctaccttggatgtcccatttgatggttcagattcttggaaagttgtgaggggggtatgcataattagcaagtccgtgaaacagggatcatcaaatgttctggttattttccctccaaaatcgctagaagaacagcaggttgcagcggttcggcttcttcagttgagcagcaatctcgcagtatgccctcctgggatgtttatatcatatctgtctactccctgtaccgatgtctcagccggaaagcaatccataaaaaaagcaatagacactcttttcagtcctcaggcttcagatggttcagaaggccattttgaaaccaccaatgaaagcactgaggatgtgaagccaacactaatctggagctgtttgtatgttcaggagatcacacagggaacatctggttctttattgtcatgccccatgcctgatgaatacctggactacagaaacgtactgggatcaacaaaaaagttatttgcaagtatctatcctgatgaagagttcttgcctaaaaagtcagctcctgtatatgctgatgatgcctctgattctgcagagtaaaaccatctttctaaagcatatggaaatattagtgtctttgctc

SEQ ID NO: 31253 - DNA, 2209 bp, Zea Mays
gagaaatctcaatccaaagagagccttctccaccgctcttgctcgtccaaccttctccatcgtctcaccttaggtttcgctccccgccgccgccgccatgatgccgcagcagcagcagcccggcatggcccctcctcctccacaggccgcccccggagcgccgccacactggggcggcatcccgccgcctatggcccctcagcatcagtacgcgccaccaccgacccatcaggccccgcccccgccgcagatgtggggccaggcgcccccgcccccgcccccgcctcaggccgcgtacggtcaggcgcccccgccgccccaggccgcgtatggccaggcgctcccaccaccccaggccgcgtacggccaggcgcctcccccgccacaggccgcctactacggggcggtacccgcgcccgcggcggtggccgcggcacctgtcgggcccagcgaggtcaggacgctctggatcggggatctgcagtactggatggacgataactacatctacgggtgcttcgcatccacgggggaggtgcaaaatgtgaagctaattcgtgacaagcatactggacaacttcagggctatggttttattgaattcataagccgcgctgctgctgaaagagttcttcagacttacaacgggacaatgatgccaaatgttgagttgccattccggttgaattgggctagtgctggtgaaaaacgtgatgacacccccgactatacaatatttgttggtgatttggctgctgatgttacagactatgtattacaagagacatttagggcacattacccttctgtgaagggtgcaaaagttgtaacagacaagctgacaatgcgcacaaagggttatggttttgtgaagtttggtgatcctaatgagcaagctcgtgcaatgactgagatgaatggcatgctatgttcttctaggcctatgcgtattgggcctgctgcaaacaagaaagctactgttgttcaggagaaaggagggttctgaaatactcgtaaaactgctgttgtcttgaagcaggataccaacaggctcttcatataggacttgagctgcgatgcgtgtcttgtgtaatgcatgacctctgttagtaccaagtgctcagggagttcagtctgacaatgatcctaacaatacaaccatttttgttggtggtcttgaccccaatgtcactgaagatatgttgaaacaagttttcaccccttatggggacgtagtccatgttaagattcctgttggcaaaagatgtggttttgttcaatatgctaacagatcttcggcagaggaggcattggtaattctgcaaggcaccttggttggagggcagaatgtgaggctttcatggggtcgcagcccttcaaacaaacaagttcagcctcaacaggactccaaccagtgggccggggctaatgctggatattatggctacggtcaaggctatgaggcctatgggtacccccagtctcaggaccctaatatgtataattatggagctggagcttatgctggctatccaaattaccaacaacaaccagtagcacagcaaccgccgcagcaacagtgagaggtccagtgacgctactgtcatttgggtgattgacgtggaaatatttatgagttgtaagatgagcttcggatgcaagctggattaggtatacagacatgattttcgtagtactcagattctgagttgccctcgtatcagagcttgtggtcccaatagcctgcagctgcagctaaaacgatctattttggtagcggaatgttttatctgcttattttgtaccgtgtcttccgctactgcggcggagccttgataacttgctatgttggatttttcccgagtgttatcgcatgaatgttgtcatttgccttggtgccatgttggtgttggcaaacgagcgagcagaacctgcagatcgagcagtacctgagcaccattttaacatggtttaacctttttagctggctcttgttaggattggtacattttcactgagtagggcacctagccgaaccgctcggttttcggtgttggcattttgagaagttcggtcatccgtgtcggctttctgttttgttaggtttgtatcgtagatagtactatacgtagaggtgtttgaaatagtgatgagataagaaatgagataaaagagttgttggatacagtcttacatcgtacatcgaatc

SEQ ID NO: 31254 - DNA, 4239 bp, Zea Mays
gtttagatctgataggtcgtggcggagacgaagaagagaaccgaagaaggttccctcacttcccttgcctcgacgcgcccaaccacgccacgaagccacgcgcccgccggcggctcacctttcccgtcccttcaccttccccttccccttctccgttcggtgaaactgcgggagaccctcgcggcttccccacctcgacctccaaactctaaccacagacgcatcgaaaaccctcggtgcccggccgatggggaggaggaaggagcgccgcctggctgccatggccgcggcgggccgcagggtcaagctggacctcttcctcgatctcccccccggggaggcatcacataatgatggaataggaggtgaaaaccgtgaccaacagactgtggttcccacttcatcttcaggtgggtttcatcaatttccttccaagggatatgtaaagaagacatacctatggattattgaacataaatatggtggaaatttggatttgtgtacaagcttgtattcctccgcaaatctggttctgagatacatgtagggttgctggcctgcaaggaacattgagtaaattctactgagctgccactgtcaaaactgagtgaatgcctatgggcaatttctcatttggcagcatctaagcatggggatttctggatgtgattgttccctcctcgataaaaaggagaatcctctagcattgcttgggcaatatagtgatgatgaagaggaaaatgaggaaacaacagatcaacccactgatgaagctaagaggagtcctggagatgctagtgctaagttatctagtccgtgtgtggatacagctggtaataatggcgtggcaagaactgaaccatcggtttctgtcggtgatcaacaagaagcacctcaagctggtgatattaagaactatacccaaagtgttacagaaaacactattgctcccgagccaattctacaagacgagaatgtgaaatcaactgaatctgttcctgattcatctggcatgcaaattgttggtgaagtcggtggaaattggagagcaataatgcatgaacagagtaatcaatgttattactggaacactgttactggagaaacgtcttgggacataccaaatggattagcttcaggagctgcgactgcatctgttccttctgatgtgggctattcaatagaagctcaagcccatgttcttcctcacagcacacttgaagcgtacccaagtgacatgtctgtcgggaatggcacatcaacttttgctaattttggaatggcatgtggaagtgcacaggttactcaagatgcttacgcttatgctgctcctatcgccagtcatgagcctatggacattgatcccttgtatcttgcaaaatatggtgatgatttgctgcaaagattgaacctgttggaaaggctctgtggcttgaatgaaggtcttgaattgataaggagagaaatcgggatacggatatcagactgcaatgcactttcatcgtatgggtcttctttgctcccgttgtggatgcatgctgaggtgcaccttaagcaactagactcttccatttctaggatggaaatgagctaccatgcagatacagaacataggaattctaagacagaggttgttgaacacaatgcacctgatggagctgacctgacaacaccctccaatggtgaggctttgaaatctgaggttagtcctgggattactatcgatgaaaatgtggagattgataagccaacttcgatattatctgctcaggattcacaaggtagggatattgcagcagttcctccaaaagttgaatctgacaatgaccaagatatggatgtggaaatggaagttgatgaagataacgtcgaagagcaggcacattgcagttctgtacctaaaaaggagcatcctccatcagaacagttgagttcaactaatttgccatcatttgaagatcctacacctgaggataattctgtccctccgcctccaccagaagaggaatggattccacctccaccacctgaaaatgaaccagctcctccagaccctccaaaagagccagctgcatcatatgttcaggtggatgccattcctcagccatatatcgctcaagaaaatgttgggtatacaatttcaggaatggagtactatggtattgtaggtacagaaggtacaaatgccaattactatatgcaagtgagtgagcctcatgtccttcaagcacaacagcattcttattatgcaccagtatctgggagtggcgtatctgtttctgttgatggcacatctattgccccagaatcttattatacccatccttcagtcactatggctgccagcgcagtagcagctgaacattctgtatactatgcttcatcaatctctgccatttctagcagcgcagcagatatcaaaacaagctcagcttctcttgtttctgcaaatagcaattcagatctcaaaggtcctgataaacttatatccaatgatgcgagtattgtacctttgacccaagctgtagtagcaacatcaggcgcaggaacgccatctgtcctgggaagttctacacagccttctagcagtactaaaaatctgaccaaagttactcgtaacaagaagcgggctgttggtattacctcgtctctgaggtctaataagaaagtttcaagtttggtggataagtggaaagctgcaaaagaggaacttcgcaacgaagaggaagaggagcctgaaagtgctctggaggcattagaaaggaagcggcaaaaggaaatagaggaatggcggaaacaacagatagctagtggagaagctcaggaaaatgccaattttattcctgttcgtggtgattggcgtgaccgtgtcaaacgcaaaagggctcaagcaaaaaatgagtcaaaagatgacattgttgctgcatctttaggtagttccgaacagcataaaggacctcctgatctagcagagctctccaaggatcttcctactggttggcaggtaagtattctagattgtagcatatcggatgctaacatactgagctgtgcttaaagttacatacatagaatcagaggtagcttcctcttcagcatccaagaattcgatatctattgcaactgatacaaagaagtgaaccacgaaacattggtcattagtgtatcctctattcctgtagagtgtactgtaaaaaccttgtttatctgccatgccattgttacaaagtccttagcactgcgtacttgcattattctatttgtgcaggcatacttggatgagtatactaagcaagtctattatgggaacaacctcacgtcagagacgtcctgggagcggccaacaaaatgaaaatctacagccttgtgcggtcacgaacagtaggataagggcatgtttgtttggaattctaatgtgttcggattatataatccaatatattttgaactacttaggctctgtttatttcccttctagattatataagctgaattatggtgaaaggttaagagggtaaaataacacattgggatcataaataaactaaaataagctactcaatactagcttatttcagcttatttatggtcctacagtgatattttatcctcctaccctttttattataatccaacttatataatcgagtaaacaaacgtacacttagttcaaaaatattgaattatataatctggccagattataatctcaaacaagcatgtcttaatttaaccatgtagatggtgctgtacaatgggcagatcaattttgttgtagatatctcctggagttttaaaagaacgaacagaagtgccaaggatgtttagagaatgaaaacggaaagtgaagttcttataatgaattaatgatgctcagtttctagttttctatcttcgtgctacgagaagctccaacatgatctattttgatgattggagagcacatagtcactcaaatttctttcatagttttcatttctagggctcttattattcgtttgtaagaaataattggtgatgtagtttgtaaggaataaggtgatgttcttcctcaagctttcatttttagagctcttgataatgataaggaccttgtacgtgttttatttgacctaacaagccattttacataggttggtgtactatcttcatttttttaaagattggtagcgtgattcctcaataaggtaatgtagtttgtacggctatatgcagtagattgtgtaaaatacaataggg

SEQ ID NO: 31255 - DNA, 220 bp, Zea Mays
gagatttgttcaccatcatatgagtttctctatcttatgcagagcacaaaacatgcaaaaatcgactaagggaacccttaaagttacctggccacggtgagacgagcactcaggtggaccaagtcaccacactggtgatagtgtgccaggcactggagcaactcgatcttgggacagggaagagggttacaccagctgtagcatcaggaatccacactca

SEQ ID NO: 31256 - DNA, 2616 bp, Zea Mays
acgggcggacaggcaggcaccgcgcgcgcttgtccgcgcggcgggagcgagcgcgccggctggccttgcaagccattcgagaaccaatcatgatgggcggccgaggtggcggggaggaggagggggtggcggacggcggccggcatgggcggaggacgaacgtcggcggcggcggaggggaggacagcagggacgaggggtggcggcggtggtcggtgctggtggcgacggtgtggatccaggcgctgacggggaccaacttcgacttctcggcctactcgtcggcgctcaagtcgtcgctgggtgtctcgcaggaggcgctcaactgcctggccacggcgtcggacctgggcaaggcgctggggtggtcgtcgggcctggcgctgctccacatgccgctccatgccgttctcatggtctccgccgcgatggggctcgccgcctacgccgtgcagtactactgcctggcgttcgccggcggccctgctgcgggagcgggagcgtcgtcgtccgtggccgtcccctaccctctggtgttcttggtctgcttgatagcagggtgcagcatctgctggttcaacacggtctgcttcgttctctgcatccgcagcttctctgcgagcaaccgctccctagccctctccctctcaataagcttcaacggactcagcgctgccttctacactctctttgcgaatgccctctcccctttctccccagctgtctacctcctcctcaatgcaatcctccctcttggtgtctctgttcttgcactcccagcgatcctcctctgccaccaaaatgacggccatgtccaaagtgcgcccaggcatgacgggcgtgtcttcctcggtctctacatcctcgcattcatcaccggcatatatctggtggtctttggatctttcaccgcgaccagctctactgcatgggtcatcctcacaggtgccatggtcctcctcgcccttcctttcatcatccctgcctgctccagttgctcatatgtggatacagatggccctgaccctgcatcgccactaaaccatgatgacccacataagccactcctaataagtaacaatcatcagatggagtccaatgccatgatgcaaaatccaaaggagaaccagatgcagggcaattgttgtggaacagtgatgggcaagggccgcctggcgacactcggtgaagaacacagtgcaaaaaagctcattcggtgtgtggacttttggctctactacacagcctacttctgtggagccactgttggcctggtatacagcaacaacttggggcagattgcgcagtcattgaaccagcagtcacagctcaccatgctccttgctgtctactcatcctgctccttcttcggtcgtcttctctctgcactacctgaccttcacaggaagatgtcacttgctcgcacagggtggcttgctgctgcattggtccccatgccaatggcctttttccttatgtggaagcaacaagatggaagcaccctggtagcaggaacagcactaattggtctaagctcagggttcatctttgctgcagcagtgtcagtgacctccgagctctttggacccaatagtgttggggtgaatcacaacattcttattaccaatatcccgcttggctcactcctctatgggcagattgctgccatggtatacgatgcaaatggccaaaagatgacagtagtggataaccgcactggcattgttgacaccatgactgtgtgcatgggggtgaagtgctactcaaccactttcttcgtgtgggcttgcatcacatttctggggttagcatcaagcatagttctattcatacgaacaaagtcagcttatgacactgctgctagtcggtcaagttgtaagcaccttcaccaagtttccagttagtagttaacagagaaatttactgttgaaatcacggttagcttgtacaaaattttggttagttctagctgaaatgggtcacatacaatacgtgaaatgaagagcttgtacaaaaaggatcacattcatattatttcatctgagggttacaactgaggatgtgaatgcaaatacttgacagaacaaatccttgaatgataccatagagcagtaattaacagctttatagctgaaacgttaaagtacagaacgaacaagtttgcccaggacagcatgaaatcagtttagactgttgttgccagttgaattgtacgccaaatgatccacactgttttttatgtaacacttataatgacttacagtatgcaggacttcagtattgaatctagctagctagcatttcagctttctgcctaaaatgaaatgtaataacttctccttcagtctgtgccatggagatactgatacttcaaataggggtgctgtaagttattcaagcaccacaaaatgacacaggcagtttctaaattttacaagaatgcctggggcgtactactcaggtgagccataactgaaaaagcttaactgaggaatccacagagcattcaactattgtaaggagaagcatacaactttcacccattcctatacccagaatttgctgtttaatgttaatatatcataaaaaacaagcgaaactagtctgatagtgtac

SEQ ID NO: 31257 - DNA, 3157 bp, Zea Mays
gtcaaattggtgctggccattgcgctattgtcagcgactcggcgacctagggcccacctgtcggtgaccgagtacgtgctcggtgccgcattcatgactgcgacgggaaagccagtgccgtgcgcgagcgatccgagcaagagcaaccgagcgggacggtgggagactgggaggtgctccatctcgcgcgccttccatcacaaggatctccacgcgtcgaccatccgaggtgctcgaggatcggggtccacgtgaacccaccggcaccttctgcagtttctgcttcctagccctaggtcgaagtcttctttgatcaatcgagtcaatcagagaagttgcattttgttgtcgtctcatcaggcaggcgatctgatcggcgacatgtctgaatgtcgtatcggactttatcgatcatctccacagtgccatgccttcctcttctctagtgcctgagccctgaagtgaccaatattgtcggtggtttaaccatgggaggaggaaacgaattcttggtggggatgaccggctctgctcctgattctgcccgccagaagcggtgtcacgacactgccaacggtgaggtgcgggacggcgacactgtggtaaagaacgggaagacgtccgatgctgcctccgtagagaagagggagaaaaaggaacatctgtttaaatgcagtgcctaccatgggaaggatacggacatgtggagtggcgaccagaggataaacaagagcagggtgcctgccgcattatgtgagcagggaagggaaatggatgatgacctgaacaaaaccaacagcaaggagaggatgatgggtgttgaactggacaaggaaaagacgattacatcggatgactgcagtaaggttgagggtaagaaaaagttcaacaccgcatcccctgaggaggagaggaagaagaaacctcacaatgccagcactgggaagaatatgcaaagggatgatgacaaggaggtggtaaggattatgagtaactctgatactaaggtgaagatcaagaaggtgtccaccccattacctaagaaggagaagaataaggaaaagctaaacaaaacctaccgagagaagaagatgcaggctgctgacagcaagatgcggagttgttacagtggagtgaagaaggggaaggtgataccacgaattgttgcacccagactggagtatttgactaatcaacttgtgtatcttaaagattcaaagggaaaatgtttaaaggtcctggtatcgaaggtggttgattcccttgcttttgatcagggatgggatgtttttgtctcaaaccatttgattaaatggggtgaatttctgttgtttgagtatattgctgagcgtacattttctgtgcgggtttttggtacggattcttgtgaaagactcgacttcaatcctgagagcacaaataaaggtgaaactaagaaacaggcatggagtaatatgccacctgatgatttggtcgtcacagatggtatttcagaaaacagtggctactatgtttctggcgaatgtcctaggaccaaagtgcctcaaacatgtcatgtaacttgcaatacaaaaaaagaccctaaacgagttgaacgtgtggttggatctggaccagtggcacaagatatcagtggtaatttgattggtccacagtgcaaaacaaagggtactccactgtgcagcaaaggaaaaacagtaattatgattatagattctgaagattctgaaccttccgcgcatgaaaaagaggatacaatgaagctagccacatcaggaccagattcagatataagtcttgtggctgttaataccaatgaggaccctataagagctcaaagtggcattgggaatggaccctcagctgtactagctgacgagaaggggaatttccctgaaattgagtgtggaaccaagtgcatttcagcaacatgcagtgaagtaaaaacagtatctcaaattataagtgctacagctctcttagatttacatgattcagatgaaaatttaggcagaaaacaaagaacaaatgccattcctttagattctaggacaaccgcggaagattatcataattatagcaagatgatcattatccaaaactttaatagaaaatatgaagctcctggaggtttccgatgcttggagaagtggaggaaggatgttgtgaacaatcaaacagctcttgattgcactgcaccgattaaacatgaaaacccacaaaaaactgacggcatgttggttgatggttacggtttgattgaactgaacccagtagatgagtacatttgttccgagggaaatcatgaatgtgtccaaccagtattcacaatgcccatcaaagaaccatcaagtgctgacagagtaatcgattgcggacgtgatgggacagagatcaactatagcatcaatgagaaagatggagggtccattgagaaaacctcaagtcctgacgaaatatctaaatgcaagaatagcatgatggagactgcacataatgtcaatggaaaaggaactactgctcaatttgaaaccaaaatggatcaagcggagccagcgaggagcggtgtacgcagcaaaatttgcaacagtgttgtacctgccaacgagtcagaacaccgttccaccaaacaggaaggcagaatgtctagtaaccgtgaggtcccagagtctttgttgcctacaaaggacgaaattccggagccggatcatcattctccaccagagatcaacttccaactgtgcattcctgatactactcagaaatggcttgacctatccaagtcgctttccaatgcagttagacgacagagaaggcatgactatgatgtcataatgctgaaggaccccaagaagagactatggcctgtcgtttaccacgacagcctgttatttgtgggattcaccgcgggctggaaacatttcgtggcatcaaacgaccttcgggctggggatgtttgcgaacttgttaaggagccagacgatggtgagccggtgtactctgtccggatgtctgatcacaaaatttaaagccgccccggctttatctgtgcgcttctcttctgttagacctccaagaagcatggtgcagccgacttgcggaccttgtgaaaagcatgtgggtctgcccccccttttttttgctggaagtcatggag

SEQ ID NO: 31258 - DNA, 559 bp, Zea Mays
accaggccatctccccagcgctggacactgccactgcccgtccttcacttgacaccacccatcttggagctcgccttccctgctccccctagcctccctccacgcgcacgccaccgttgctcacctcccagtagctccgctgcatctgcctgctcgaccccgtcaagccgacgaacgcctctgtaagctccctgttcgccgcttcagtgaaccatcaccgcctcgccgtggagctcgccggccaccgcggcatcctcagctcatgcacgccgccagcagctaggcctctacctgttccatggagctcgcccaggtacgctagctgagaatcgtacggagaaaaggacaatgaccaaagctgagtcgaccacaagatgtcactacgcgtaagcttccccacaagacgatgtcgtcagtcagaccaacctgaagatggataatctgaacgagtgctaagacaaaggatggtcgccaagtggatatcatataactaacactaacctagtgtttattctaggcaagccccggtgcatgcaaccccttccttatgtttttaaat

SEQ ID NO: 31259 - DNA, 3796 bp, Zea Mays
gctgagtccgctgacctgacgagtagacaaactccaagcaagcagcgcgagcgcgagggatggccgcccgccgccaccgccagattggttcagtggcggacccccgacggatccctcctgttccccactcgcagtcgcagacaaggcggcttgctttgcttgcttcgtgcctcttcctcgtcgcctaggccgcctccttcactcttcgttctgctccatccatccccaatccatccaccattccgcccgtctgtctctacttgattcctcttgccggggttccttggcctgcctatccttgctaatcgggcgggccagtccgccgcctgcagatctgaacgctgccctcccctgctccccgagcgcggcgaggatcgccgctccacggacgcaagaacaagtgcccttgatcttttccccccatttgattgattcatccagtgctgctggtactggtacccagcaacagttttcggtaggaaactactatggcaacttctccaggtacatacagatggtgctagtgagggagaggtccgcgagccgtcgccgccatttcggaccaaccaaggcggcgctagtatgcttctgcttgctttccttctacctggacactactgcaatgccgtcaacgtcattgtaaaccgtcagtgctagccacatggtaacgctagactgcgaaagttgcgatctttttctcgcatctcctcggcaacttgccaatttggtcagcatcgtcatcaccaccaccatcagcggcgcagctgaactgacgatgctttgcccgagatccggatgctcatccagatcgagacgccattcatctccccccccccccccccccccccgccgtgcggatgcggtggctcctcctcttggcgttcgccgccgcccccgccgccggcgagatggggtacgcgcattgcggctgcgacggcagcggcggcgctggcggtggaagcgggttctggagcctggacaacatcttcaagtggcagaaggtgagcgacctgctcatcgcggcggcctacttctccatcccgcttgagatcctctacttcgtcgcggggctccgccacctgctcccgttccggtgggtgctggtccagttcggcgccttcatcgtgctgtgcggcctcacccacctgctggcggccttcacctacgagccccacccgttcatggtcgtgctgctcctcactgccgccaagttcctcacggcgctcgtctccttcctcaccgccatcacgctgctcacgctcatcccgcaactgctgcgcgtcaaggtccgcgagagcctgctgtggatcaaggcccgcgagctggaccgcgaggtggttctcatgaagcggcaggaggaggcgagctggcacgtccgcatgctcacccaggagatccgccgctcgctggaccgccacaccgtgctctacaccacgctcatcgagctctccagggtgctcgcgctcgacaactgcgccgtctggatgccatccgaggacaagtccggaatgtgcctcacacacgagctccggcggggcagcgacgacggcgaggccgtagtgggcgctgacgacgcggacgtcctcgaggtcaagggcgccgacggggtcaagctgctgccgccgggctcggtacttggctccgccagcggcggcggcaaggaggggaccggcacggtggcggcgatccgaatgccgatgctcagggtcgccgacttcaagggtgggacgccccaggtgatcaaggcaagctacgccgtgctggttctggtgccgcccagcggcaggaagtgggcgccgcacgagctggagatcgtggaggtggtcgccgaccaggtggccgtggcgctctcgcacgcctcgctgctggaggagtcgcaggcgatgcgtgacaggctggccgagcagaaccgcgagctgctgcaggcgaggcgggacgctctcatggcgaacgaggccagggacgcgttccagcgcgtcatgagccagggaatgcggaggcccatccactccgtccagggactggtgtccgtggtgcaggaggaggagggactggcgtccgagcagaggctcgtcgtcgacgctgtggcgcggaccgcaaccgtcgtctcgacgctcatcaacgacgtcatggagatgtccgcggccaccagccaggagcgcttcccgctggagacgcggccgttccgcctgcgctccatggtgagggacgccgcctgcgtggccaggtgtctctgtgacctgagcgggcggtttggtttcgcggtgcacgtggagaacgtgctgccggaccttgtcatcggcgatgagcggaggatcttccacgtcctgctgcacatggtaggcaatctgatcggtcgggtcgacgagggggacgtcacgttccgggtgcgcgccgatgatgaggcgacggaggaccagaggtgggatccgtggaggccgagctactccggtgggcactcgtcggtcaggtttgtggtcggggtgaagaggcagcagaacgcaggcgactcgcttccgcggttcttgcggcggccaaggacccatgacgggttggatctcaggctcagcttcagcatgtgcaggaagcttgtgcagacgatgcaagggaacatctgggcagttctcgacggccaaggactcccggagagcatgaccctggtcctgaggttccagctccaaccatcgctggcgagctccaacctcctcggagggtcgtttgatcaggagcactactcatcattgccatctaaccaaatagccgggctgaaggttctgctcatcgatgacgacgagatcaacctggtggtggcccggaagctcctggagaggctaggctgcaccgtttcctcaggctcgggactcatggactcttcctctgcctgtgcctcgttccagctcgtcatggttaacctcgagatgtcagcgatagatcccctggatgctgcctcgaggatcaggcagcagtacaggagctcgcactggcccctggtgatggccatgacgtcggagcagaacgtgtgggagaagtgcgcgcagtccgggatcaacggcgtcctgaagaagccgcttgttctgctggaagtgaaagaagagctcgagcggatccttcagaacacatgatgcctgccatgacccatgagctactaccatgatgaatacgacccccgtccgtccgtctagcatactacatagcagaggggaggggacatggatctcgagttgagaagtggatgcaagtctcctacgctgctgtagttgagtgactgctgtgaggacggaggtggtgacgacgacggatttggcaggcaagcacgagggccgcgttatccgatccatgcccatgccgctcgcaggggatcttcggccatcgtcgccgcatcagaagcaatgcgcagctccagtggcctcgaccgaacaggacaagaaataggtctagttggatttcttttcgcctttgggtttttgttttaaaagaaagagaacttgattttccttaaactagaattctctgtcttccattatagtgcacccttttttatactcagattcaaaaccaaaatataaaagaattaagtagatctcaacttgtcatacttctcagcatatttgttatctatccacacttgttaaatctcattagtttcttaattatattattatcattgtgccaaacagtgccgggccggcataatgcaagttaatctcgtttattaacaatgactacggcttttatatatatctctacaactattaagagcgaactgtagattgcccccgctcgagcagcccgcacg

SEQ ID NO: 31260 - DNA, 2408 bp, Zea Mays
cacgttggctggccctactaaacggagaagccccaccacaaacgctactcgccgccgcggcgcgcagacgactgcgactccgcgatggacgaggaggaaagggaggaggtgggagagtacaagctgcaagggttggttgggaggggctcgttcgccgaggtgcaccgtgccgcgcaccgccgcactggcgcgcccgcggcggtcaaggcgatcgaccgccgcctcgtcgacaagcgcgtccacgacggcatcctgcaggagagggagatactcaggagcatcgaccaccccaacatcctccgcctcctcgacaccatcgacaccacgaacatgatgtacctggtgctggagtactgcgacggaggcgacctggacgcgtttctccacaagcacggccggctgccggaggccgtagccaaggacttgatgcggcagctcgcggaagggctgaaggtgctgagggggaggaacatcgtgcaccgggacctcaaaccacaggcattattttaatcacttcattcaattttcgtggttggtaggagattctaatgtccatgggcggatcttacgccgattgccctgggatggatgattgtcggtttgtgtacagaggatttgaccgtgtggagttaaaagacgtttactatagctgtttgtgcacgttttgcaaatagctactgaaatttaattaaacgtgctgttctcaattaattccagttccatttaatgtgaaagaccacagacatttactgaaagtacatgattacacattgtacttttccacatgttcatttgttttggctaaactatgtctggttattgtcttatgtttctgagacacttgcttcaatactgatgaaacttgcagaaccttctcctatcaaccaacggggatgacatcgtattgaaaattggtgactttgggtttgccaggtcgctggtgcatgaaaatttagctgctacaatatgtgggtcgccatattatatggcaccagaaatttggcaagggaaggactatgatgcaaagtcggacttgtggagtgttggtatcattctttttcagctagtcacagggaagttgccattcaccgggagtaatgcttttcagagaagagaataagttttgaagaaatcttcaatcacaagtttttggcaacaacaaggaaatgctatgaatcctgtcatgctgtagaattaagagataactgccagacaatcacctctcctgttgtcctaaaaacaaagtctggaagtattgaatcaaaaaatccgaaagtttttgattcatgggagtggattgaacgagaatatgtgcttgttccggaaaactgtacttctatggaaatgtcttcactcaacatcaagtccacaaaggatgatatggatacaagaacggtcagctatggagtcagccactgtggattgtagacgagggaaaccacctgattatattacaagacttcattctctgaatcaatatgttcttgttcttgcggatcttgctcgggaaaagctatctaaaggcctgtacctggaggcgttatcaattgaacttgtattattaactatctggaaagaggcacttgatgcatgtagcttgctcatggatacatcagatggtgaaaaattctctaaatcttgtcaagaacatttccttgctaagagtggccactcacctatgaatgtagtacaaggattggatttcactcggacggcttctattttttcttggcttgaaagtgggtttatgaaggcatatgatcgtgcagagaagatatcacatgtattacggaaaagtgatgataacaccgagatgccagatgcagtggatgttacattccaaactgctttgtaatatgagaagagtagagctgcgaatgaagttttaggaaatcaaagcagatccgcagagctatattcgaagtctatcatcttgctcacgtttttagtacaggaagcatctatgttgccactaaatccaccgctttccctttcgcctttggatcagcaacgcatccgtaggtacatagctaatttgaacagccatctctgcagtgctcaggttccagggcaacggcagagatcagtccaccatgttgctttttgtctaggaggtggtgttcaatgctttggtgtcatgaacctttgtaaaattgtagttgccgaacaccatgatcctgcccccttttttgtatatatatagataataacaccacatgctctatatggtcgccccttaccatatgttcaaatgactctgaactttatatatttgcaagtgccttgtttgcacatgtaaaaagaaacgggtttcgaaccttctcgcgactgcatactctccgatcctttctagtaccaaggtttgaagctctgaagcaatatatgttctgagatacgggtgtttgatt

SEQ ID NO: 31261 - DNA, 4770 bp, Zea Mays
tcgcaaaaccctctcctctcgagaagcagcgcggcggagaccggagagaagcagtcggcagccgggaagcccgtcgcgtgcctttcttcctcaacgtgccatgattaacgaaatatttgagcactggggttcgtatcgcacgccgagatcttcccttttgttttttattctccgatcgtgcccgcattagtggatattagggtgcaccgcgctgcttgtattttgtctctatctcgtcgtttgctagtttttgctaccaatcgggatgctgagctcagtgtagaaagactgagaggttcgatcagcctgttcaccccctagggttcgtagatgaccttagtgcgatgttttgtttcccttgtttgtctcggtttgttgattggggaaaggtttcggttatttattactgagtgaggctggttggttcaggtcaaggctacgacttgtctgctactgttattcagcagtatgtattgctgtttgccactataaattttggtttattggtgtgattcagtctcgtaattccatgaatttagggatgggtgattttagcttatgcagtcattgcagcagtggtgcatggtaaattagaatgctccaagactgacaaggtcgagggagacaattttaggttttcagcttttcatgaactgtaggaggtttcctatcaaatcagataaacggatgctgaatcacaaggtgcttgtgtggccttgacattacaatttctccaatggttctagtcaacaactttggttacattgttctcacgttcttgcattctctcactgtataaatgcaaccgaatgttagcactgccaacggcctattttcctacaatttgtgatgtcaatggtttatcttacttattatggatactaaaaggtgtgctaactatagatggacaaacgggcggcacgacctgacccgacccggcacgagcccaacttaggcacggcacaacaggctcgtttacataatcgggccgggccgggccgcccgacgtgctcgcctccaggcccaagcatgccacgctggattgttaaacgtgtcgtgccggcccgagagcacgcaagcacgttagggtcgtgctgacccgaaaccctaaactcaatcaacatgtcgcatgcctctacggtcacagattacaaaccacaatattacaaattaaattacatgtctagcaccaaaatataacacattacaaaccaatcacaacacataacacattattaaatttgagctggtgcaatggctgcctcgttaaaaacctatttaggtaaaactcacacctcatgagaaaccctagataggaaaagagtacaacccagctcaacaatttcattatttcatcacttagttcatcacagactttacatgtccagaaccacatgacataaacccacattacatgtccacaacatactaattaatgaataaatctctgaaggactcttccagggttttatcttctgttgtgtgttgcattcttgcatctgctgcctcccagtcctttagcaaggaaagcatctccaccattcctgagccaagtcgacgacgccgctcctcaatgaccctacctgcaagactaaatgctgattctgaactcacaatagagacaggaactgaaatgatatctttagctaggattgaaagtactggataagttagtttatggtcatgccaccaatctaggagattgaattcatcatcaaacttctgaacagtgtcactatctagataatcagctagttcagaaccagaaataccatgagtgcttgctgcatgaagcaaaacactagcatatgttcttcttgagagttcaggacccatggaagaactgccactggcaccaaaggcacccagaccagcacccagtgccattgaagaactactaccaatgccatatgcaccaaacaccaaatcccaagcatatttgctcttaccttcaccaggggtagcatttgaagtcctctgcaacctaacagaaccaaatttatcatcatatttattaaataaatcagataaatcagccctcacagaagttagatatccagagtaatcagaatgagtaagctgagacatcagtgcaagcacattgttgaaacctctcattttagctctagggtcaagtataaatgcaaatgcatatagcaaaggaattgtaccccaatattttaagaatttgtctttcattgggacaactatatgtctaagcaagttatcattctcatacatgttcatgtgcttattaatatgaagaatgtggtgcaacattaaaggtgatgtagggttaaagaagcaaagacagagggattagggtttagggtttagcgagttcataccttagctgaatgtcggagcaccagtttcgtcggcgattaccaagaacaacgcagatcaggacagagaagatccagcgacggcagatccagggacacagagacagagcctgatagaagaacagagagactatgagcacaaacacacgatatagatggccaaacagggagaggatgtgtaaagctttaccttaccagatcagatctagagccggaggcagatccacagaccatcagtgatggagaggacagaggagaggcagatccacagatccagtacaccggagttcatagaagaggagggggaagcgctagggaatggggatactgttaccgacgacgtgccgaggacggagcatccaggaagcacggcggccgacggccaacacctcgacgtcgacggaagctgggtgcctctttgcctcgtcgaggccgtgaggggggtggacgggcgacggtcgacggggcgacgcagcgaggctgcgagcgcgagggatccgaggggagagccgaggggcgaccgggcgagggcgagcggaggggacgagacgagggggcgactggcggtcgggtcgtgtgagactgtgagtgtgcggttaggttagggatttagggttcgggccaatcgggcttaccgttttaatcgggccgtgtcgggccggcacgacgtgcctagatcacggcccaagcccggcacgggcatagtgtcgggctggcactagcccgtttaccatcgggccgtgtcgggcttaggcacgatgaaacgtgccaggcctcggaccggcccgactgacccgacccatctggccatctctagtgctaacatttctaggagttgtagtcagatctggagcgacagtgaagtgtgacccatgagagttctagtgccatgtttcacaggttggtttctacttgtaatgaccgctattggtttatcttatttttgtgcagttcctgtttttgacttttcagttgttggtcttttaagatagcattacatgatagaaaggggaatgaggatgtgagagtttttgtgaaggttgatggaaaagagttttggattggaaaactatcagttgacaaataccctcagtgtaaaactagtttggtattcgagaaggagttccggatcgatgggatcgaggaacgggaacgtggtacgttgtatgctactaaaactaggatttaacactactggaactagattgttcccacgtttccggaatggaacgaacgttcccagaacgaggaacgtgaccaagttcccagtcccagttactaaggtttgagttactacacacctcgaaaaccagcaccatctctgcccttggctacaaatgttggcattgcaagagaaagtatcctttcattttactttgttcagtatttttagagaagcctgaacacaactttcttttccctaacaacttctctgtcatttatcataaatatgatagtgtcacaagtaccaaagaaggctattccattattcccaaaagcagatgatgataaaagcaaagaaagtaaatgtgatgtggagaagcctgctgctactgagtcctctaaaccgaaggttagcttggaggaaacaaaggatcctgagaagcatgaagttgatgttggtggcaccgacgatgatgaaagtgacgaagactttgttgattcagaagagggtgaatcagatgatgacgagagtactaagagcaagaataggccaagcagcctcacccttgaagacacctccagggaaaaagtttgcagttagtgatgatgctaagaaaaatatccacgtccatgtcgaagttggtgaagacggctcgctcaatcattgacaactacaagcaatccactggtcatagctgcaagtcgtgcagcaagtaattttctcgcctcgtgcggtcgaagcacagtgctcattgcaagatcaaggtgaagcaagcacagtgctcattgcaaggtgaattataaccagtgctcattgcaaggtgaagctagtgatgatgctaagaaaagtaccagaatttttctcacacatgggcgtcctttttggtcgtggactttctactcgtccgttagtctggaaactcattgcaagctgaagcacagtgctcgaaagtgaagtagcattcatggactatgttagggacgttcgttattaggcaagtgaattgtgggtttgcgtttactgctacaaacgggctctaaggcagcatcaacagaatgctattgcttattgcgggttgttggaaagttgctgttttttctgctcaacagaatgtgtaattgagattttcttgaattagaaagttgttgttttgcagcgtgtattgatatataacccctcatttccttccttaccgtgcattgcttagtgatattgttaaagttctgaacacaaacgcattatatatagcatgcttgttag

SEQ ID NO: 31262 - DNA, 1348 bp, Zea Mays
ctgcttaccttttgttattacgggcatatatgattcatggaatgcttggcttatggtgacagtgttgccagagtacccagaggtttacaacatagtaaacaagctgagggtggagtcagtggttgctgttgaaggcgtgatccggccacgcccggtggatgccatcaatgcagatatgaggactgggactatagaggttgtggcacatcatgttctagtgctgaactcagtaactcggtcactgccgtttccagttacaacttctgatactgtaaaagagaagtttccagaagaaattagattgaggtttagagtgttggacttgcgtcgtccacaaatgcagtcaaacttgcggttgcgccataatgttgttaaactcatacgccgctacttggaggatgaacatgaatttgttgagattgagactcctgttttgtccaagtctacacctgaaggtgctcgggactatcttgtaccatcgagagttcagccaggaacattctacgctctccctcaaagccctcagctgttcaagcaaatgttgatggtttctggttttgaaaaatattatcagattgcaaggtgcttccgagatgaagatctgcgtgcggacaggcaaccagagtttacacaacttgatatggaggttgcttttacatctatggaggatatgttgaagttgaatgaagatttaatgagacatgtttttcaagcggtaggagatatcaagctgccaaacccttttccaaggttaacatatgcagaggcaatggatcgctatgggacagataggcctgatctccggttcgattgggagctgaaagatgttagtgatgtatttttggggagtagcttcaaggtttttgctgatacattggaaagtggaggcgtaataaaggcactgtgtgttcctggtggtgccactgttttttcaaacactgacctgaagaaaggaactgtttacactgaagcttccaaagctggagccaagggcttgcctttcctcaaagttatggagaatggggagcttgaaggaatcggtccactgttatcgagtctgaaacctgaaaagaaagaccagctcatggaacttctggacacaaagacgggtgaccttatcctgtttgcactgggtgaacaatcatcagctaatcagattcttggacggttaagattatttattgctcataagctagaggtgatagacacgtctgcacattcagttctttgggtgacagattttccaatgtttcaatggaacagtgatgagcaaagatacgaggttcaagaaaacacgattaggcgtgcgattaagcgctgagcagagggtcagcgcaccgcttaccta

SEQ ID NO: 31263 - DNA, 181 bp, Zea Mays
gttttccccactgtattcagtgctcaggaggagatgctggcaacatggaggaccttgaggagttccaggactacgacgagttctagttatcttagtggcaaacccccagtcagctatctgtgaaggccttatctgctaagtttcgtattccgcactttgattatgttaaatgactatgtta

SEQ ID NO: 31264 - DNA, 3103 bp, Zea Mays
cccttctctacgcgtctcggtgcctcgccggctcgccgctcgcaatcgccggttcgccgtcgccatttgtccccttcccccccctcgcgaccgcccgcttcgagtgtcccccaaacaaaaaatccctcccgcctgcacggccctcgctggacgcggagcatggcggaggagcagatcgaagaggcgtccatggccgcggcggcggccacgccgttccagctccagttcgacaagcccatcccgttccagataaaaatggcagaatggaatccagagaaggatctgcttgctatggttactgatgactccaaggttctcctccatcgcttcaattggcaaaggctttggacaatctctccagggaagtgcatcacatcaatttgttggagccctgatggtaaaataatagcacttggcacagaagatggtttgattcttttgcatgatgtggagaatgggaagatgctaagaactacaaaatcccacgatgttgccattgtatctttgaattgggcagaagacgatccactgtcaaagtctgacaaggatgagtttttatcctatgaagaccgcaccacacgtttctttcctcctcctcctgtgatgcctaggataggtggactacgttctggagatactggtcttgcggatgagaacgaagaagctattccagaattttctagtgcttcctgtcagcgttttaacattctgtgcagtggtggcaaagatggttgtgtttgcttcagcgtttttggaatatttcctgttggaaagatattcaatgctctatgaaccagtagctttatgcctttgaaatttcagaacataactaaaatcccaatcaatgttggatcctctagaaagagttaccaactccaggatgcttcagtcagcaaggtctctttatcaagaaacctccagaaatttgttattctgtgctttggaaagttggttgataccgacaacctctctgacagctgcgaaaattctggattacattgtctctacctagatacttctatcttcttcaaccgaaaaaatgagctgcatcaggtgtcccaacaagcatcaagtattcaagatatggttgaagttgtccgtgcttctgtatctttaatatccaaacaatggtcaaacgccatgagtttattccatgagaaatttagtgccttgcccaatctgatatctacacatggagtggaatctagttctgaggatgagtttcttagccttttgtttgggacacgaacaagtccagcccttcaccattttttagctagttcacttggtgaagcgggtctcaagaggatagccaaggctgttgacagtgctggaagagatattcgtggcattatcactgagcatcttcagcctgcagtggagattatttcattcagactcgcagaattaagaggcctttcaagatggcgttcacgatttcaaactatcgggttagatggaaaccttattgatggtgtaactgagagtatagggatgctagttgttcaagtggagcgcttttcaagggtggcagccactgttgtttatctgtttcaaaatttctttgcctgggttttaaagtctgttagaatattattaaatgaacctaccgaccaagttccagcagcaaacagtgaacttgtggtgatttttcttaagtttcttcttgataaggatccaatcaaacaactacttgaagcagatgagagaattgagtgtgatatggatactgcaagacatgtagaacagctagtagtttttggaggatttacagacacccaatttttggaaaagagtttggtaaatcaattcaatgaattggaagatagcttgaaggaggctttcttgatgccatttactgctatctcttcgcagatacaatgtcaaggattgcttcctttatatcctgttacatcatcagctaccttgtcatcatcctgctcgccaacatcaatatcattttataaggatgaagattcatcgcatgaggaatcctcctatagcttgactgactatgtatgcttgaagatacctgatggatcattaaataaagtaaattgcatcggtgtgataaagggctctggtaactgttgtactaccctcagcatgatgtcactttcaggttttctgttgcatatacctgacggatatgagtgtgttgacctgtcactttataaggacaaccaggtagttttactactgagtgaaacgtcttgttctgatagccctggaaaatcttggatggtgatgctgcaaatagagaacttttcctttatgccactctcaggaacattccctgcaaatatttacagtttgcaaaaactggtggcactcgatctgcaattggacacagattatgggaaagttcgtagcatacctcacaccgtatctactccatttgcagttagtgcatcgagaggagtagcctgtgtcttttcatcccggaggcatgccttggtttatatccttgatgaggatgaggaagcggagggggatgaaacttccgatatggagtgattattatccgattccttcaccttcggctcagccatttcagcttcaggcttcagcattgtcttatgtcttgttgcaatggaggcagaggcccggagatatcaatatgtacggaaacgtcgtctcattttcacggcaatgcatgcccgggttcagaagctacgtcgcgtggtaacagcctaacaggtcaccacgcacgcgcagccgcttttagagctcatgaaattgtcagtcgtcaccctgatgtgtgtaggccctgcaggttggacttcatcgtggttatttggaaagcgagcaaaattgtacacccatttctgatcgtgttgtgttatacgagtgcttgctagttgtgtaaaaaatctagaggtaacgtcaacgtgcaaaaaaaaagggtctgtcgcaaatcttgacggtcactagagctatcgcatttctaatcgtgtttgtgttatgtggattcattattttattgttcgagctgctaatgtacttggtaaaatacattgttgactgaactcgtgttgcgccttcaactcatgtttcctttcatcaaaccataggcatatctaagaacaagaaaacatgcctc

SEQ ID NO: 31265 - DNA, 786 bp, Zea Mays
cgccaccactgcccgcggggcccgcgtcccaacgcgcccacatcatgcccccagcgggtgacggcgcgccgccgcgcgttcgcctaggccgccggtcacagcctgaccacgctcgcgtaggcccacgcgcgcacagcgcgagtgcagcaaccgccgcacgcctagctgccccgcgcggcactcgcccacgacgttgagaaaaccgacgtccgcgcccacgctctcctatccgagcgtctacacatcctctcctcttcctccttcatttccccaatcgccagcactcgatgcctccataatcgtcgcccagtcctcacatcgccatccttgacacgcgttcggagatcgacgtcgaaaccgccgcaccggagtccatcctcgccgtgttcgcctgcaccagagccgctcgccacctacctcttccatgccctattgagccgcgcgcccgtgccatctccgttgagatccaagatcgcgattcgtttccgagctttgaggaatcgacgatcaagcgttggcgaccaagtgatcaagttcttcgagttctacgagattaaataccctgagcatctgtttttggtgaaggcaaaatgtcctctgacccattatgtcctatctacttataattcattttcccgcgttacttaatggaaacctaaggattgactaactttgtgtttaccttgtccttattaccttttgggttattatggttagcttcatgctattgctttactttaatcaatgaacatgatgtaaatacttatgatacgatgatgttatccc

SEQ ID NO: 31266 - DNA, 2139 bp, Zea Mays
accgcctctcttcttctctcccctctagcacgctagaattctcctcttcctctttctctctcaagcacataatatgcttccggtgcacagatagctacggcggcgagtatgttgcggtggtatctagcatccacgccagcggaatgccgatgacatgctccgcgtgcatctgcgcccctgttccaacttccaagtaccgctgggcctggctagctagcttgggcatatggtccgcgtttcatgaccttcatgagctgttccgcggccatctccgacggcattccgctgcgcttccccatagagggaagcaggaccctctgcggcggccttggaggtgtctgcgcgcgaggggtgctcgctctcggttcccacaggagtaacaggagtaggagggcgaggcacaggcacgcgacggtcttcgcgaggaggaggaggaggcggcggcccagcaagtggcagcggccgtggtggaagaccttcttctcggactggaacgaagacgacgagagtctggacgggtggagggaggaggacgagctgcttcaggagattggcagcgacaaggggctgtcggaggatgaaaagttcaagacgtggacgagaaaggccgaagcgattgttgatctgcgcgaggcccagcaggatgcggtgaacgccgaggagcggtcgtgggaaaattggatcggtggtggcggcggcacgtcggggactggaggcggtggggaggccagcttgttggaccagatcactgatgaccctgcagagattgtgagggataagagcgtttttgaggttttcagaggttccatcgatgaggattatgaggacatgttgttcgaagatcgagtgttcatgtacgcctcaacaaactcggctaaatttctagcattgctgattgtggttccgtgggtcatagattttatagtccatgactatgttatgatgccctttctagagaggtatgtccagaaagtgccacttgcagcggagttacttgatgtaaggcgcacccagaagctgcagatggttaaagccctaaagattgaaaaggcaagataccgtcttgaagtagagattggcaaatctcctccactttctgatgaggaggtctggtatgagctgcgggaaaaagcagttgagggatgattggaggctagagaatcgaaatgctttcgcaaatatatggtctgatacggtttatgggattgttctatttcttcttatgtgcttcaatcagagcaaagtcgcaatgctgaagttcacaggatataagttgctaaataacatttcagacagtgggaaggcctttcttattattttagtatctgacatccttctagggtaccattcagagtcaggttggcatacattggtagaagttattctcgagcattacggttttgaagctgatgaagcggcggtcacattttttgtttgtctggttccagttgctttggatgtgtacataaaattttgggtatacaaataccttccaaggttatcacccagtgtgggcaacgttctggatgaaataaagcgtcattagagattttttgccttagaaattcactatgatctgcagcaattcactcctcgtttgtccctttcagtcttgggatgtccagagctgttagaactgaaacctgtcaacatcttgaaggcttcagaaaatagaggcaaacagagttgcagggtcctgaaaccgagacgtcctatcaatttatgttgataggcctagggtggtattatatagtgatgggtatttttcaccgactccaccggtggagtttactagcagcaacttgaggcaaaaatatctcttgtttacatggttttatctcttgtaaaataagaagttggatgattttgcgcgaaatgagacggaacgtgctgacggtcgtctgttctgatgaccaaccaagcaaatggcaggacagggacaactcccagcaatgtttcccttccctatcactgattatggtgtttgttctactatgtagtgacaagttttttttttgtttgttatttcttttagttgccttcttgtatgattgagactttgcttttgggatctgaactgacgattagctgattgtattgaatttgctttgctatgtgaggactttgctaggatcctag

SEQ ID NO: 31267 - DNA, 1235 bp, Zea Mays
agcagcccctccaaaaaatctcaaacaactcttcagcacgggaaaacccgtacacaccacagcaccgtcgccaatgtccgccgccgcagccgactggcttccgtcagcgtccgtgacggcatccggccgcccggtgctttccgcgggcgaggtggagcggaatctcctcccgctcgtcgacctcgagcccgaggaaaatccgcgccttgctcccctccgcgcctgcctcctcgcgctgacttcccaccgcctcatcttcctccacgagccctcccgctccgcgcgcggcctgccgctcgccaccgtcgtccatgcgtaccctccccaccgcaggcacagccacaaccccctccgctccctcttctccgccccgtcctcatcttcctcgtctcagcatcaccgcatccgcctccagatctccatgccacccgtgcgatcagaggtcatcgccatcgtcgtgacctgcaaggctgacgttgatgtgttcttcgggaggctgctcgaggcgatccgtgcaagggcttgggaggtgacccctgcagctgctccgtcgagtggcacgtcggtggcagagggggccgcgcctacggaggacatcgcgatacggatgccggttgttggggtctcggggatactgcggatggagcaggagtcatgggagaacgccgggcagaacttgcaagatgcgttccaggatctcaatgccctcatgagcaaagctaaggaaatgatgcagttagcagaaaaaatgaggctcaagctattaatgaactcatccactgaatcaaattccaatgatgaagagatgggttctaagcaagacatgcaggatttgctgttgagtgttggcattgtgtctcctgtgacgaaagaaactgctggtgcgttgtatcatcagcagttgtcactacagctggcggactttgtaagaataccacttgagaaagcaggtggtatgatggcactagtcgatgtttattgtctcttcaaccgtgctaggggaacagagttgatctcaccagaggaccttttgcaagcttgttccctgtgggagaaagttgatgtatgttgatttctaatgagcagcccagtcatgctcaggaaatttgatagtggagtgaaggtgatccagaccaaaacacatagtgatgaagagtgaatgtactgcagccacagattctgcagctgtctatgtttgtacttcgtacatttgccgctatcattgtttttagcac

SEQ ID NO: 31268 - DNA, 1938 bp, Zea Mays
cccaaaacgccgctaccccctctcattttcttcctcgtctccacctccttctctcctcctcgatacatccgagcacgccgaacgctgtcggaaggcacaaagcggcgagcggcgccgggcttcccctctctttctcgcccccgatctgcgccgatcggggcgaccgctctctggggacgccgatcgaaggtcgggcggcgatgcttccgatatacggaagcagtttctagttttcttcagttggtcgccacagtttccagcgctttcagccagttgtctaataacttgttgttgttgttgtacttaaggatcaccgtactgtcttcctcagagaccttccaacttggttctagttccagcaaccctgtcatggatcatcagaatttacttcccaacaactctaatgtggatgaacagattttactcccaaatgcattagagcatgaggactgcccacactatttgctcaacggtcatgatgtgggtgtgccaaatggaagcttgattggtcagcaaaatacaagcttgagcttgtgggaaccagctggatctagctcaatgagctgcttagttgatcatgacaactttttccaggcaaaaagggagcatcttgcctcttctctgtctattggaggccccttaaatatagacaggaggagacatgaaggcactagttcattgcctttacacaacctaaacatagacctcaacattaatcaggctgatcaatttggctctgatgatgttgatcttgtacatggtaatggacaatcaagtgcaaatactgtcacagcccacaggggctctttcataactgatcatattatgcatcatggagtttcttcagatgctacaggaagttcatcatggaatgcagaatgttttaatggtgcagcaagccagcacagtcgtcatccagcttttaagagaaagtatcttgatggatgtcaatgtcatgcagagtcttctgctaatggaagctcacacaattgtcaccagaatgatagtactctgctacctcttcggaccacctgtgaaagtttgactatgccaaccacgacaaattttagtgttccacatcctcctgtggaacagctaaaccagagcactaatatttctgcaaattctactttgattgaccactattcttcttatagtggtccacatgcaaacgaattcatgcgaaatacacggatgcgaataaaccctagtgattatgatcaatcactgcccagccttttacctgaagggagtttcaggtgcccagcttatcagcatacacagcagcagtcatcatttaggccagtgcaacctagacaagtgagctcttctggttctcatagtcgacctcacttgcctgttgttactcaattttcgcaaaatcttcaccgtccttcagcaaatattagttttggatcaaggattgggagttcttccagttctggttctacagtactgatacctgcttcacaagatcccagtacaagcttgataggaagtgattttcctgagccccttttgttaggttctttgtttacagctgattcaacaaatttcttatctgcatctggaaacagaagtaaccagcaaaattctggatccagctctagttccatgcttagacctgctgtaaatgttgcagctcaacaagtccctgggttcaacgtatctcagccaagtacaactctaagaggttcagctgatgtgtctaggaggtccttaactgctgctggtgtttctcattttagaagttcaagcatggcattgcagcaccgtgggacttcatccacaccgcatgagattcggagtcaccagccaggatcaagctctcgtgcccatcagcagtcattaagacctggtcattcctcgatagacaggcagagctctggttacttggaccttcagtcttttatgcagtccatagcttcaagggaagga

SEQ ID NO: 31269 - DNA, 1749 bp, Zea Mays
ggaattctcaccgcctccccgtgcggggtgagaggcggtgggtcgtggttgcggtcggcgcgcgaggagggtcgacggcctcgcgccattgggtacgaaaccggccgagactgtgagcggtgggcggccgctgcctggagacagctcaaggttgatccaggttcgagcgcctcgggttgctggaggatttgcgggggggtgcgtgtttatgggcggctagatcggtgattcttcagctgctctcggtgtgatggcagctgactctagcatggggtttcaccaggggatcaccgcctcgctgtacaaccatcacatgctctcgttccagtccaacagcgacgtcggcatcagcggcgacgccaccggtgccatggtcatggccccggggagtgtgggtggcggcagtagcaacgccgggctgttcctctccgcaaacacaggggtcatgggcaacgcgccgggggtcgccccgtcaaggacctcgtcgggggatgcactccttggtaccgggacgcccaagtataagtacgtaactggtcctccttcggattggagtgaccgcgaggtggccatactgaaggaaggacttgtgagatatgctcgtgaaccgagtatcatgaggtacattaagatagcagctatgcttcctaacaggaccatcagggatgttgcgttgcgatgctggtggtctacacagggtaaagagagaaggaagaaacctgatggattctatacaggaaaaaaaatgagagacatgaagccaatccaggacaaaatggttgcatctgtcccaatagctaattttcacatgacacctacaaccaatgtaacccctttttcgatatcaatgcaacatccaaatcaacaaagtcaggttcccaaagaagctcctattgtcgacagtgcaacccagcgtctcctggaggaaaataatcagttgcttaaccagatttctgcaaatattaaaacattcaagacagtggagaacacagatctttttctccgcacgagtaacaacatcaaaacaattttaagcagaatgagcgaaacgcatggtatcatgggtcaaatgcctccattgcctttatccataaatgaagaccatataaattcgcttattcaactgaacagactggttgcatcatatggtacgacaagcatttctcatcatacgaagcaagagccatgaagctagtttaccatacccagggggaaaaacgagacgaccagatggccggacctcctgcaatcctgtaaacgtgctgttgaggaaggcttacatgttgttatactgaccaagcaccagggaaaaatcactgttttccagataatgtttttgcagtgatcaccagagtatcagacactttatcctggactccgcaagtgactgtaaatatcggatgactggaggcattccatgttttgttttactgatcgttcgtgaatgcatttcttcttttcttgttttttattgttatcccagacagggttgcattgctcccaatatgtaactatgtacaatagccactgccctagactgctaggcgtagaacgactccattttctgactatttggacactggaacccaaacatgttgtccaggtgttctgcattcttttttatcttcacttcagaagctttggattagcacttctgatgcagcaatggttagctgtgccccaacatggacaacaacagtttattccttttgtttcgtttcaaattgtaagccattttagcattgtctc

SEQ ID NO: 31270 - DNA, 3271 bp, Zea Mays
tttttttacaagcgtgcccccacaccgccccgctcctccaactccgccgcttttcattttcaccttcccttcctcccttcgcttccccttgagtgcagcaggacccccacctgataagagcggactgctccgctcttgtcctgccacccacgcacgccatggacgcctgggaggccaccaaggtggtgttcgaccgggtgcgggcgctggacccggagaacgcctccaagatgatgggcctgctgctcattcaggacaacagcgacaaggagctgatccgcctcgccttcggcccggagcacctgctccactccttcgtcgccaccgcgcgcgccgagctcgccgccaagcccgcgtccccgccgtcgcccgtgctcggcccgctgcagtccggcgcgccctggggcctcccgagccccggctctggagccggcggcggcggcggcggcgaccaccaccaccactcgcccttcgccgccgctgaccagctcgggtacgacggcggcgccgacgcgttctacgccgacgagtacgactgctggtcccccgcgggcgccgccggcgcccaccgccggagcttctcgctcagcgacgccgaggcggccgcttcgtggaggccctgcatgtactacgcgcgcgggtactgcaagaacggctcctcctgccgcttcctccacggcgtgcccgaagacgacgccgcggagcgggagatggccgtcatgcgcgccaaggccctggccgccgcgccgccgacgcagcagcagcagctcatggcgtccgcgtaccccttctcgccgtcgcccaagggaggcgtgagcctcagcttcctgctccagcagcagcagcagagcgagacccaaagggcggcggcgggcatgctgctcggcggcgaggacatgcacaggttcccggtgcgctccccgcggatggaccgcggcgacctcatcggcagccccgccgcgcggcagatctacctgacgttcccggccgactccaccttcagcgaggaggacgtgtccaactacttcagcatgtttgggccggtgcaggatgtgcgcatcccgtaccagcagaagcgcatgttcgggttcgtcaccttcgtgtacgccgagacggtgaaggccatcctgagcaagggcaacccgcacttcgtgtgcgacgcccgcgtgctcgtcaagccctacaaggagaagggcaaggtccccgacaggttcaggaagctgcagcacacgcaccatggcggagccgagttcgtcggttgtgcgtcgcccaccggattgctggattccagggacccgtacgatctccagcagcctcagatcggatcaaggatgatgtacgggaacatagctaaccagcacgaggcgttcctgaggaggaagctggaggaggagcaggcagccgagctgcagcaagccatagagctggaggggcgccgcttcatggggctgcagctcctcgatctcaagagcaggggccaccaccatctcggttcaggcgcgcccatgcctctgcggcaagccaccgatggcaaaggcagcggcatcaacgggaacggcaacgcgtcccatttggaggatgccatctgcatccaagataagaggatgatgagcagccttgcaatgagtgctcctgctgctgctgatgcggaaggcgagcacgaggagcagcaggaagagggcggtggtggctgtgatggcagcagcagcagcagccccaagcaggcagtcaaccctggggaagaggaggtggtggaatctggtcctgtgacagcgacgcccaacgctgcttgtggattccaagaaagctatggcgtggtggaggtggagctcgtcttgcctgacagccccttcgcgtcccccaccaaggaggaggcctcatacgctgacgctgtcactactgcagccgctcggaacggtagcatcagcagcagccctcgccatgtggcccttttcgcacccgcgtcttccaccaccctcgagctgcccccctacagctcctcctccttctttcaggtgcccaggttttctcgtgggcatgaagccattgggctgtgatgtgaggtgcacagagcaaaaaagggggagggggccctccattcctctaatctgggaggactaatggctatgattggccccatcaaccaggcgtagagaagctttgacaaagaaaaaagaaatacctttggagaggtgtaatcttcttcagagagtgggaggagggaggggacagtgaagacagcaacagaagaagaaacaagtctaggttgtttttttagctcttaggcctatgataagtatatgatagtaagtgtgagtgagtgagtagtaggcataaataatagtagtagtagttaattagtcgtttattagcagctcctatgctcgtttgtggcatggatggatctcactgttgtgatgatacaggtgattaaactaaaccgtagtagaatggtgtaagctctgccagttgtagttgcgaggctgcatacatcagacatggcatccaaaagaaagaaaatactcactcctagatgagtggacaaaaggcagacagacggacgtagcaggagggaaaagtgatgagcactgagcactcacgggtgcgactgcagcccagcgcagacaagagagaagggagagcaatagtagctgcaatgcaagtcgcctggcgtcgagcaaattggtgaaggttttgtgctcccagttcgctgaattttgggccagccaaagccgaatctgcaggtgctgggagtggagtggagtgaggttgatgtggctgctgggaacggagggagggagacctgacgggaaaagggggaacagcacgcgcacctttccgctagtacgtcctgtcttgtatgggatgcccgatgggacggggcggggcgggttgaagcatcgtgcatgcacgtctcttgggtttccctctccctctgcctcgtcatccgcactacttgttcttgtgggcgatggtaccagcagcgttcgttcggccggagttcaaaatttgaagtggaatccaatatttccctctgttcttgacacctgactacgggccacgagcaccacagggaaaggagcaggcctgcagtcacactggaacagaacaggcacaggagatgccatgggcacttgtcatcgatcgtcttggacggtcaaaactgtgtccttgcctttgttatagctaggcactacacatgtgatgtctgtgaaactgtggtcaacagagaacaaacccaacattgcaataacattgcattgcagtcaga

SEQ ID NO: 31271 - DNA, 3395 bp, Zea Mays
tttgaatccgttcttcaacttagaggtttcctccgcaaagatctattcccactagttgaaacctgaaatcatagaggcaagttggacttttgaagcagggttgctttcctgagcatgctggcagatttgcttgttctcccctgcaaaagctcaagtgtattggcgcaacagtagtggatcagctagatattatgcagccacacaagctaatggaccagaaagtgccatttagccttgatgacaagttgttggatgttaagctgccaccatcttcctggagagaggatcaggatccagcaaaccaactcgattcttttcccaagccattggtttcacctctagaaggtagaaggggaagtgtaaatgggacccaatatgaaagtggacttttctctagctcccttccagaattttttgacaagaaaataagattaactccaaagaacagagttgttggtcatctggttggaaaagttaaccatgctgatgatgaaccatttgagttgacaaaggaaatcgaggcccaaataattgggcaacctgctccctgatgacgacgacttattgtcaagtgtttgtggtgatattgggtataataccaatgcgaataatcaggatgagattgatgatgatattttttgtactggaggtggaatggaattggaagcagatggaaatagcaaattgttaaactttaatggtggagccagtcagactaggtcaattgtccaactcaatggtgagcgatcctcgagaatcctttttgtcggaaacattgatagcaacgtcgaggattctgaattgaaattcatgtttgagcaatatggagacatgcagacacttaatgcttcttgcaaacatcatggttttgtgatggtatcttactatgatataagatcggcagaaaatgctatgagggcccttcaaagcaagccactcagatgtaggaaacttgacatacgttactcgagtccaaaggactatcctttggataaagatatcaacctgtccatggtaatagttaatcttgaagcttcgataactaatgatgacctgcaccagatatttggtgtctttggtgaaatcaaggagattcaccctacttcagataatgaccattacaaatcgatagaattttttgatgtcagagcagctgaagctgcacaatatgccttaaacaggagtgaaatttcaggaaataaaaacaaattggagcctagctgtctgggtggtactgaacgtttgatgcagcagatgtctcgtgcattggaacatgaacagtttggtgcatgtaaactcggaagcccaaacagtccttcaacatgctttggttctgtcaatatggcacccatcagatccactagcacagaaagtggaactgttcaggttttatgttctagagttcagacaccgataaaccaattccgagagggaaggaattttctggatcttccctcaactaccataagtagatcctctcctgttggaattacacctgcaggattacaaagcggccaccacgctcttgatgagcacatccattcacttggaaagatgaatgtacagaacaagggacgaatggattgtggatttcaagagagtactgctttccatcctcattctctccctgacttcaatgacagactaagaaatggtatctcctataactgctcaatacctcccatcggtgttaagagcaatgctagagctgctgaagcaatggatgtcaggcacatttacaaaggaggttgtgggcatctcagcaatcaatcttctgctcatactgaagcacttgggttttcaagaactggtagctgccctctctatggtcaccaactagcatggagtaattctaataacctacaccagcagccttcttctcccatgatatggcctagcatgggcccatttaccaataatatgccatctcgccagttgatgcaagtgcatggaatttcaagagcaccattgcgcatgcttgaaaataatatccctatgaatcaccaacatgtgggatctgccccagctgtcaatccatcaatttgggatagacgacatggatatgcaggggagatgatggaaacaccaggattccacccagggagtgctggaagcatgggtttccctggcagcacacatctgcatcagttggagaccaatggtatgtttcctcacaatggagggactttcatggacccagctatgtctcctgtgcacatgagtgctcgctctcctcagcagagggggcatattttccatcgaaggagcaatgtggctcctattccatcctctttcgattctgctggtgaacggatgcggagccgaagaaatgactcgaatgtaaatcaatctgacaacaaaaggctgtttgagcttgacattgagcgtatagtccggggcgaggactcccggactacactgatgataaagaatatcccaaacaagtacacatcaaagatgcttctggcagctattgatgaaagtcaccggggaacttatgattttatctacctgccaattgactttaagaataagtgcaatgttggttatgcattcatcaacatgatcaatcctgacaatattgttccattttataagacatttcatgggaaaaggtgggagaaattcaacagtgagaaagtggcctcacttgcttatgctagaatccaaggaaaatcagctctagttgctcatttccagaactcaagtttgatgaatgaggataaacgctgccgccctatactcttccactctgatggtccgaatgcaggagatcaagaaccattccctgtgggatcaaatgtccgttccaggcctggaaggtccaggattttgagttgggaacaaaaccaccaggacattgtgtctgatcataccaaaggtggaactccgagcagggctggtggcactccaggttacatcgccacggatactgatcatacggctgttgattgacgaacttgcgacaacacccgacattctgacaattgcaatccagttttttttttttttgaaattgcatcctctcctacctcttttttccttttgttatgttgtatctatatctacttccgcgtgatattttggcaccggaggctctagacggctgcagatttggtcgctgacaagtagcgaggagatggatgttgtgccgtcagtttctccttactttggcacagacccctcagcgggattttgttggacagtttgaccccctttcaccaggaaagatatccatatttgggggagtttccctattgctgtttggcagtgctgtcatgaacattttcctaatgctgtggatgtgaaatttcagaatgatcaaatcgaatgacggatgaatgagagccaataatatttttttacgctcaagcaatctttattcttaacaattc

SEQ ID NO: 31272 - DNA, 2206 bp, Zea Mays
gctcctccccggaccgccccactcgtgtggaaggccaaaccggcaagtgaaggcgaacttgcgaaagccagaagtaggacgaaacggaggcgcaccgcaccgcagctagcccacgccaccacctcctccagacctccacctcattctctcccaccaccacctccaccacaaagttcgcgttgcgccgcgcccggccccgcccagccgcgcggctcgtctcgtctcgtccctcttcgaaatcctcccacgcaatcgcctccccgcacccctgcccgtgtgacgcggcctcgcactgccaccgccccccaccccggtcccccggggcgccgatctcgtgtcgcgtcgcccgggcgaggaggaggtgggaggatgggggcgtgcgtgtcgcggcccagcgcgtgcgtgggcaagccccactcgccgcggtccggcgatgccagcggccgctcgggcggcgggggtgggacgcggcggaggcgcagccgccgcgtagggaaggggcggaggacggcgccgtcgcgcgccgcgtcgatggaaaccattcaggaggccgaggtgcccggctcgccgtccgccgccgccgccgccgccgatcaccggacgtacagcaaccccgcgttccaagtgtccgggagcattgaggaggactggtacgattccttggcgatgagcgagtcggatgccgaagacgatttccacagcgtgcaagatgatgctttctcattgaatggcttcgagaatgaagctgcattgagcatgaaagatggcaacggtgggagcttcaatggagctgcgcaatcaggcgagcagcaccataaaaagccaaagtccagcgaactgtcgaaggggagctcggagaatggtgtaaggacgtccattagccatgaagatgcggtgagtgtttctggtgcggataccacgcacggtggaggtaggatactggacaattgcgggcttctgccgaataattgtctgccatgcattgcctctgctgttggggtgaacgagaagaagagaactccctcgagccctactcattcaatgaagatgccttctttgaagctttccttcaagaagaagtcaggggaagctcatccatcttccacactacgtcccattatatccggcttcattatttcagaatgaaacagatggggaagggatgagctttgttttgtactttaggctttctgatggttactcgaaagagcttccacattcattcattgaaagtatcagaaggctggttgatgatcatgtagagaagataaaagcattcccaatggaaacaactataccattccgagagcggctgaagatacttggccgggtggctaatctggaggatcttcctttgagtgcagcggagaggaagctaatgcatgcctataatgagaagcctgtcctttctagaccacagcatgagttttacctgagtgataactacttcgagatcgacattgacatgcacagatttagctacatctcaaggaaaggttttgaaacatttttggacaggctaaaagcatgcgttttagatgttgggctgacaattcagggaaataaagctgaagagctgcccgagcagatcttatgctgtgttaggttaaatgggatagattacaccaaatatcagcctcttttgactcacggtgcctgaaatcaaggcttacaggaatcacctaacctttaatttggatgctgtgaggtaaccataactggaccagactcctggaaatttcagaccagagccgctgtcgactatcacagcttctgccgaaacgccatcgtccgagcttagttcacacaagtaacattaacagagggtcaatcactcagtgaccattggctaatatagttgaatccgtggtgctgtgctagtatagccgtttctttctgcaaacgtggagaaaaaaaggtgggagactgcggtacatgtaaatgtgtaaatcattgctggatagcttcggttgcctccggcggcagattcagggaaaaaattaggagctgaacaaaaacagtacagcgtgattgatcgctttgctcggctgcgatgtggagccaggacacattgatttggtacaagcatatgtgattgactgattggtttggccgtatgcaatgagccagactgacagggaacgatgtgatgtttggttgactggattaataagatgaaaaaaataaaaaaatgttatatagcaag

SEQ ID NO: 31273 - DNA, 2604 bp, Zea Mays
atgggttccgtgcaggtgcagcgtgtcgccactgactccgcgtccgtccgtcccccatacggccacgcctctgggtctcccgcgctgccatggacgggggaagagagcagcaggcgccgccggagtcgcagcccggtaagaacctcatcaagatcccgtcctatcaggaggtcttcggcaccggcgcctccacctcttcctcgaagccgccatcctacaaccctcctgtagccacctccgccgccgccgccgcttcatcctcgtcgtcgtcctcgggatcattctcgcaggctttttctttcctcaagtcctccgagttctactcacctccgccgccgccgcctccccagcccaccaccaccccgaggccgactcaagctagcccctcagcgccgactccccaaagcaagaactccattctcgtcagtcatagagaggaaaccctctgctgaagcacattaggaatgctagatggacgttcgccgatgtcgtgccggactatgtgcttgggcaatcgtcatgtgccttgtacttaagtatcaggtaccatcttctacatccagactacttgtactatcggataagagagctgcagaagaatttcaggctgcgtgtcatcttgtgccatgttgatgttgaagatgtaatcaagcctttgcatgaaattacaagaacagcgctgcttcatgactgcacccttttgtgtggttggagcctggaggaatgtggtcggtacttggagactattaaagtatatgaaaacaagccagctgacagtattcgtgagcacatggataacgactatctatcacgggtatatatacttcctgggaaccctctccagaacaagataatttgatgatctatgtcatcggttgatgaggaaaactggtactccctacgtcccaaaatattagtcgataatgttttcaagtcggactacttgttggtcgctctggctaactgacttgggcgattaatcacgactaatcatgattaattggccgacttgaaaacataacattttagctcttgatttttatgtctatgttcaaatggatgatgatgaatctaaacacatatataaaataaatacattaattattgtatgaatcaactaaaaaggtaaaacaaatttattttggggggagtattaaacattgctatcatgattagcaagaaatatacccctgtggtgcgctctttctttctttctttagaattttctatacgcgcaaattcttgatgtttcgatgataatttcttgacttaccatatatagaaagagagactataaatgacacctcttatgtcaataagacgaaatggatggatattaaatgataggaagtgctattaagggaaacagaatgaaatagagccactttgggcttccctatgaaatgaggtatggaacagagccactatgaagaaattcatgagttgaaatctaggaggtcgaatcctcccttgttcctcatggtacgagacgaaaacctcatgtacagttttgaaacggagtttttttttatttaatagaatgaaccactgtaatgaatgtcggctcaatccaaaggaaattatgcgggagctttgcacaatctatttcaaaccatgtttctaacattggcatcggcgagtggtttcgatacagctctctctgttctgcccttttgggttgatggtagtgattcattttatcaactattgaggtcccagtgccttgattatatttttaatgtatggtttttgggtaaccgcagttgacgcacgggcttacatccattcggcatgttaataaaacggacgttgtcacactcggttcatcttttgggtcgctctcacagatcatgaatggttctatggacgagctggctcgatgcccaggaatcggtgagcggaaggtaaggcggctctatgataccttccatgagccgttcaaacgggttcctgcccgaccacgaccaaacctcgtagtacccgataccccggaccgggagaaagcaaaaggccaaccttcgtctacagatggcagcagtttgcaagatgcggtagagaagccagatgcgtcgaagaagacgaagaaaggctctgatgtaagatcagccctcaccgttgcctttgccaagtattcggagaagatccgcagtcagggccgcgatgcgccaaacgaggccggtgagagtactggcggctcgaccgtggaagctgagagggcgggagactagatttagctgtaggatggttaacggtgctggagtaatgctagtttgttccttcctgttgggtgcttgttgttgtgactcggccgccgatttgcgcgtgcggcaccagtatttcccgcggcgtcctaggcatgtgtttttttaggctaaagaggggccagagaatcttcaacgatatcgaaacatttaagtgagattcctagacggtggcagccattccatcaccatataaatcacacttagaatctctctaaaacataatctgtattgccttctctacctcttaatatatttatatctctaaaacataatctgttgggtgctatatcctttccggcttcagttccaaaattaaaaagggaaaagaaaaagaaagaaa

SEQ ID NO: 31274 - DNA, 2598 bp, Zea Mays
gaagacatggcagaataaaaaaaacaaagcaaaagagctggatataccttaacggggaagtcttgacgaaaacaacattacgtgtatagaaatgagaagataaagaaaagagataagatggccacggtagctattagccaaacaagcactcttctagttcttccgtttctcactttctcttcctgagaatctcccctttatatgaataatataaatgtcacataagtaaataaacaaataaatcaatcaatattactacgaagctgtcctcaccgccttctctctccctccgaatccaaacgcggacgcaaatgttgctccacgccggtccctcgttcctgctcgcaccacctccgcgctttgccgccgctccgtcgtcagcttcgccgaggcgatccaggacaccgcaatcctcgccgccgacgtcgcatttcgcgcgccccgctgatcccgtggcccaaagggtgcgtcccgtcgcgccgaggccccccatggcgacggcggaggagggcgccagctctgacgtcggcgtcgccgtcgccgagtccgcacaggggttcttgttggatgcgagggcttactgggtgacaaaatccttgattgcatggaatatcagtgatcagaaaacttctctcttcttatatgcaagcagaaatgctacaatgtgcatgtcgagtcaggatatgaaaggttatgattccaaagttgagctgcaaccagaaaatgatggacttccatccagtgtgacccagaaattcccttttatcagctcttatagagccttcagaattccgagctccgttgatgttgccaccttggtgaaatgtcaacttgctgttgcttcatttgatgctcatgggaacaggcaagatgttactgggttgcaactacctggagtattggatgacatgttcgcctacactggaccgcttggtactatttttagtgaagaagctgtgagtatgtacctatgggctcctacagcacaggatgtaagtgtgagcttctatgatggtccagctggccctttactggaaacagttcaactcaacgagttaaatggtgtttggagtgttactggtccaaggaactgggagaaccggtattatctatatgaagtcacagtatatcatcaaactacaggaaacattgagaaatgtttagccgctgatccttatgctagagggctttctgcaaatagcacacgaacttggttggttgatattaataatgaaacattaaagccacttgcctgggatggattggcggctgaaaagccaaggcttgattccttctctgacataagcatatatgaattgcacattcgtgatttcagtgcccatgatagcacagtggactgtcctttccgaggaggtttctgtgcatttacatttcaggattctgtaggcatagaacacctaaagaaactatctgatgccggtttgactcatgtccatttgttgccaagctttcaatttggtggtgttgatgacataaagagcaattggaaatgtgttgatgagattgaactgtcaaaactccctccagggtcagatttgcaacaagctgcaattgtggctattcaggaagaggacccttataattgggggtataaccctgtggtttggggcgttccaaaaggaagctatgcaagtaacccagatggtccaagtcgtatcattgagtaccggctgatggtgcaggccttgaatcgcttaggtcttcgagttgtcatggatgttgtatacaatcatctatactcaagtggcccttttgccatcacttccgtgcttgacaagattgtacctggatactacctcagaagggactctaatggtcagactgagaacagcgcggctgtgaacaatacagcaagtgagcatttcatggttgatagattaatcgtggatgaccttctgaattgggcagtaaattacaaagttgacgggttcagatttgatctaatgggacatatcatgaaaaagacaatgattagagcaaaatcggctcttcaaagccttacaattgatgaacatggagtagatggttcaaagatatacttgtatggtgaaggatggaacttcggtgaagttgcggaaaatcaacgtgggataaatggatcccagctaaatatgagtggcactgggattggtagtttcaacgatagaatccgtgatgctataaatggtggcagtccgtttgggaatccactgcaacaaggtttctctactggattgttcttagagccaaatggattttatcagggcaatgaaacagagacaaggctcacgcttgctacatacgctgaccatatacagattggattagctggcaatttgaaggactatgtagttatatctcatactggagaagctagaaaaggatctgaaattcgcaccttcgatggctcaccagttggctatgcttcatcccctatagaaacaataaactacgcctctgctcatgacaatgaaacactatttgatattattagtctaaagactccgatggacctctcaattgacgagcgatgcaggataaatcatttgtccacaagcatgattgcattatcccagattgcttcgtctggataagtaa

SEQ ID NO: 31275 - DNA, 1838 bp, Zea Mays
aacagaaatcttgatatcagttgcgaacactgagattagaagctagtttaaggaccaacaggctccttatcgccatcttcgatccatccagctgaatgtatttggagttattattattctctgaattttcagtattttctagcttatgtgccaattcgatttctgcatcacatgaatttttacgtgcccttttgttggtacagttttctcagactggtttgtgattttgcttcgccgaaactattacaagaaagaactcctagactgctgtcaataatagcttatccgtgttctcttaaaaaagggacttatcggcattacgataaattttgatggctgagtattctttgccttcatctgttgctatctttggactctagtcacatcatatcaactatattttgttgactaattttggattccgaagaaaacaacaattttatcttgaatcagtcaccaccacacgtataagtggatggtgagggcctgctcattattgctcttccttttgcatcctcgaattcatagcttggtgcctggacggtacgaagcgttggtataggtagtaggtggaagcttttgccttctatgttacccctctcccctaaattggaggaacacagaagagtttgcgatcatgaaatcgccagcacggcaacaacagaacagcaggatcgacgcagttgcttcaccggacagggagtgccctggtagaggtaacaacaacaacaacggaggtccacagacctgtccagatgacaagaaaggctcttcatcggggagtgaggggtccatctggccgaagtttgcagtcaccctgtcgaacagggaaaaggaagaggatttcctggtgttcagaggatccaagctgcctcaaagacccaagaaaagagccaaggtcatccagagaactgtcaatttcgtatgcccaggaacgtggctgtgtgacctgactcttgaaagatacgaagtccgagagaagaaggtttccaagaagcgccccaggggattgaaagctatgcacgacttggacagtgactcggaataaaaaacagagagagaagagatcactgaacatgagaagctgaacattagagagaaggccaggacagatgcagcagatggaggtcgaccataaagcttcctgatggaatgaggaccaacgggtcaccactcctcgcgattgatactggagatcgatttgtccaaaaggactaggtttttttaaaagcaaatggcaggagctctgcctatccattaagagagagggagagagagaaatttacaagaagtgagcacaataaaagcacgcccaaacataacgagggatcccaataagaagtcgtccctgctgctacaaaaaaaaaaggacttgtagcgatcggaggacgaccgagatgtcaggaagttgcacggaagaacagagaggagagctgcaggagctggagttcctgaacattagcaaactattcaattccctggaaagcagcaacgctgttttgctattctctcatgttaatatgaatggcgagctagccagtcctgtcgcgtctagtttgccttccgtagtttttttttatcctctggtgctgtatgaaaggtcagtggatattctttcaggggcatgagacagtgtccggcactctcagtccagtgcgagtggatcaggattcaggcaaacatagaccgacgatcggactttatgtgttttcaggactgccagacttgtaaattctgaaagtttcagtgaattttttttatagtttaaattttatataggcctaccctccgtataaaaaaattgagaactttttttacgtgatattggaagatgtttg

SEQ ID NO: 31276 - DNA, 1932 bp, Zea Mays
cggctcctccctctcggattcccaaacgccaaaatctcgttgtcacgcccacgcaccgcatcgttcgcttcctttcgtcaactccacttctcttctccgcgtcacctcctcttcgccgccgccgacgcttcacccggcagccagccatggatgaggagtacgacgtgatcgtactaggcacggggctcaaggagtgcatcctcagcggtctcctctctgtagacggcctcaaggttttgcatatggacagaaatgactactatggaggagattccacctcactcaaccttaatcagctctggaagaggtttagaggggaagacaagcccccagcacatctaggtgcaagcagagactacaatgtggacatggtgccaaagtttatgatggcaaatgggacattggttcgaaccctcattcacaccgacgtgacaaagtacttgtcattcaaagctgttgatgggagctatgttttcagcaaagggaagatttacaaggtccctgccactgatatggaggctctgaagtcccctttgatgggcctattcgagaagcgcagagcaaggaacttcttcatttatgtccaagattacaatgaagctgatccaaggacacatcaaggattggaccttactagggtgacaactagagaacttatagcaaaatatggtttaagtgatgatacagtggatttcgttggacatgcacttgctcttcatagagatgatcgttatctcgatgaaccggcacttgatacagtgaaaaggatgaaactatatgcagactctcttgcacgctttcaaggaggctcaccttatatctatccactatatgggttgggtgagctaccacaggttgaattcgatatggaggggaaagtgtgtggtgtcacatctgaaggtgaaactgcaaagtgcaagaaggtggtgtgtgatccttcgtatttacaaaacaaggtcaggaagattggtagagttgttcgtgcaattgctatcatgagccacccaatccctaatacaaacgagtcacactcggttcaaattattttgcctcagaagcaacttggacgcagatcagacatgtatgttttctgttgctcatacacgcacaatgttgcaccaagagggaagttcattgcatttgtgtctgcagaagcagagactgataatccccagtctgagctaaagcctggaattgatctacttggttctgtagatgagattttctatgatatctatgacagatatgaaccagtgaatgaaccatctcttgataattgctttgtctcgacaagctatgatgccaccacacattttgagacaactgtaacagatgttctgaacatgtatacaatgatcaccggaaagactgtagaccttagtgtggatttgagtgctgctagtgctgccgaagaatactgatttcagtcatagtgtcatgtttatcaaagatcacatcgttggcgacagcacatgacccacattaatgaatggctggaatgcgtttattcggttccagattatatcatgccacatgtactgttctgcgtaatgtctactgggctggcagaactatgcacaatgttgattcaagttgatggatggtggtggttctgttatttactagttagtcgaatggtgcacaacattaaacagtgaccatcatggctgtgtgatgtatcataataactgttcagtaaatttgtgctctgcctgagttctgctcgatgctattgacggcgccctaggtgcttgttccactgtgaatgaaccaagtctgtcacccatcatgttcttcaaagatttttaccaaagatctttttggtctgatgtgtcagaccggctcttgtgatggacgtattgtttgccaaattatgcgattatttttggcagatggagtctggcaactaaattttgtggcacgtgatatggg

SEQ ID NO: 31277 - DNA, 2787 bp, Zea Mays
gccatcgaccaccgtttcctgattgcctccatttctgtgggactcgtcggattcactcaccatcgatccattgttttcgtctcttgcggccttgccccacccataaagccgatgggttagctcccccgcaccgcacgcccaagaacaaagaggagccgacgccacggcgacggtcgtcctctcccggccagcaccgtcgcggactgcgttgcatccgtgcctttgcttctctcttcaccccgcgtctctctctcttggcgacgactgggggaccactgccgccgctcaacgccaggtagtcccttcgccggcgacgagcacccactagttttgtgatcggtgaaaatggctgctgctgaagcaagggctgcttggcaacgtgctgcaaaccgttgtctggttcaggaggacaggaagagagctccaaaactagcttgctgtccatcatcggctgaacaacatggtacaaacaatgggaactgtcgaaattctgtagatcgtcctatctgcagtttaatgcctttgagctgcaatcccatgcattctaatctgccaccagatgtcagatggtgggttcagtcacagccaaattttgggatccagaaggatattgttagcaagcggttatgttcgttgggcagggacattcatgagaagcaagtggaagattcagtgccacaacctaaacatgaggaaacattactctgtcaagcagttgacaccagcactgaaaagattggagatgctttggagcctccatggatggtttcgccagccttcacgaagtattcccttgaaacaggcttagaagagatgaagactgttggtagctattctcaagtgtcgaagtgcatagaaactctcagcaattgtttgtacaaggataatgaattcccagattttgaatgtattgacccagcacctttgaagaacccagataaggctaattttgacatagatgcaccttggaaaggtgaaaagactcgaccatggtggcagattgctgacgaggaccagctggcttcactggttgcagaaagagcaacacagcacattgagaattgtgacctaccaaggcctacccagacagtacgcattaacaggacagaaccatatactcaaaaacatataggtgactttgggggaccttcatctcctgcaggaagagtgtcacaccctgttcctggacattgtgaccatatcgagtgtacctatagcacaggaagtacagatgagttggttctgttatatggtaatggagtttgggaacagcatggaagcagtgatacatataggtgtgcgttcttcagcttagctgcattaccctcacgacattagtgtggttcaacatttttctagcagtagcacaaccggattggaaagcaaacaaacactccggaatggctctgagcgagacatgattttggaggcactccgccattcacaaactcgtgctagagaagctgatatggcggctaagaaggcgtacaatgagaaggacgacgtcatcaagcttttgctccgacaggcctcacatctctttgcgtgcaaccagtggctgaaaataatgcagctggagaatattgtcctgcagctcaagaacaaagagcatcagatagcagccatcatacctgaacttccatggttaaccctaaaagagaagcctacacagggtcaggggcagagagattggactaggaggaaaggtagaaggcagaagaaggcagccgggttcttcgacgcgatcttatttgctgttgggttgggtcttgctggagctgggtttcttcttggctggactcttgggtggcttctgccgaagttttaaagttgttggttatttttattttggggtacccagctaggcatgtattttgctgtgtaggatccagagggaaggccaagtgcactctgtgaaaatggtgtcaaatgatcaaatttgttagaccctagcatctgttcatttggaaacaatgatggcgcaatgagtaaatgaatggctgtccgcattccaccaagagcattttttctaaacattctgtttgttgtaaatatgtgtggtgaactgtattactttgatctgttaggttgtgtgaggtacctagatcaagctttataaaaaatgaggctgaggagaagagtctacgggctcggctatgagcagtaacttaaaagctcttttgtgggttttggtgtttggatgacaactcaattaaaggactaacaagtgtgctaagtgttgaacatgtgcttaatgcaaagctaacagggttcaacacaagtgaacaagtgatggtccaaagactgaattatctatagataatgaacactgcttaagtgagactcggtgtgcgtaacttagagacagccgatcaagccaaggatagaggcaagaagagcttcaaggtactgagtgcacgggagaaggtcaaggagaccaggaacccaaagccaggggtgaagaagaagacttgcaaagtcaaggttgatcgagttaagaagagttatggtgcatcaatgatcactacataaggacatgacttacaaccaatgaggtaacatctacagttatgtggtgtaagtcataaggctcaagatcaagctcgagaagtgaacaagcgagttagatctcagatatgccaatctagatcaagtcaagttgacttaatggtttagagtccaacatcgacctcaaacatgccaaattgggtaaaacgatgaaaaaggttaagtatgtaaggtttgagtgttcaaccatgttgcatacacctcttactacaagtttgg

SEQ ID NO: 31278 - DNA, 2671 bp, Zea Mays
aaaagtaaacttgtttttccttcgaaaaaaaggagatatagatagagagagagagagagagagagagagaaaattataccactcctctctgctgtccaaggcaggggccaggggcgggcggacagcggaggcaagaggcgcgagctcggcccaaggcgctgagggagacagccagccgctgcattgcgctactacattggccaggagggctcgccgccggggggaggctcggatctcgccgtctctggccacccgtacctgctgccgcgtgcttcacttggtgccgctttccgcgcctactggcgggcggcctcgactccagcgcggcgtgatctggcgcgcgccaccgacgccgctcgcgtggggaggcctggatcttggcgcgccgcgagaccccggggaggacggcgacggcgcgctcatcagtcgcccgcagtccgctgagctgctgccgactgcgcccggcggccgggagatctggccgacggcgcggcgctgcagatcccgtcctgcctgcgcgcgtgggcacggctcactgctgctgtggaggctgttacgcgcggtggtggtaccgatgggctacgggtacgtggaacccttcctgcccccacagcagcagcagcagcaggggggctacgggcaactgcaggcgcagctggctccgcggccgccggcttgcccgtactcgtcgtccgcctccgctccgccggtctccgcgtcctaccattcttcgcccccgccaacgtcgcctccgccgctaagcagcccacctccggcgtcccctttaccggagccatcgccgccgtcgtctccgccgccggcattgttgcctcctccgccggacgctccccctccgtcgcttcccccgtcaccgctgccacatccaaccccgtcaccgcctcaagccccgccgcccccgctgccgacggaccagccgcgcgttcagccccgcgtatacccatcaccgccaccgccgtcgcttcctcctcctcctccgccgcctcccaccgtctcgccgccatcgccgggtccatccaactctccatcgccgtcgccgtcgcctgctccagctacacaagctccagctccggctcctgcgcgtgttgctgcctattcgcctcccccgccaaaaatcgcccctcccccgccaccgcactatcgcggcaagtcgcattacacgccgcactcgcccgtgaagtcgcattcgaactcgacccatgcagctagcggcagcggcaacaacatcgagatatcgagggaagcggccaccaccatcgtagcactggccggtctcgctatgctcagctttattggcgccaccatttggttcgtcaagaaaaagcgccggcgcattgagcccccggcgacactgcctacacagcaaccagctcctccgccaccgcccaactacattccatcttcggctggatcctcactagcttcagatgggttctacttgagatcgccagggtatcctttcatgagatgactttgcagaagagaaccttttgggggaaggtggatttgggtgcgtgttcaagggcattttgcaagatggtcgcccagttgccgtcaagaagctcaagattgggaatgggcaaggcgagcgtgagttcaaggctgaggtcgatactatcagcagagtacatcatagacatttggtttctctagtaggctattgcactgcggagggccagcgaatgcttgtttacgattttgttcccaacaacacactttattaccacctccatgtaagtgaagcatcactggattggcagacaagggttaagattgcagctggagcagctcgagggattggttacctccatgaagattgtcatccacgtattattcatagagatattaaatcatccaatattttgttggataacaacttcgaagctcaggtttctgattttggacttgcaaggttagctgccgattccaatacacatgttaccacacgtgtcatggggacatttgggtatttggctccagagtatgcattgtcaggcaagttaacagcaaagtctgatgtatattcttttggggttgttcttttggagcttattacaggaagaaaacctgttgatgcttctcagcctttgggagatgaaagtctggttgaatgggctcgtcctcttctgatgaaggcaatcgagcttcgggagtttggggaccttcctgaccccaggatgggaaacaggttcgatgaaaacgagatgttccatatgataggagctgcggctgcatgcattcggcattctgcagcaatgaggccacggatggggcaggtggttagagcactagatagtttagccgactctaatctgaacaacggcctccaacccggacgcagcgaggtgttcttagagccacagacggaggagattcgactgttccagctgagggagttcggcagccgggactgtagcgacgagctgagccaagcgagctggagaagccgaagagatttgtgaacagattcgtgaagagagttcggttcctggcattcactgacaaatattactgctagtgctagtgtctgtgtgtaaggattagggcagttcacttgtatgcttaactgaccaggcgctgcgttgggcgggcacaagtacaatgattagcggtgctaatttttattcgtggctcaattatacccaacctccgg

SEQ ID NO: 31279 - DNA, 1657 bp, Zea Mays
cacaaattccaccgatccccctcgccccggtcaaatcctctagcctccctgtgcccggcggcgagccccatggatccttccgtcgcccggcggcaggaggcggagcggtttatgaacatcgccgagaagctcctgatggcgcgggacctcgagggctgcaagcagttcgtcgcccaagccctttccttcgacccccgcaccccgggcgccgacgacctcctcgccgccgccgatgccctcctcgcggcccagcgtcggcgcctcccgtccgggcccctcgacccctacgccgtccttggcctcgactccgccgtcccggcctcccgcgaccccgacgtcgtgcattcccattaccgccgcctctccctcttgctcaaccgctcccaccccgaccgtccctgctccctcgccttcgccgaagccgcccgcctcgtcgccgacgcttgggccttcctgtcagatcccctccgcaaagcctccctcgactccgacctcgacgccgccgccgctgcaactaacgcagcggcagccgccgccgccgccgccgccgctcgtgtacccatcgatccccatccagagaagcagaatcagctgcagtcacagcctcctccgccgccgccacttgctccgcagccaatgcagactgtgtcaggcacgccgccaccaaagcgcgggcggccgccgcgggctgccaaaacgccggcgacgccgcctgctccgcagaccgtttcgggcacgtcgccaacaaagcgcggccggccgccgcgggctgccaaacaatcgcctgaggttgaacggaaccaggagggggaagctcaacaggcgccagtcttctggacagcttgtccctcctgctgccatttacaccagtacgaccactcctacgagtcgcaaacgctgctttgccctagctgccgccggccgtttgttgccactgcaatgtccacgcagccgcccatcgtgccaggcacagacatgtattactgctcctgggggttcttcccaatgggtttccctggtggtcctgcattcgctgaaccactcaattccccgcagcagcaggcacctgctgctctaggattttatccaatggggccatacttgccattaccaagcctaagtggcattgtggaaggggaaggcaataaggcagttgatgctggcactggcattcctgtcatcccaacagtggcagcaccagcatcagcatcatcgccagcgccgacagcggcaacaccagtggagttcttacatgtgaaggttggggcaaagaagcgagggcggcccaaaggcagcaagaacaaaaaagctgtggttgagatgacttgggcactgtaagatggtcgagggttagagcttcacctcgatagttggtcaagaatcagagcttcaccattcatgaattttggtgactaggtttttctccttacttccatagcgaagtttaccatagtagtcagttcaggtgagatctgttttttgtttgtatcatcccattagatgggtgagatgtttcatattgtagggtggcagctgctcaagtgcccattatgctgtctgcaacttgtaaagattaggagatggataataagctatgtgaatgcacattaattataaacactcagtgtgaaactgttgaaattgccaactttgcttc

SEQ ID NO: 31280 - DNA, 864 bp, Zea Mays
atcgcccgtccacttcaatttccatctctctgggcactccggcggaacgaagaacgcccacggatccgaggaacaagccgtctttgtgggctttagaatgcagatcttcgtgaggagccccagcggcaagatgatttgcctcagggtccaacctgacgataccttgcatacacatcaatccacgcttgacctccaagaaaagatgcaaatctatgtgaaggagacgctaaaaggcctaaccatcactcttgatgttgatagcttagatactattgacatcataaaggacaagattgaatacaacgagggatttcccaagggtcggcaatgcctcatctttggcgacgaacagctagagggcaagtacaccttggcggactacaacatttgcaacgagtccacgcttctccttgtcatccacccatgtacaagtacaagtgacgcaatgcagatctttgtgaagatgcaaaacggaaagaccaccactgttagggtcgacagctcagataccgtcaacagtatcacggtgaagatctatgaaatggagggcatcccacccctagaacagcgcatcatctttcgcggcaggcgtcttgagggcagacgcaccctggcggactacggcatccagaaggaggaaaccctccatctgatgctttgcctttgtggctggtgatgagactgatgccatgcatgcatgcatggtcattcaatattactactagtggtttgttatcagtaaaaagtatcattaattatagggatgccgtgtcatttagctaaaggtctttcttaccaggagagttctgtcatcagtaaaagtttttattgtggtacgtcagtgtgtgacatcttatatcaaga

SEQ ID NO: 31281 - DNA, 2883 bp, Zea Mays
gcgactgatttgcagggagtgcttgaagatggctttgttgccgtcaagaagttatactcgtatattgcaattgaagacgaaccatttcatcgtgaggttgattgtctaatgaatattaggcaccacaacatagtcttgtttgttggttactgtgctgaaacacaggaagtggttgtgcgtcaagaagggaaacatatttttgcggaaaaacgagaaagattactttgcttcgagtatttgcataatggaagccttcacaagcatctgacagccgaaccatgtgggcttccatggcacatttgttaccaaataataaaagggatttgcctgggcttgcactacctacatgacaagaacataattcatctagatctgaaaccggacaatatattgcttgatgatgacatggtgcccaaaatcacggacttcggtttgtcaagactcttgggtaatggaaaaagccacaccattacacaaacaagaataggaacatggggttacatggcacccgagtacttggatgatggagtgatcacaatgaagacagacatctatagcttgggtgtgataatcagacacatggtgaagggacgtaactcggcagacaccactgatgaagaagtactggcaaactggttgattaggctggaaaaggatccatcacagatgatgaggcagcagacgacccgattattatttgaaacagagtacaaagagcaaataaaagcgtgcatggatatatcatggaggtgcacgctgcgtaaaccaatggacaggccaacgacgcagcacatcctacttacactggaggaaacagaagcaaagatcaaatcggtcgttgggcctactccaccaaatgccgggcagattgccaaatttgggccgtggggtggagatggagggaagacgcgagacataagaatgacgccttgccatttgcatagcgtaacaattagcagtggaactattatcgattctatcgggttttcattcactgatcactatggtcagcaccacacaacagggccttggggcggtaaggagggtacgaataagattgaactaggcccttcggagtttcttacaggagtatctggaacaagcggcccattcaaaaatctaacaaatgttgtaacgtcacttacgtttgtcaccaatactcgtagttacggaccctttggaaaagggcgaggaacaccgttccacatccaaacgcagaacaacggcaggatcgttggcttctttggccgttctggccagtatctctatgcgattggggtctacacgaaccaagatgtgctgcaaatctagctagtccatactagttttatcgatcttatttaatatttatgttttcattcaaacatttgcttattagtccggttcacttccaggctagggtcgcaaggatcgggcgacctttgggtggagatgaaggggttcttcatggcatcacagacctcagtgggcagcagcgcagcagaggtggaggtccatcgggagaatgtggagacagcgacgacgagcccaacggtgatttcgccaaattcggcccgtggggcggcgacggaggacagccgcaggacatcggaacactaccctgccgtctagacaggatcaagatcagcagtgggcttatcatcgactcgatcgagttctcgtacgctggccctgacagccagtaccgcaccgcaggcccttggggtggtcatggaggagacaacagctcttttcagctagctggttcagagttccttacaggtgtgtctgggtcaatcggcacattcaacggccatgcaaacgtcataacgtctctgacgttcgtcaccaacgctcgtagctacgggccgtttggaagagggcgaggcacatccttccacatcccagtgcagggcaatggctgcatcgtcggtttctttgggcgctccggacggtacctcaacgcgatcggtgtctacacggcgccgaaacccgaaccaaaagcaggtggtgatgaggccgtcgtcgccaggattgggccttggggcggggttggaaatgctctccatgacatcgcagagaggccgcatcgcctgcacagagtgacgatcttcagcgggacgatcgtaaactcgctggagtatctgtacagcgatggcgacgggcagcagcacaccaccggtccgtggggcggctgcggaggaactggtcgaaagattcatcttgcccctgaagagttcatagtggaagttactgggacattccatccatgcgcgtgggacagaacaatacccagtgtcgtgtcctctctgacgctcgtgaccagcacgggcaaaacacacgggcctttcggaacgcagctgggagccgcgttccaggttccggtgcagagcgacagcaggatcgttggcttcttcgcccacggagacaattacatcgaagcaattggcgcctacgtgaagaaattgacagaatccagcaaccgttaactcttggaacaacttgcagctgttcacactgtttcttgggccattgctccttaaatttagtccagatggccaaggagcaaccaaacagaaatcgctatggcagggaagatggactaaactggactgtggcacctccagcatagcctgctcttagattagtgaccagacatcatcgagatatttcgatattataataaatgaggaacccatctcagatgtttatgttagctcctcagtttttgcttctgaatgattaatttagatcttccttatttttgcaataaatgaggattcttttctgtctcttctgaatggatacgaatcatgcatcacgtatcagtgcacctattgcagtgaggagatgaggacaaggtgctgacgaacttattgtcctgagctcccacttgagtttctg

SEQ ID NO: 31282 - DNA, 592 bp, Zea Mays
gtgtcacatatgtagcctagacacatgattcagttggaataaatgcagtgtcgtgtgatcgtgtctcgagtactcagctctggctgttgcaattgtgcgtgtccgttgccggtttcgttcgaggccatgagcatatattgatcctatgttatgagagcatgcatatagtgtaacgtgggctccaaataacagaactgcttttatgctcgcggtgtgcattctgttgtgccttgctttcatgattttcctgttctctggtgaattggtggtagcctgaacatcaggttatcttctcttatatatgggcatatttctgacctggattttttttcaagcacatgttaatcaaaatgtttggtgcagaatgaaccccgtcagtgtatatgtagcagaaatgttgttcagctgttcttatagtctcttttgattctgaatgttgcagagtcgtcaatccaatagatggcgttattgtttccaaaaagcagatgccaccaagaaagacatggaagttgaaatggttgtcaaagaatggggagagaaatcattaactgaattggaagcagaagagcggctgtcctattcatgtgagaag

SEQ ID NO: 31283 - DNA, 2524 bp, Zea Mays
ccggacaccaaggggccaagaaaaagaggaggtcgcttgcgtggccgcgcgacaaggcgtacggggagagggaagaggggtggccggtctcgccggcgtcgattcgccgccgtgtggcgatccctgcacggacgtcggtcggtcgccatggagacggcgcatgaggtggccatttacatcgaccgcttccacaacctggacctgttccagcaaggatggtaccgcgtgaagattagtgccctgtgggaggatgacgagaatcgagcacccatctcgccggccagggtcacgcaatacgaagctattgatattggtgtgaagagctcatttggcttttggaaaatagacgatgttgacaatagcttctacacacagccgtttcttgttaaatattctaggcaagatatttatctatcagttatggtgtccttctacatacccaacagcgaagacgagggtccagcaacttcttctgttatattgaagttcgagctcatatatatcccaacactggggaatgcatggactgacgttcaagattcaagtgatgatacagatttgatccctgtccatgaatttaggatcccacatagagcactcctaggcttacactcgtattgccctgtccattttgacgcattacactcggcgctagtggatctgacaatacacattgtctacctgaaagctgctgtgactaaatcatcactgaagccgctggaacaaagttttggctcaaagtcatatggtattgtgaaagcatcactaatatctagggaaatacttcttgaagaagtgaagaagatcagtaatgctgttggtagcactcttgaggatttggatcgcactgacttaacccttggtaaatatgagacagttcaaccatcaaagtcagcttcgcccagttacagttatgggcagggtacgcccacaaagtgtagtccccagatgactggcatcttacgtgattttcttgagagttctggggttgtggttggaagcactgatgatatcttgctgtatactctatctgaggaagaattgtttgaactatttcaaattgtcagcagccaactctcatttatatggaatgagttcttgaaattccataggacacataaagacaaggtaatgggttatttgcatgatatgtgggatattaatcggaaagcagaatggtcaatatggattattcattcaaagattgagattccacatcgctatttgagaagcatgaatgacgactctcctcgccatttgattcggatttccagttcaagaaagcctatacaaaattcgatgtcacaggctgaactgcacaggaaaagtatagcacaaatgaagattaacacgccgtctgttcaagatatgcatatttatgctgatccttcatgtatacctgttgtccgcatagagcagcatgtcatggttattccgcaacattgttctagcaaggattttctaacagatgcttcagaaccagctcccttatcacatatatctgcaacatatctagttgaaacttctgctgatccctaaaataaacaggggcatcatctggatttacgtcttgttaagaaccaatggcttttgcttgatcctggggctgagtgcctattgtctcagataaatgaggatagaacgtctggggattttaaagaaatgggtagaaggctcgctaatgaagtagtggcattcctcaaaaggaaggtggacaagtactccagaaatggaggttgcaaagagattaagctcagttttgtcggtcattctattgggaacattatcctcagaagtgccctcacagaacccaaattgcagccatttttgaagaacctgtatacatacatgtccatatcgggacctcacttgggttactggtacagcccaaattctctgttcaactctggcctctggctcatgaaacggctcaagggcatgcagtgcatgcatcagctcactttcagtgatgaccacgacccacagaacacgttcttttacaagctctgcaagctgaagacactggagaacttcaagaacatcatcctggtatcgtcaccgcagatccgggcaccaacgtcggaaactcgggtattcatgcgttgtgacgtgatattcgaccagtccgcccaaggacggaacctgaacaccatgatcggcagagctgcgcacatagagttcctggagaacgacatctatgcaaggttcatcatgtggtccttcccagagttgtttcggtgatgatggtgatgatgtgctcctggacctggagatgatctgaatacgtatcacacaagtcattatccattacagtatataaccgcagcattcgtgttgtttttaatgaattttagatgcgagacacaattttttgctctgttgccccgtcacctagcaatcgcagagcataaaattcatctggacagacaaattatggtttggtatcaacaactagtccgattgggatatgtacaaatacgagtgatgtttgtgaaacaaatggtggcgtgtcatgtgttgtgag

SEQ ID NO: 31284 - DNA, 784 bp, Zea Mays
gcgggtgcgcatgagcagagcgacggcgcggtggcgtcgactccggcgaggttccggcgaggagggagtgagagagggagatcgggcagggagagggagaaggctcagcttccaatttatagagaaaggggagggagagagagagccagggagagggaagaaacagccaacattatcaagcaccattaatgacattcatcaacgaaaggattaatgggagaggagtaacgactccattgaagtgtcttgaacgcagaggaaacggtcggggctgctcggcttctgctgtgctcgcggtcgtcgcgcggtcgggttggggcgctcgctgtgtggtgcaggggctcggtcggcggcttcgcgtcgtggatgcagggcgcgggtggccttgggcgctagtcgctcggcgggtcgagctcggctgctcgaccgcagggcagggcgctgagcagccggttcggcgagcggctgggcgcgcggtgcacggtcccggcgctggacgtcgcacggtcgctggcgcgcggctgcagggcgggtccgagtggcgaggcctggcgcgcgggctcctgggcgagcagctgggcgcgtcggctgcaggggcgcctggcgtccagcggctcggtgacgtcggacgcgcatggaagaagcaggggaggggagagagaatcgagaggagggcgcgggtgacatgcagaggaagaaggccaggggacggccgctggtggggcccgctcggcaggacagggaggaaatccctcccctggcggcggcggctgggagatagagc

SEQ ID NO: 31285 - DNA, 1497 bp, Zea Mays
gaggcccctcctccgtccaacttggtcagccgcccagcgtagcatattctccagccccggcggtataccttcacgatctgagccgctacgaatcgaaccaatccaatacagccacgcgtccctccccgccctcggcctcggagccccgcgtccccagcgtcgctgctagtataatagccccgcgcggcgcaaccgcacgagctcgcccgagcaaaccgccgccgctgcccgccgttcccctcgccgctcgtcctctctacaaggtgcgtggtctcgagtctcggctcctgaatcccgtcgtcctctccctcctccgccgcggtttcctttcccgcttgttcagacgaagtaccgactttaccttgtcctggactttataaatggggccatctcttcttccagctttaccaccagggtttatttagggaggagcttgcacgcatctacactgctgaaattgtatctgcagtcgcccacctccatgccaacggtattatgcatagagatttgaagcctgagaacatcttactggatgctgatggtcatgctatgctgactgactttggtgtggcaaaagaatttgatgaaaacactagatcaaactcaatgtgtggtactgttgaatacatggccccagaaattgttcagggccgaggtcatgataaggctgcagactggtggagtgtgggagtccttctttttgaaatgcttacaggaaagccaccgtttgttggtggaaacagagacaagattcagcagaagatagtaaaggagaagataaagctgccaacatatttatctagtgaagttcactcaatgttgaaaggattattgcacaaagaagctggcagacggctgggaagcggaccaggcggcagtgacgaaatcaagaaccacaagtggttcaagtctgtaaactggaagaggctggaggcccggcagatcgagccaagcttccggccgaatgttgctggcaagacctgcattgcgaactttgacgagtgctggacgaacatgcccgtgcttgattctccggtggccagccctgttgcggccaacagcaactttgtggggttcagttatgtgaggcccgcaccgttcctccagaagccgagtccacttggctaaagaactacttccgtgatctgatatctaacccggagttcaaataactatctttgagtctgaatcctatgtatttcttcaagacattagtgatgggaatctaaccttattgttgtgttgtgggtaggccagccaagcgcctattgcttgagaacaacagcttggcaagtgacaatgtgcaatattgccagaagttcttattgaagcgccataataattctcctacgtcaatttgaacttgctcggtctattcaattgtggccttataatgcaatttcattctctggtctagttgccgtttttgtttccgtattccttatttatccattcgtggttctttggcctagttttggcgtagcagctataattcgg

SEQ ID NO: 31286 - DNA, 764 bp, Zea Mays
accccgccgaccgcaacgaacgaaacccaccggataaaaccgccttgcctgcgcactggtgcctgcggaaactgcgactcctcctcggtcctcgcagacgattcaccccgcaccgcgagcgaggagaggagcctggccgcgagggcgtcgacgctgatggcggcgtggtggcggaggaaggtggtgccctgcgcgcgccgcgcctgggccgccctcgccgcgcggctccgcgcgcgtaagcctggatatcacctggacaccgtggatcatgtgccaggcagtggtggcattctgaagctcaacgaggacgtgcagacttgcggctacaaggacgtccaggtcatgttcgacatgttgacatcggaactcgaggcagccgctcaagcccagaagccaccgacgtcgccgccccgcaaaggaggagcgctaccgcctgcatggcccggccggtcctcgtcggcgatcactgctgcacagtaggtacctgcgaacagtaccattagagaggcgtccgccgccccctgcccttcttccgtcagaaagagcgaaaaattgcagcgagaacaataagatgaggagtaagcgcgagagatagagaggctcccaaacatcgtgtttaggtgtgtagatagaggatgatatgaaccagtgctgaacactttttttcgcccatcggaagaagagagagcaagaggggttactttcaatcccaaggtgtatttttattttgtttcaatatgatccatgctggtttctggttaaaa

SEQ ID NO: 31287 - DNA, 2902 bp, Zea Mays
ataagataaaaaaagattaaaaaaaaggaacgcgcgaaatttctcgataagggaaaggggaacacgcttctgccattgcttggctccccccacccgaatcttttctgcttgttgaatctgaaatttgtgctgggttgagcagcgtccgtccttgcgcttagcgaattcgcggtgtttacgctccgatgcctcacgtaaggctatctctcaggcttcccaaaagctcgggtaggttgaatcgtggagagttccacagcgtcctagccgccgccgtggcctgacctcgccataaccttccattccatggaggtctccaccatcagcttctcgtccccgccgccgcgggccacgccggccgacctcgaggccgtcggcctccgccgcctcagcgacaacctccagcgcctgctcgacccggccttcctcaactgctcggacgccgagatcgcgctcgccgcggcgaggggcggcggcgccgtcggcgtccaccgctgcatcctcgccgccaggagcgccttcttcctcgaccacctcgcctccctcccggctccggccgccgccggcgagaggccacggctggagctcgccgacctcgtcccgggcggccgccacatcggccgcgacgccctcgtgcccgtcctcggctatctctacaccggccgcctcaagcccccggcgcaggacgccaccgtctgcatggacgacgcgtgcggccacgggacttgccgcccggccatagatttcgtcgtcgagtccatgtacgcggcgtctggcttccagatctcggagcttgcctccctcttccagcgtcgcctctctgacttcgtttgcgaagcgctggacgaggacgtggtgccgattattcatgtcgcttccacctgcgatctccaggacctgctcaatctgtgtattcagagggtcgcagtctccgctctcgatagccgctacctggacaaggagcttccggctgacatatacaacaagatcaaggagatccgccgccaaccagagaacgccattattctggaccctgagcatgacaagagggtcaggaacatcctcaaggccttggattccgacgacgtcgatctcgtcggcttgctgttgaaggaatcgacggtgaccttggacgatgcattcgcgatacactatgctgcagcctactgtgagcccaaggtgtttgcagagctgctcaaactggactctgctaacgtgaacctgaagaacagcggtgggtatacgccgctgcacatagcttgcatgaggagagagccggacatcattctttcgctggtggagaggggagcctgtgtgctggagaggaccctggatgggcgcgatgctcttactatctgcaagagactgacaagagagaaagactgcaataggaagttggacaagtacgaggagaaaagtaaggcttacttgtgtatcgacattttggagcaagaactcaagaggaaatccttcgttttggaccccatctctatctctatagaggagtcgattgccacgcctttgctggtcgataattttcacatgaggctcataaacttggaaaacagagttgcgtttgctcggatattcttcccttctgaagccaagcttgtcatgcgcatcgcacaagccgattcaacccaagagtttgccggcatcaccaacttcagcagactcaaggaagttgatctaaacgaaaccccaacgatgcagaataggaggcttcgcgaacgccttgatgccttaacaaagacagttgagctagggagacgatacttcccacactgttcggacgttctggataagttcctcaacgaagaatccactgatccgatcttccttgagactgggaccccggaggatcagcaagtcaagaggatgcgtttctctgagctcagagaggacgtgcgcaaggcgttcacgaaagataaggcagcagtggctgcaatagcttcctcggcgtcctcgtcttcgtctccgagcagttacaaaatgtccaagttgtcttggaggttggccagcacccgtaggacggtgtccacgacgacagggtccgcgcccagcagcctgtgcagctgcgcctcgacgctagagcccaagacgtcgcccacgaacctgtacacctgagcgaggcgcaggtcgtccggagacagggggaactgaaccgtctcgacgtccggcgccagggtaccaccatcgtcggcgcaccaggccgggcaaccggcggcagagcggtgagggtgccgcggcggcacggcgaggcccagcttcttgtccgctctgaggaagtgtttctgggcgtggctgcgtatctgcgtgcccgtcttggtggcgacgaacgcctggaccctcttccagtcgcggccgaacagcagcagcgcgtggaggaagcggccgtgctcgtcggcggtccacttctcccgcggcctgctcaccacgtttgcggcggcgacttctggaatggaagcgcagacaccgcgtgggcatcgcagcgcacgttacaaacgacgccaactgcgcgcgtgctaggcgtgctaggcctaatggtgcggtgccggggagttttggccggatctgggatgtgctcatgtggagttaggcaaagccacggatgaaccagcactacagcctttttctatgatatgattgcaaaacgtcctctataaattcgtagtgaattgatagtttatttaggggcagtaacatcatatggcaccaatgacacgaattgaatacggagtcgatcttcggataatgctttgtaaaaatgaaaccatgctaaggcataaagtaacctgagaaatacagcttcatcagccctgttacaaaagaaaggatctcttgtttatgaagcatgtatatttttacgaagcatggatattttccggtatgtatataaagtttc

SEQ ID NO: 31288 - DNA, 1089 bp, Zea Mays
tcgccagctctcaaactagcccgtggtgataaattcgccgacgcggatggagaggggagaaaacgtcgccagttcggctgtcgaaccggaactgaagcaacatttgttctgtggaaattgggatggctctggctagggtttcaccgtcttccttagcgaaccttataccgcccctgctccaatccttcttccgccctttctcctcggactttcccatccgcaattcccgccgaagaagctcccccgttgctgccgccttctctcttacttcacaatctgcccacgctgcgagggaggggctggtcatggaggcgcccaggccgagctccaggtttgtgcgtccaactgcaatgagtgagcaaagaacaacagaatacatagaagggaaatatggaaaatttggggttgaccgtgtttggcatgacactgctacccctttcaagcaagtgctgcaagagtttgaggactggcttggaaatcacaacctgtggaaaaaggagcaaggtggatcactcaaccgtggagcatttgttacttgtggaaactgggatttgaagacaaaggtccctgagcagtgcaaggtttcaaaaataaatttacctacctattttatggaatggattaacttgaaggatatctacctcaacttctataacagaagggcaactggaatgatgacaatgatgagagaacttcaactgccaattgttggaaaccaccatctcgggatagacgattcaaaaaatatcgcaagagtggttcagcgcatgcttgctgatggtgctgtgattcaaatcactgctaagagacagtcagctactggcgatgtgagatttcttttcaaggaccgaattaggtgattgaaaagtgacacccccaattcatagtggtgctgatattagttgcctgaaaggcatttcaggattttggagcaaagatagagcgactgaacgctcaatcaacatacaaatatgtctagaaattgtgatgctttaaccaaacaagatcaaattactgtccccaagctcatcttagagtttcaactaaatcacaaattaaaggaaccgtgatatgtgaattagttaacgt

SEQ ID NO: 31289 - DNA, 4286 bp, Zea Mays
gcgtgtgccgccgcaacacccaggcaagcccgagaccaaaaataacagaaaggagagccgcgtgtcctcccagccactgccacccttccccacctatcgatctcgagttctctcgaccccacccgacccggagccgcaccgcctcgacccagaccggcgccgacgagccccagcgcccaatggcggcggctttcctcgccctggaggcccgcgtgacatgatccctgtcccccgaggatgggaatatcccccctccaccctcccttctcgactcttcctcgggtctctccttctccaccgcctcgcgctccgcaattggctgctcgtgctcgcgtggccccggatcgccgccaggaagtagctaattggtgctgggcataggacttgctggatttcagtcgtctgatatactgagacttagtagtgctgatccagtgaacctatccacaccaacttgattacagtctctctgacacaactatggcgccctctgccgctgccccaggcatctctgaggctgagggggcaccacgcatggccaagttcctctgcagctttggaggtagtatccttccccgaccacttgatggctgtcttcgatatgttggtggcgagacaaggattgtcatattgccgcgtgacatatcatatgccgacctagctgcacggatgagagatctctacaaggatgctgataccatcaaataccagcaacctgatgaggatctggatgcgctggtctcggtcgtgaatcacgatgatgtggtgaacatgatggaggagtatgacaaagtcactgccacaggggaggcgttcactcggctcaggatcttcttattttctcagcaattggatgacaatgctgcatcagtggctgtgcattacaatgtagacgagcgggaaacagagagaaggtatgtagatgcgctcaacagccttggtgatgttaggtcaccttcctcccctgtatctgtggagcagctttttggcatcggaggcaatgattcaggaattcctgattttgctggcttgagacatttgaatgtccctcgtccatcacatggtcagaggtatggagagatggattctccttggagccctgcttatgtctcaccaagccagtacagagtgcatgacccgagggattttccaatttcaccgtcatctgcaaggttccaagtaggagcggaggattttgatgacaggattcctgacgactttgtaaggcagtcaccaaaatatcattattatgaggctcaatcaccatcacatatggataatttagtctggcttccacctggtgctgtaattcagcaaaatgcaggtttccctggtgatttgagcaagcacaataaatttttggatgggaacagtggatgtgatcactgtggttcactattccacaagggtcagggttcggtgactgatcctatctatatgaatcctcgttggactcggccagtccaacaacattttgaccaaccaagcatgattaatgattatcccggtcaccatgctaattcttgtccagattactgccgccctggtgagcattatgcgggaggtcaagatgttagattggaaaatggtgtttatgttaaagagcaaaatggtggtcatactcccatgctttataatgagtcacgtcctcacgatagagtctggtatgcgcataccaaccaaagtcatcagcggtatgaggatccaaggctgcattatcctactaatgatagagtgatcgagccatacattgtcgatgctagctctgtaaattccgcatttgcaccaaacaaagtatatgaaatgcattcagcatctcttggtcattctagttctagccatgaaagtcctcactattttcatggtagcagtgagctcataaatgacgcatatcacaaccaacaagttggaggcagtgggtcatatgtgcagccagcagggtctgaagaatcccctggtcagcattacaaccacttttcggcctatggtgcagattccttttatcaaatgcaacaaaatttgccacccattcaatctttgaggaggagagcgaacagtcctgttcacactgcctcaccatatgattccccacacctgccaataccaaatgggagcattaacatgaattctgttagaaatacaggtgatgcgagtcccaggatagcaggtcttattggatatgatcgaatgccaaacccatttactccgcccaatggcagcatactatatagagttggtgggcatgatgttcctgcagctatggagaacactagtgcttttggtcctaggtctaatccaactgctgctcagtatgttcagccttttattgctcctgaatcaatccagcatcaacctggagttcccttgagggaggtttatcctgaaagagcataccctgaacccatgccgtcatcatatgctgatggcaaagtagctgtttctgcattgcccctcaccgaccaattattcaggttggatataaacacaatgaagaaacttgaaggacaagatgatgggaactctactcgaaatgtgaatgaaacaactcttttgcatgctgtggatgaaccaagtaccttaccccaccatgttggatctgtacatgaagtcgatcctaagcaggagaagctaaccgaaaaagaaagcaggcaaaagcaacatgaagctggggctacagcactgcaggaatgtgaggatatttcagaggatatgttgaatttccttcctgaattaattgcctctgttaaaaaggtaacactggaagatgctgctgagacacaaatagcccaatcagatgctaatgctgctgtttcacctgttcctgatgatgacgataatggaaagaagctggatgaggcaacagctggtaatacaaatgcaaatcaggaccttgatttgcaaggaagccttgatcggcagaagagtttcaagattgagtctacaactgctgaagctgaagctttgtcgaaaggactacagactataaaaaatgatgatttagaggaaattagagagctgggttcaggtacttatggggcggtctatcatggtaaatggaggggatgcgatgttgctattaaaagaataaaagcaagttgctttgctggaagaccatctgaaagagagcgtttgatcacggatttctggaaagaagctctgatcctaagctcacttcatcatccaaatgtggttgcattttatggtgtagttcgtgatggtccagatggaagcttagcaactgttactgagtttatggttaatgggtctctcaaacagttcctgaggaaaaaagacaggacaatagatcgccggaagagagtaatattagccatggatgctgcatttggcatggaatatttgcacgggaagaatatagtccattttgacctgaagtgtgagaatctactggtgaacatgagggatccacagcgaccaatctgcaagatcggtgatctcgggctatcaaaggttaaacagcatactttggtatctggtggtgttagaggaaccttaccgtggatggcaccagagcttctgagtgggaaaaacaatatggtgtcagagaagattgacgtctattcgtttggaattgtcatgtgggagctgcttactggggaagagccatactctgatatgcgtgctgctgaaattattggggccattgtaaacgattccttacgccctcaaatcccttcatggtgtgatcctgagtggaagggattgatggaaagctgttggtccagtgatccagcggagagaccgtccttcactgatatatctcaaaggttgaggaaaatggccgctgcaatgaatgtgaagtgaaggttcggaagccatatttgtcttgattttccttagtcctggagtaacccggctgtcatttgccttgtgtcgaaaataagtatgctataaagcgttctgtcttgatgggaactgttgggctgtaattgtaaataagttttgacttgcttcatcttgctgtgcaaagtagtaattaataggcacgatcaaagctgggcacagttatcttttccccccatacaaaagtgtgtcctaggactaggaggagagatggatcgaacacgactagagctgtacatagtatactgtttgctctgtatataatcatcacttcctatttgaatgctcataagtttgcacagtcccttgtggtcttcctgttgagtcctaatcgaccagggtgattggtgaagccactgtctatccgaagagaccattgagccacggtgccacttgcatgacattgctgtgttccattgtttacc

SEQ ID NO: 31290 - DNA, 1989 bp, Zea Mays
cggaacacgccaccgcttgtggtttcacgcgagcgcacccaggccagcagtgcgccccgctgattcctctccggccgtcccgacgttatccaactcctgaacacctctctctcgccacctcacctgaacacctgctcgccccacccattccctccgcatggccggcctccgccctcgcgccgccgtagcttcgaattgcctccgaccggcaattcggcgaggcgcccgtcacgcatcgggggcagcgtttggatactacacctgctggcagctacagttccttgtcaacatcaaaacgcagggaaatattttgaattggagatctatatccgcaactaaaaagctctggagtacagtagctagtgcaaagcctgatgattctaaatttgaaagtgtggatgcaccacttgagccccaaacatgtgaaggcagcttcttgtgtggtctgttgaagaacctgccacacatttttctagctgcagcagcaaagcagttgcaagaactgtcttaccaaagagaagagagcttaaaacgctgggagcatagtattggttctaaagaggattgccttcacaggaggattgctgaactcaaggaacacgagtgtcagagagctattgaggacgtcatgtacatgttgattgtttataagttttttaagattgaagttccaatggttcccaatctatcgaaactcataagcaacagaaggttacagttatggccaccaagggagacagatcttgaatccattcatggacctgaggtgctagagctaattagggaacacttgaccagcattatcagatgggtgcacagaaatggtcccaagatcaatcgttcaacacttcgcattaaaagactgcaatttgttcggatatattctgcttcaataatgtacggatacttcctgaaatctgtcagcatcaggcatcgattggagctgaccctcactcgctcagaaggagtgcctccgattcaatttctgaatgctcaactcacaaataaacaagagcaggaaggggccattggaggctctagtgaagcttcgtcttctttgagaccaagttctgtggtcaacccacacgacttgaggggctacataatgggattcgatccaaagaccttgcagctttgcgcgaagctgcgctcatcggaagcttctaatctcatcgagaggcacagctgggctctttttgggggcgacatggaactctcccaggagaatgatgaagcggttatacttgatccttcatccctgaaaagactactgcttgaagccatcgcattcggttccttcctctgggacgtcgaggattatgtggacgagatcttcaagttatcggatagctgaagaaactgctacagaaagctcctacagcctttgtggttgtggatagatgaagccagctgaaaagaggagctgcagttcttttctctagatttgtatatatggctggctgttatgtacatgcatatacatcttcatctcaagtttgctttttggagggaagcttggacgtgccctacaagtttttttttgtaagttatgtcatcttacactagtacacaatagcatcagcctatcaacgcagaggacgtgtgacataattttatggtcccaaaataactgggcattttgctaatctagaacgacattattttggaatgaaatgagttgtatcagcatttgtaccttcaaattagtttagtttgaaagcataaatctgataggcctattgggcttccggttgcagcactgctgggcagttattctaccacaagggatgcagcagcagccatgacagcactgcatgtctccagcagcagtttacctgtttcttatctcatcttttattttaaactttattatatgaataatacatatatcttatctcaattttttattttaaactttattatgtgaacaatatggttgtagtgaaaacaatattttgcacaactatagtatttctatttcaaacttca

SEQ ID NO: 31291 - DNA, 189 bp, Zea Mays
acaagagctatagcattcaattctagacactccaaagagatcaaatcctctcctaagtccaaagacaactccaatcaatagtgactagtgagagagtgatatttgtgttcatttaagctcttgtgcttggattgcttcttttctttctcattcttcttgtgatcaaacacaattgtaaccaaggcaaga

SEQ ID NO: 31292 - DNA, 2487 bp, Zea Mays
tttgcttgcctgcctgccgcccaaaccaaccttcctctcccccggaatcccagaaatttccgcccacaccaaccggcacctattccgtgggcgcgaaaccctaatcggcgcccgcctccatctccatggcggagcaggacgacgccgcggggcagagcccgctcgactccgttccgatcgacgaaacttgtgatgctgaagatatgcattctcctttgtccttttcttacagaagtcagcctaaatctgtgggagctggtcttagcaatatggggaacacatgcttcctgaacgcaactcttcagtgcatcactcacactgtaccgctttttctcaagcttcgctcaactgatcattccaccccatgctcatataataaggatgggttttgttctttctgtgcccttaaagaacatgttgatgaatcaattcaaaggtctggatctgttatagcaccagcaaagttcagagataatttaagaagtatcctttcatgttgaacttttgctgagtctgttcaattttcaacattataactgctgtttgcatatatgttttcctgttaattcatgtccttccacccccttttggcattcagttcaccttactcttcacttaattattgtgctactgcatccttctcaattgttgccagcctgctatagtccaatgtgacatgagatttcttaacaatattttctagagttatcttcggatttttggccaggacagcaagaagatgcacatgaatttctacgttgcttgcttgataacttgcacaagtgtactcttgatcccatgtcaaagggcaagggctcatcctttgacgaagaaagtatagtcaacgagatttttggaggacaactgaaaagccatttatcttgctgcgagtgtggtcacagctcagagacgtttgagcccttcctggatctaagcttggagattgatcaggttgatcatctggtagatgctttgcaatcttttaccaaggtagaacagattggggactctgaaaacaagctcacctgcgaaagttgcaatgctcaagtttctaagaacaagcagcttacacttcatagagcaccagatgttattgcatttcatctcaagcgttttacaacccttgacaattctgttgaaaagattgacaaacatgtggtgtaccctctggaggttgatttgaagccatttcatagcaatccagacacagtggggggactgaaatatgatctttatggtgttgttgagcattctggattacccaactatggccattatacctgcaccattcgttcttcaccaagcacatggtacttcatgaatgactccaaagttgattcttgtactgattcaagtgcattaaaccaggaagcatatattttgttctatgttaggcagggcaaatttccatggttctcgagtttgctagaaggaggcagtggcagtagttctggtgataagttagagaaaaatgaagccagccaattagaggagacggagaaagatgaaatgggtcggtacaaaccatcattccttcctgaggagccatctacgagaagttcccttggcgcttccaacagcaataatacaatcgatgaaaacaatccacccagggcttctctccaaaatgatgtggctacatgtctccgctgtgtagaaactaccaatctggataagccctctaccccaccgcgctccaaacgacttgcctttgataacgagtttagtgtgtttgagtttgaggactttggtgaggaagatgaaactttatttccaaatttgaaacttacaccgaaggccaagaaagctaaggctgcatctgcatctaaagctgagaagggtccttgcattgatcagaacgcagtacgtttgatgaggggcatgacatcgacacgaagaaaaggtttaatggactgcatagcacagcaaactgcaaagcacgagtctagcagataccctgcaagtgaccctctggacaaaaagaaaagaaagccggttcttcaatactatgtaaacgtgaaaaattgataaaatggtctagaaaaaaaaacccggtgagcgtgggtggtgaatacgccgtggaggtggctcacgctgatgagggtaagccggcatggattaagggcacagcaagcatgtgggtcataggcggagctacgttagggccgtcctcggcccttggcctttgctctgcgtaaccactagaagtctgcatggctgaatgctgcaattaacttgctctccacagtctgcgaccgagaatattttaggtaattttatatttgtgtccctagtttagcaccactcagttttgttcctagtttagcaccactgctccgttttgtttttcgctagcagtagaaatgtctcatccattactatttgagagtaaaattgtgtagtggtgcggaactaaagcctaaaggtacatatttaaaaacccaaatattttagcgctcatgttaaactgtttgtttttcccattcc

SEQ ID NO: 31293 - DNA, 1804 bp, Zea Mays
cagcgacctccatgcggggacggcggagccctagatgcgtcgtggctgacccccactggcgccgccactccttccggtttgacgacattgaggtagcaagaaaacctttgcaaaatggacaaaggtagaatttcatttgagatccaaccaaaataacagcaactcaaggtttcaacttacaacaagtaaaagcggggtagtttggcttgatcaagtatcagttatgccaatggacacttacatggggcatggttttcggaaagatcttgcttctatgttggccaatctcgagcctcagtttctcaagtttccaggtggcaactatgccatgggaaattatctacgaaatgcatttcggtggagtgagactgtgggaccatgggaggagagacctggtcactttaatgatgcctggggatactggactgatgatgggcttggattttttgagttccttcagttggctgaagaccttggggcttccccagtttgggtggtgaatgatggagcaagccttaatgaagaagtttccactaaaacaattgcatcattggttaaggatgttgttaatggcatagagtttgccagtggaggacctaagacaacttggggttctgttcgtgcagcaatgggacacccagaaccctttaagcttgattatgtttcaataggaaatcaagaatgttggatgctctactatagaggaaattaccaaaagttttactcagcgattaaatctgcctacccagacatcaacattatatcaagttgtgataggccaactatttcgccatccaaccctgccgatctttatgatgttcatgtctacacctcttcgactaatatgttttcaaaagctagtatgtttgacaacacaccacgtggagcaccgaaggcaattgttagcgagtacgctgtgaccggaaatgatgctggcaaaggaacactggtagcagcactggcagaagctgcatttctcattggattggaaaggaacagtgatgtggttgagatggcaagctgtgcacccctttttgtaaatgacaatgatcgcaggtggagcccagatgccatcgtcttcaactcggggcagcactatgggtgtcccaactattggatgctacacttcttcaaggaatctagcggcgccaccctccatcctacagccattcaggtctccagctacgatcagctggttgcgtctgccatcacttggcagaacgctaaagacaagagcacttacctcaggataaaggtggtgaatttcggcaatcaagctgtggatctgaacatatcggttgtggaactggccaccggcgtcaagaagtctggatcgaagcagacggttctaacgtccagcagtccgcttgacgagaactccttccagcagccagagaaggtggcgccagtgtcgagcccaatggcgaacgcggggcagcagatgggcgcttccgtggggccgtactccctcacctcgtttgacctgctgctggagccgagcaagcatgacagcgtgtaaaactgtcaactgaagaagcatgacagcggtgtacgtaaaggaggtcaaagatagaggagacaggtcagaggtcaaaattgagaccttgataccatattggattggattgtatgtatcaacaagttcaacctaaaagtttaagctgatagtgaaatgcggacagttcacattctaacaaatcccagtcaatgttgcatccaacaatactttgtacttgatgtctgaatccatttgattcagaagatagcgctttattgttttgccaatgcaaatacacatgcgatc

SEQ ID NO: 31294 - DNA, 1287 bp, Zea Mays
cggccacgctcgccgcgggcacacgcggcgcgctgtgctcacccctgtctgcctgcgcgcccggcacgcccgcgcccactcacgcccggccctgccccgcgccctcatcgtctcctcccggcctcccctcaaagcccaccgccgctgcccccacgccacccaccccaccccgcccccgcccctaccgcgcggtgcccgagacccagaggccagacccctttcttcaccttccttcccatcgcaatcgcaagcccccggctccggcgctcggcggtcggccaggttcgggagatcacttcgtcgcggcgaggagggagggggtcgccgttagcgcgcggcacttggatgagaagggcagcggtggaggaggatgcggaaggcgtacagggactccatcaaggtgctcgaagctgacatccagcacgccaacaccctgtttatgtggatggcacaacaaccatgtcgactcatgagaggaaagccagcatcaaagaattctatgctgtgatatttccttctttgctgcaactgcaaagggggatcactgatgtcgaggacaagaagcagaaggccatatgcatggagaagtacagaaagaaagatgaggatggacgggacaccttatctgatattgatgttgagagggaagaggagtgtgggatttgcatggagatgaacagcaaagttgtgttgcccaactgcacccatgctatgtgtatcagatgttaccaggactggagttcaagatcgcagtcctgcccattctgccgtgacaacctgaagaagacctgtcctggtgacctgtggatctatgttgaggaccaagatgtggttgacatggagacggtgtcgagcgagaacctcagacggctgttcatgtacataagcaagctgcctctgattgtcccagacgtcatcttcagtgtgtatgattcccacatcaaatgacttccgacgcgaccttcctgacgaccttcagccagtgcccagctccagttaatcttatgcccccatgtcctccattttcatgctttgctcaagcttttggaagtgcctgaactgatttggaaccgcaagccttccggtggtgctttagaaacttgtttagtgcctgcatgcatccttaatcatatgcagccactctgtacatatctgacttggctcagttaataggggactgtgcttgccccaaatggaggcagggccgtttgtgtctttctcatgtttccattagcgaagcaacgcaaagttctggggggcattggaaggtttctgctgcaatgttag

SEQ ID NO: 31295 - DNA, 2192 bp, Zea Mays
gtttggtttgtggaaagaagtatctcttgatattggatcgcacaaattggaagaccaacatgctgacagctctcttggttccttacattttcttcaccctgcctaatgtgctgttttctctgatcagaggagaggtggggaaatggattgcgattattgctgttattctgcgtctattctttccacgacacttcccagattggttagagcttcctggttccatcatcctgctcacagtggtcgcccctagcctgttcgcggacagcttcaggggagacctcgttggtgtcttcatatgccttgtgatcggatgctacctgctccaagaacacatcaaggcgtcaggtggattcaggaacgccttcaggaagggcaatggtgtgtccaactccatcggcatcctcctgctcttcatctaccctgtctgggccggtgtgctgcaagtcctgtaggcaccattgcctcagtgtttcccctgtgcggtccagctccgttcccgttcgtgcccgtgcaaatgttccctctatggtgatccgtgatcctgtgtcacgagtaggtgatgtttttatgtgtgcttgagttgatcggttgggcatgttgccatgttggtggacagttttgtttatctcatttgttgtagttcgatgtcagcatttggttcgttcgagtacataaacgccaataaaatcagtagccgtggcttgatgtagattgagatgttggtcatattatctcgtgtaaatccctgcgtctcttctgttatagtgttatgcaagctagaggacgcatgtttatatgtcaactaattattttctatatcaacagcatcatccggtgttatttctgaatatggtgccaactagtgacaaaaccgtgaaacatcaaccggccggagttgagaacgatctgggctgcggccggtcagcttgtggatgggcgaacttttctgctccggcatccacgctgctgtcctcctacatacacctggcatcctggcggccgttggttcagcaaactttgcctgccattcactcgcacgtacccgtcggaccacgcgtggtggccggcacattcctcctcgcccggcccttatcctctgcccaactgcaacaggagagaagcgatgcgatattcctgttctgtaacagatcgaattctccagcatcttcagttgtgcggttgagctgagtggtcagataatccatccattccttttacgttgcatacatgtccaggttgagcttccacatgttctttattaacagtcacgatcagcgtggagcagcgtgtggttacgtgcaccagtttagcttagcagctgaagaaaagcaacgagacatggggaggatgagtgtgcgacgcgaggtcaaaagcagcaataaccatggcgagcagaaagaaagcatttcgcggaaaagaaagaatcaccccgtcgtccctgcagtctgcaggtgcggtagcggtgccccgtctccatccatcgcaaagcccccgggctttcgatcccgtcccctgcttttgttcccgcccgccagattccttccaacatcccggctgcactgcactgcaccacgactccacgagctgaggtgaaaagcaagcgagaaacgcgccgccccggggaggaggcgaggggtgagtcgggtcgggtgtgccgtgcgcgcgcgtatgggaatggcatgatcgtccggcggcgcgtggactccgtggatggataacggggacaggtcgggcgctggcgcgggcgccgtcggcagcgccggcagcctcggtctccgcgtcgggcaggcggtcttctcgtcggcgtcgctgctgttcatgtcggtcggtgtcgagttcttcagctacaccgccttctgcttcctggtgacgatcatggggctggtcatcccctggagctgcacgctggccatgatcgacgtgtactccgtgttcgtgggatgccctctgcgcgtgccgggcgtcatggtcatcgtcgtggtaggagactgcgccctgtcgatagtctcgttcgccgccgcctgctcgagcgccgcggtgatcgacctcctcctccagctccatggatcccacagctccccgacgttctgcgggaggtaccagctgtctgccatgatggcgttcttgtcctggctcctcatggccgcctctgccaccttcaacctctgatgccatgaccaagtgcaacgact

SEQ ID NO: 31296 - DNA, 3716 bp, Zea Mays
agctctactgtagcaaatttttgggcttctttgaagtgcggcccaaaaactgaggaggttccttcctatcaaagggaacaatattatagtttgggccgttgtttatcacacagggtccctcggcccgcaccatttcgcgcttgccctaaagaaacccgacacgagccccactcgctcggacgcacaggcgcacaccgacaagcgcagcgatggcggccgcggcgggggacggacagacgccgcaggagccggagccagtggcgggagcggcggctggaggcggcgtgatcgcgaagctggaagaggagtggcggaaggcgaaggagcacgcgcagacctacccgtacgtgtggggctcctacatcctcgtctacggcggcctcggcgcctacctcgcctggcgctggcgtaagctccgccgcaccgaggaccgcgtccgcgttcttcaggaacgcctccgcaagctctccgcggccgaggagtcgcaggctgcctctgccaccggctccgtttccactccctcgacccctcccctgccgcaggagtcggcctctggggccgcaaagccggcttctagaccgtgaaggaaagtagaggtggaggactataatacaagtgctgagaggttggtgattctctcattgtcatctaatcgtttgggggaagctcaaaatcatgtacatcgtgtgtggtcattcccacgaaggatctggatttactgttgatgtcaccggaacccgtcttagtgacatcgtaacttttggctccatgatgctggtttgcagttttctccatccacttcacttctctattgttactaatgtattgcgccttatactgatcttgccaaatcttcttgaattatctcctggagcatatttttgcggtgttatgtactaaggacaaatggattatggatagagaaagcttaaccaacatcctggcagtctaattttgacgtttggcagggctttcggttgcagatccctctggataagttgacagagctgaactgacgaaccaaacgttcctgctaaattccatagtctgcaacctaacttcgtcgattgtgaactatcagagtacaataattccgacccatggggagctttgtggggttgctgagcgttgaccaaggtccaagcatggagctctttggaatctagttgtggcttggcttatttccatggcctgcataggttccccacactgatacagtgatacactctagatatggccttgcacctccatgccagaaatccagagttttcatatcaataaaagagttgcctaccctcagctttcatttctttgtaccactacaaggccgcgtgacatgtgtgaggttcctgtgttcgaacactgcaggctgagccatcagtgtgctgtgtagggtcggtcattcagctgtctctttcatagtattgttaggctccagtcacttcacaaaatcaggctggtattttttggcgagccggttaaaacttgaacgctgagcaaaaacggcacgtttgcaagctgagccccggccatcgctcctaccacaatatcttgccaacgaaaagactgcagctatatgtacagcgtgcagcgaagacaacaaaatagtacagatgggcctggtcctggtgctccgctgatgcccctcctctggtgctcaccacccagtccgacatcgccatgtgatggccgaacagcactacgtgcccagaactggccttgattccttttaccaagccttgctctgcgtcctgatcaagtcatcagaaacagtcctgcagagtagattatcttgatttgcccttcaaatcttggttctgagtttctgacctctgtttaaaaaaaattaggtgccgtgctggtgctgctgagtgaggtttacggtttagggtttaccctgcggtgttctctgaccctatgttagtttgaggatgaaactgttttaaactgacgacgggcgtcgacagattcaacaggccgaactgttatttattgttatttgcgaaaatcataaagcgcagcgacagattcttcgcagtttttggtggccactgcgtaaaagacagatcggtctcagggggagtcgtcgggcgttccacgctgaaatctggaatgaaaagactaagctcatatattgggagggccgcagcagaaaatgggctctgtcggccgggagtctctccagatcggctggccactcctgtctgcccccaccgttatcttggacttgccagcctcgctgtgctttgcctcccccccatcgtcctcatgggaattttaaagggaagcgcctgctagcagccacctctccctgccgcagctagtcagcatcttcagtcttgcactcccccctctgcaaggaagcgagctgcgcgcgcgatgccccaggtggacctggagagcctggtgtgcggcgtgtcgggcgccggcgccggcgctggtgacaggaaggtgtcgtgcgagacggtcatcgcggggggcagcggggacgcctcgccgccgccggacccggacttgccgcccgagtcgataaccatccccatcggcgacgacgcggcgttctcggagctgaacccgatatacgagcgggacgactccaccaagggcagcaccaaccccaagttcgcggccgccgccgccgtggccaaccccgtcgcggccaagacgcggtccaactccacgcgcgtcgcgggcgccccgccgccccccgcggccggcaccacgttcttcggcctcccggcgaggatccgcccgaccttcacccggcgccgcccgtcgcagggccggatcttgcacggcaagcgcgcgggcggcggcggcggcggcggcggcgaggtggagccgcggtcgcccaaggtgtcctgcattggcaaggtcctgtccgaccgggagcggcacggacggcgccggcgcgggtggtggtacggcgtggccgccatgttccggtgcgacggctgcgcccgtgtgcccggcggcgcgtccaggaagaaggtggcgctggaggacgatgccgggcggcggcggcagcagcagcagcagccgggcggcattgcgggaatgcggaggttcaagtccgggagaagagccgcatcgtggggagacgaggcgctggccgcggcggcgacgggggccgacccggacgagggggaggaggaggaggaacccgacagcaaggacgctgtgcagtggtcccggcggccggtaacttaggttgcggtgagggcgggaaacgattgggcgccgctggggtgggcccgctgtaagtgactgccgtggtcgccgataggtgagcccgaggcgtctcgagcagcacggtcggctttggctggctggctggtcgccgctcgatggcgatcgtagactggcctggcctcctagaactgcgagttttggagttcggtggattgtttctgcgtggaattacgcaacccatttggaagagcttgtttgttgaaacttgagctcctcggcagcggcggcctaccgctgtgtacatagcagtgttctactgcctcaagcaataacaggagcgcataatgtgcagtccgccattcgcctgtcttcctcttcgtcatcgcaactgttcttcaggcttttgcatgcggttgtgcttgtgcccatcttacttgaccgtgtgacccactcgtctcgtctgcccatctcgtaccgcacgaaatcgtggctctaccagggggctagctagctgctagtgtcaa

SEQ ID NO: 31297 - DNA, 2140 bp, Zea Mays
tatcttttttctttgtctgtttgtgctgctaagtgctaacacagtgctactttcattggcagattagtattttaaactcaagatggttaacttcgggaagaaattgatggctgatcaaattccagaatggaaaggatattatatcaattacaagttgatgaagaagaaagttaaacagtatggccagcagctccagcagggcgagaaagatcgtcgccgggttctgaaggatttctcgaagatgcttgatgatcagatagagaagattgtgctgtttctgttggaacagcaaggaatgttggcaagcaggattgaggagttaggaaagcaaagggcaatactacaagaccagccagatatatctggtattgctgagttacgagaagcttatagggaagttggtattgacctcatcaaactccttaaattcgttgatcttaatgcaactggcattcggaaaattttgaagaagtttgacaagcgtttcggctatagatttactgattactatgtgacaagtagatcaaatcacccgtactctcagctgcaacaggtctttaagcatgtgggtgtaggagctgttgtaggagctttgtcacgtaaccttgctgaacttcaagaacgtcaaggaagctacttatctatttatgatcagccatcttctgctcttaaggaccccatcattgatatgataaactcctcagttgataagttgacaaggtcaactaattttcttcgctttttggggcaacatgccttgattgtggatgaggagtctcctagtactgcaggagaggaagaaatagaagatcagaaataccatttcatgtcccttatgctgaacctggatgggttctgcaagagctgtcaaccgtcggtacattagtgattgtgtccctgcaagaatacgcatgcaagcttcggcaggattcgttagcgcaagtgcacttggcatggcctgtgggccagcgctagctggtttacttcaatggaaattcaagatctacatggttactttcaatcaatcgactctacctggttgggtgatggcagttgcgtggctattgtatttgatttggctatgggtctcattcaaagaaccgaaccgtgctactgaggtgaatgaagccccacaaaatcctgcttctggacaaacggttgatattggacaagtagagaatggacttgctcagcctctgctcatggattccgtagataaacaaaatgaagatgaagatgaagaagttgatgaaagtgaagaagctgcagatgattcacgcaagcctgcaacatcaattggctcagcatacagactgcttactccatcagtaaaggtccagttgttgatatacttcatgctgaaatacgcaatggagattttgctttcagagtctagtgttatcactaatcactatttcagttggaacacaagcgcagtggcaatttttctagcaatccttgggttgacggtgcttcctgttaatgctgttgttggaacatacatcagcaatatgtttgaggacaggcaactcctcatggtctctcaaattacgttgctagtaggcattatcttcagcttcaaggttacgagtacatactctgttgtccagtatgttgtctcagcacttgtcacatttgtttctgcagaagttcttgaaggtgtgaacctttccctcctatcaagcgtgatgtcatctcgcctctcccgtggcacatacaacggtggcctcctctcgacggaggccgggaccctggcgagggtggtcgctgactgcaccatcactgcggcggggtacctgggcgtggggaagcttctcaacgtcaccctgctaccatccctggtgatatgtgttgcgtccattgcctgcaccttcctgacgtataactcgcttttctgatggagcttcacaatgtatttgtgtcatcatgattcgttccatattagcgcaaatcaaggcagctgggagaccgccattgccattgcccgaaggggctattgtattactattattatatgttcgtcgatttaattgctgtaaattgattgataaaatgatggtagctactgaacctggtcttgccgtgcaaaattttgaccgactctatccttgtcatgaatacatgctgtccatattatggc

SEQ ID NO: 31298 - DNA, 1254 bp, Zea Mays
attgagcaaggagtatatagcgcaagttaattaaagctgagtaggaggaaggaattcagagtgacctgttccaccaggcgtccaagcaacccggccggctgggtggctcgtcgtcgtagaactccttggtggccgggcgcgcggcgaacgatcgcctatttcagctgctgagcgggcggctgatcggcggcgttccacggcttgggttacctaccactaccaacgacggaacggaaccggccgggccggcggcatggcggcgtggatgcggtcgctcttgtcgccgctcaggaagctctggatccgaatgcattcggcgcagaacaagaaggggcggggcatctacatcctgtacgaggacgtcaagtcgtgcccctgcgaggacgtgcacatcctctggtccatcctcgtcgactcgtcccactcccacccgccgccgctgtctctgcgcctcaagcactgactgactcgtccctccctccctgcctccgacgaacgagaccgtcggtgtacatgaagatgacgacgagtggcggcagctcaccttcttcttcagccgccgcgataccatatcgcttccacgcgcgggaagaagttccttttgtttgatgagtaggagattgatgagctccttcgttcaccctgccccgcgcgtcctccggtagatgcagccatgcaggtgcatagcagagcagagcagagcaggcttccctcaccgacaccgccaagggattttttttttcttctttcctttgcttttgtttttggaaaaggaacggcgcggttggtgatccgggacatgccgcgtgtgcctctagctaccatgtaaatacagaaaggtgaagagggggcaaaaaaaacagagaggtgtgtgtatatacggagagtactccactactaatactgtagtacagcgacgtgtgatgcaagctttttaaaaggatccgtcgtcacaagcgtgcttcgcgtgcacagctgcctcacacacagccatggatggcggttgaccctgtgggcgcacgtgtgggccgggatcgctggtggttgtcacaagcgcgcgtgacgacggccgacggccggtggcgggcggctttcgatcgcctgcgccgcgccatcgcatcgcatctcgcttcttgttcacgtcgtttgctaggttagttgccgtcgcctgaccctgacgggcgcgtcgtgcccgccgcgtggagcccagccgatccggccgacatgggacaggggaatcctcgcctcgtttca

SEQ ID NO: 31299 - DNA, 2206 bp, Zea Mays
ctctcgctgtctacgcccaccaacggatccgctctcccatggaaggaaactctccaccgcgtccatggaagccgcccggatctgcgtgcgcaccatctctctcgcccccgacccgtctctctcgctgcccagccacgttcgctctccaccgcgcagatcctcgcttcgcaatcaacgctcccttgacttaccagttaccacaccaacccaaccccgactctccatggaaggcgcgacgaccgagacccagctctccatggaaggcgtcaacatgccctcgtccccgctcgcccacgcatgcgcgcgcccacgtggctgggcagctcccgcaccctagcctgtgccttcgccacgccctcgcccacgccaacccctgcctctctcccgccgcgtccgcgttccggatctgtcgcctcccgccgcgccctgcctccctctcccaaccttgccagcaggaccaccgtcggcgatgcctccctcctgtcgcaccttacctcctcatcccgacctctccaccacgcccatgtccccattgtcgctcgtgctgggcccgtgccagactcatccacgccgctgatgtagagcgtgcgctaggcgagggggtgagtgcgtgaccgagatagaggctgcgacaacctccccggccaccttgccatctccatcgtcctcggggccaatgctggtagaggcactttggttcctggatgacctacaaggaatgggagatggtgggtaagcgtggggtgtagatccttccaggctcagatcgatttcttcgttcgctggtgagttacctaggcaagctgaacgggatggttcaagagcgcgcaagatcgatctaacaaaataactcagatctgtttgtgtgtcagctcgacaaacagatctgagtgtcagctcgacaaactcatgcttgttgtcggcacctaaaaaatagtgaagcgggtaatgatgtcaatttggtcttgcatccaactatttcaataaatgaaaatacagtacatgtcatagctgcattctgggtgccatcctcgatcatggaaaacaacattctctatcaaattatatctcctcatgtaagcagatgtagcctcttcttctgtagtgtgattagtttgaacattgatacagaattaaacatgcagtaggctattattctcttttatgcaggatggtgctcaaattttgaaaaatagaggtaggtgatccaattatattttactaccatggttcattgagaggcttgcttgtggacattccttttgtggtattttttctatatattgctattgactcatgtcataaatcagttagttatattttgctttgttgatggaactccatgaggtgacaacataatgtttcatttgcaaatttaggtgaaagtgaaggttgtttgcccctcataatgttccatgaaaccgaacaacagtcaaactgttagttgagcattccttaatgcatttggatcaattgttctcaatgcgcctgttggaatcaagagttattacctcagcttattcttagagttgtcacatattgccatgcccttcataagagttgagtgtcctacttccgggtgcccatgattggaaggtctcttgggttgattttctcagggactacacaatcactaggctggaaattagcttatacttgcatgagctcaccttgtcatttgtggaagcattcactgtctcctgataagggtgagcttcacatctttagaacagacacgttgaaggaaatgagtatccgagtaccaagaacgaaagaagagcttttggatataaatggcctctacaagtaatgcagctactctgccttttttgaatgaattatgtatgctgccatccttttgttttcaaaaagggcttggtcccggtttgttcctttctttgttttttctcgaacgtttcttgtcgcggtctcatggtggttgctataactcaatctccagttcacagtagggttgaacaaagtataaggggcaggttgactcttctcacttgaaacgaaaattgcaggggctatgttgtgtaatggtaatatagtgtcacatcaaaccattgtccctgactcagttcatgctattcatgtgtgacatgtgtccagactttagagatcagatactatatgtggcttgtgtttttggctggtcacatcccctcttttctttttctgatcatatcattgcatttatgtg

SEQ ID NO: 31300 - DNA, 260 bp, Zea Mays
tgccatttgattttcggggaagaacgtctaccatcaatgctattgatgccattacagggaagagagaaatggcaagaaaatgaatgccgtgggcgaggtgcgtcggtgtaagggcaggacgcggtcctcggcagcgtcggtcgggcgcaggcgcatcgggcgtcgaggtctaggcggcttcgcagtcggagtcgggtgtcctgcttcggtgctcggcttttggtccggctctgcatgcggtactcggctcggacgtcgcg

SEQ ID NO: 31301 - DNA, 1680 bp, Zea Mays
cctcctctcctccccctccgcctcctgctctctctcgcctctggttggcagagctctcttgaagcctcgagactcgtctcgccgctgctccctcagctctgccgctgcgtgcctccgttagctgttgcattgcagcgcagccccgcgagccttgagctgctaggtatgctcgcgttcttggccgctggaaatgtgggtcagttcagagctctgatgaactctgcgccgaggatgggaaaaaggacgggattgcttattagatttgaaaatcgaaatagtgatttagtttttcagggttctagaaagaatgataaaattttgagggggcgtaaataatgacatgaccgaatcggaatttggcttggaattaattatcgggagaagtgttcggactgcctgctaatctcgattcctctctgcagctcgcccttcaccacagtcctcagacatggagttcgaagaccgctgccacaaggtccaggagcccaagttcgactgcctgctcttcgacctcgacgacaccctgtatccgctgagcgccgggatcgcaggccatgtcaagaagaacattgaagattacatggttgagaagctgggtattgacgagaccaagatcgagaacctgggcaatctgctgtacaagaactacggcaccacgatggctggactcagggccatcggctacagcttcgattacgatgagtaccacgccttcgtccatggaaggctgccgtacgacaacatcaagcctgaccccattctcaagcacattctcaagaacctgcgcatccgcaaactcatattcaccaacggtgacatggtccacgccgtgagagccctcaagaggctgggcctggaggactgcttcgaggggatcatctgcttcgagaccctgaacccgccctgcccgccgcagggagaccaggagcccgagatcttcgacatcgccggccacttcgcccgctccggcaccgccgacgagctgcccaagacccccgtcctgtgcaagcctaacgtggacgccatggaggaggcgctcaggatcgccaacgtcaacccgcacaaggcgatcttcttcgacgacagcgtacgcaacatccaggccgggaagcagattggcctccacacggtgctggtgggcaaatcgcagcgggtgaaaggcgcggaccacgcgctggagagcatccacaacatcagggaagcgctgccggagctgtgggaggaggccgagaaggcggaggacgtgctctaccccgaacgcgttgcgatggagacctcggtcaccgcgtaaaacccctgaatgcctccggtgcaccgtcagccgaactttctcgacatctccaggaccgcatcaacgatcacatgtcactcgctccccgagccagggccggtgatgatctcgcgctggaactgaatccaccagcaatggccgggccgaggatcgatttccgacagcaggaagggtgcagcatgtaaagggggaacagatgagatcatgtttgtttgggttggtcccccgttgtatatgtagttatgtatcagccagtcctttgtttgtaaattaccagtatttagaagtaataagaaaatgggggtttacgtgtacgtttcctgtgctctgtcatctgaagcaataaaactggttagcaagaccggaagagcgacatatttgtttctctg

SEQ ID NO: 31302 - DNA, 1288 bp, Zea Mays
ataaaaatgtaataaaatagtccaatcgccttgactaccgcttccggttccggatccgaatctcgccctcccctctctttcttgcctccaggtccggccgtccgggcggcgccgggaggagagaatggcctccacggcgtcgccgccggtgttcgagagggtggccgggatccgagccattgccgagtccggccgcttcaaggcatggttgctggaccagtttggcgttcttcatgacgggaagaagccgtaccccggcgccattctggcattggagaagctagcggagaatggggcaaagatggtgataatcagcaattcctctaggcggtcatctgtgacaatgaagaagctcaagagcctggggttcgacacgtcctgtttcctcgcgaccatcaccagtggggagctcacacatcagcaccttcagaagagagacgacccatggtttgctgctcttggaaggaagtgtatccatatcacttgggacgatcgaggggcaatttctctcgagtcttgaggagcttgagcaggttctaatgcttggcatagaaaagcgacttccaatggtggtagctaatccagattatgtcactgtcgaagctcgagatctccgtgtcatgcctggcactctggcagctaaatatgagagtcttggtggtgaagtgaaatggatggggaagcctgataaggtgatctatacatcagcgatgtccctagcgggcgttgatgcccgtgaatgtatcatggtgggtgattcgctgcaccacgacatcaaaggagccaatgcgtcagggatggcatccgcgttcgtcactggaggggtccatgcggacgaacttggactcggtgaatttggagaaactgctggggaggatgctgtcagttcgctgtgcagcaagcacggatcgtacccttcttatgttctgccttcattcgcgtggtagagatgcggcctagaatttttttttgttttaggtgcacgggaaagtgattttaggcagatattgttgttatggaaataagtgccacgcaatgatcaagccgctggaggtgtcattcttcttaataaataataagtgacacgcaatgctcaagccgctggaggcagatttgtatttgcatttgtagtgtgtgtgtgtctatatatgctgcctgtggtgtatataccgcctgtgctgcaatgttcggttgagactttagacagcgatactgtatgaaggattcacattgttctgctcaattatgtaaacccgctctattacttttcgtggatgctgctttacgt

SEQ ID NO: 31303 - DNA, 2959 bp, Zea Mays
gttcgttttggtaacagtcgctagcgaaaaagcatccgcccacctcccctcgtctctctcgcgctccgccgccgcgcaaaactgtctggtgatgacgaacgccgccggtacggcccctcacccgactccgccgacgccgctccaacaacaacagcatcagccacccaaggaccagcagcagaaggcgctggccttgaacgcattccgcctgaaggggatcggcgaccgcatcaggttccacctgaagggcatgagcgtgcccccagtcgccgagttggcccacctcatctacgcgttcgccagagggattgacttcgcggtctcagctggtgatattcctctgacagccggtgacatacccgagattctgagaaaggtatatgagctgaggaaagaaacaattatacaatcttcgcttatgatactagcgatctcttgcaagaatgcttgctccaataaatggtttcaacctgcagattccagagacattcttagaatggtcaatgagctctctggcaacttctgcacgtccacaggccaggcagctagtgacagcactgtgcttgaaattatatcacaaataatgccaaggtattaccctcggttgaagtttgagcgcctaatcacttctattgaagcaaaggttggctatgatatattaatggctgacttctttattgagaggagcctatctcgagatgaaaagattagactaattgtcgtacaaaaggaaaatttagatgcctcatcatgtgtctcaagtccaccacatgtgagctttttggtcaatgggaagggtgtggacaagaggactaatgtttcaatggaacaaggaccccagttacctactgatatcaccaaaatgctcaaatatggggctaacattatccaaggtgttggatattttaatgctaattatatcatagctgtagcagttgtgaacgatttgacatccttcagtgctccaaaactggatgactatgcacaacctatcactgtttatcctgcagattctgatgtacttgagggaccatcaagagtttccctaaattgtcctataagttttaggcgcataaaaactcctatcaaaggccgtctttgcaaacactatcagatgaactcaagaaaaccaaactggcgctgtccatattgtaacacctcctcaagcttcactgacctacgtattgaccaaaagatgatgaagatactagaagagactggagatgatgtcactgatgtccttgtatttgctgatggatcttggaaagttgttccagctcaggatgaaaaatctgatagacatagaggtgacacaattcagcaggctggagatgctgtagaaactggttcaccttctcgagatgtcatagatctgataaatggcaatgatgatggtgatatgcaaatggattgggcatcggctccagaagattcaaagcctgtgttgaatagtcaagatttgtctgtatcagactatcttacagatttccctatgacagctcagacagaagatctgaatcgaggggatggaaataatgggggaagcaacatggcttccacttcacgtcaaaatttgttactacctcctactagtgggctgggctcaagttcattagggaccttggaatctattctacctcaaaatgttctgcaccctgttatcacagatgcagtctctccttctcttgaaacctcttcagcatctggcatgcaacatgtttcacaggaaacacattgtggaactgtacagctgcagccacaaataggtccagtacatgggtccgaagtgagaaggcttcctatacctagaaatcccaggagagagccaataggagtacaggggttgacggttccaccacagaatcctgggtcatcaacaaggttgcagccaaatattctcaattgtccacctcctatcccgctatctagtccatcctcttcaacttaccaagcacatcaagtgaagaatccagacagtgtcattgcttcaaggaacagtggtagtgggccattaccaaggactcctagcgtcgctgctgcatcattgcacctacagtcgacagcacgggatattcgcaacacatcgagccatctacccagtcgagttgttggtctgcctgcgccacacctcatgggtgcacgaccaccaccaggaatttcagtgcaggctggaggagcgaacgcctacagaactatgcaacagactccaactatggatccactgaggcacacacggatgagcatgaaccaaacagcactggctgctgccggccaaaccaccgctgccgcgtatgtccgaccaacccaagcagacatccaaaaccatctctttcctgtgcagcaaagccaggcaccacgatcgcaacaagtgccacgaacaacaaccccgcctctacagcgggcgccaccgcacctgcaacctcccagtgtaccaccgactgttccaagcacacctcaggctggaccttcgcatggtcttccaccggagctccctgtggatgatagctggcgccccacgggacagatgagagggagtctgacaggcaatgcttacagttctgcaattaggcactatcggggccattctgagcagcagcagggcgagcctcggcctcccaacacttcaggtgcgcgaaggcctcagtaactgccagacattgcggcgttgccctgattatcaagcagggcttgggcagctaatttaccaagagattttaatttattatcatagctaatttggcgctatgatgatctatgttagtgtaggtaggggagcctagtgagtagtgatagtgctctgcttgtctacaacgcactctgatgttaaattagtagtatcaggtgaaccatttgtgtacccaatatggaacgtggattttttatgctaatgttttgcctgtgtaattggaccgattttcatgtgaaattcctgaacgattcccatgaaaatgaacaggta

SEQ ID NO: 31304 - DNA, 2374 bp, Zea Mays
atccggccaccgagctagcacgacttgacgcccacactgccaaagtgccaagtgccactgcccctgccaccagcccaccaccagacccgccaccttcgcgctccacggcagcggcatgtccgtcgcctcctcccaccgcctgcgaccgtcgccgtcgggcccggcgcggcgcccgggatccgcggcgccgcgcgtagcgttctggccagccggtgcctcgcccccgtatcgcggccgctgcaccgtcgtggcggcggcggctgccgctggcgccggcggcgaggcatcttcggcccccgtggctgtgtcggctgtcgcccccgcgggcgctgccagggacaaggtgcggcgccacacgatttcggtgttcgtcggggacgagagcggcatgatcaaccggatcgcaggggtgttcgccaggagaggctacaacatcgagtcgctcgccgtggggctcaacaaggacaaggccctcttcaccattgtcgtctccgggaccgacagggtgctcaaccaagtcatcgagcagctcaataagcttgtcaacgtcctgagtgtggaagatctatctaaagaacctcaggttgaaagagagctgatgcttataaaactaaatgttgaacctgatcagcgtcctgaggtcatggttttagttgatattttcagagcaaaagttgttgatatatctgagaaaacacttaccatggaggtagctggagatcctggcaaaattgctgcagtgcagaggaatctatggaaatttggaatcaaagaaatttgcaggacaggaaaaattgctttgagacgtgaaaggattggtgcaacagcccgtttctggcgattttctgctgcttcttacccagacctgatagatgcgttgccgaaaaatccacttacatctgtaaataggacagttaatggcagttttggtcaaccatccaatgctgggggtgatgtttatcctgtggaatcttacgagagcttatcagtgaaccatgtacttgatgctcattggggtgttctggatgatgatgatgcgactggacttcgctcgcatactctctccatccttgtgaatgactgtcctggtgtcctcaacattgtaacaggagtctttgctcgcaggggctacaatatacagagccttgctgttggcccagctgagaaggaaggcatttcgcggattacaacagttgttcctggtactgttgaatccattgagaagttagttcagcagctttacaagcttattgatgtgcacgaagttcatgacattacccactcaccttttgctgaaagggaacttatgcttattaaggtttctgtcaacactgctgctcggaaggaaatcctagatattgctgaaatcttccgagcaaaacctgttgatgtttctgaccacacagtaacgcttcaggttggcatcctaacagtttgtgtgtttctcccagatttccatcggttcctttgcacactgcacagccacaagttatatcacattgcttaaatgtttattctgcttcatagtacccgtttgtggtaacagtaacaacatcatacccatgaagaaacactgaatgtttgatgccgcttactggagatcttgacaagatggttgcactacaaaggttattggagccatatggcatctgtgaggtcgccagaactggacgagtagcactggtccgcgaatcgaaggtggactccaagtacctccgcggctactctcttccactgtagccttgcagtcgtgatgatgatggcaccatgaagagctcggctggttgtttatagagcagaccatctcgcgctgggttgtgttgtgcgattacaggacttgtttctttcatgtcgtgaactcccccggcctgcgtgtccaataacgcgtgttgaggctgcatgtgtattccaacgactgtcagaataagatgcatatcgtatctgtttacttcagtgaagagatgcatggatcgttcgaaatcaggttgcccacgtttcgtagtggaacatgtggagccgtggagaagaggaacacagattgcatataggatattagctgcctctatttcagcctctggttaaatgggacatatcagctgcgcatattaaatcgtatccatttattttatatctaaagcctgttctgtatatttttgcaaagaacaacttggagcaggatgaaagtggtacaggataatgatggaggggattctttgcaaaatatatagcaacagatgttagatccaagatgattgggcatgatttaatatatgcatcaaagtgttatgtgcatctgatatgatacattttctttttaattatgggactagtatcttattcggcgcgctggaatgcaagaagaattgagttggat

SEQ ID NO: 31305 - DNA, 1367 bp, Zea Mays
atccaccaccacccctatccccatcaacaacgcaaaaacctaaaccgctcgctctggtccatccagatccacagtcgccatcgcccccacctctcgtcgtcgtctccgtgcaccactcggcccccactgtcggccgcgcctcccagccacctcgtgccgctctgccaccccgcccgtcctccactgcccctatggctgccatgggcgagcgctgcccgagtagccgaccgccctttccccgccgtcttcagctgccgcgcgctgccccgcctccccgccaggcctccactgcccacttctccggcggctacagcggaaggcaaggagaaggacagcgggcagcggtagctggatctagcaagcacagggcgtcttctccatccgccacctctcggcgcatcatcagctgagagtttcaggcatttgctcaggtgttttcatttcataatatagctactactattttaatgatgggtaagagattaggtggttgtactgtacaaaatattcatgtgttttactggccatcaagtttcccttaaattaatgcctaattgcatttgttggggttacgtactaatgccttgaaaggactgtgtaatattccagaatattgtgttcattttcataagtaaaatttgtttgggtgaagttgatttttcacatatatttgagatctgtttagacaagccttgatgaacttggttgtttagcatagttcggctttcacaaatcacaatgtttagaatctttttatacgcatggggcttatatgatgaagcttcactgctccactactatttgacatacaatatgtttagaatgttttttataattgagctttcacaatgtttagaatcttttattcttataatgtatgtttttatgccacgtactcatagtttttacaatcagttgcttatgatccttcagttcattaacgaacttttaggtggttgtgcttgatcggtggtgttctcatgccttctgttttgtggctgtaggatatcaagaggagggaagaggcgctgaagaatggtgcagatacacatttgtttttgcataattgctgccatagctccaccaattgtatttcatgggaaatcattaacatatttcgttccctccgttgagaagatccagcaactccttgtgctatgtagccccctttgaagataaaaaaacttctgatagctgtgttgtgtgattaaaattgggtctcggaggtattttgcagaactaccactatgttttaatcttgtatgtttggtctgtcgatcttgttgtcattactgaaggagttttgatctgataccacatctctggtagctacaaacctacaagctttgactaggccgatacaaagt

SEQ ID NO: 31306 - DNA, 399 bp, Zea Mays
cttccacataatccaggtgaaagacaacctattgcaagttactatgctaatgatcacgatgcaattcgaagggcatatattcttagaggtccatttcaaccatatgcacatgaattcccaaataggaaaattggagatagagatcgccattttaattttgtgtggtttcaaaattttccttggattgaatatagtgtcaagaaagatgctgcattttgctttatgtgctacttattcaaaagtaaagcaaataaaggcaaagggacttttgcatttacttcagatggttggaataattggaataaagggtctgaagcacttctaaaacatgtgggttctatgtcacataagacagcagaagagaaatatcttggctttataaatcctaatgcagcaatt

SEQ ID NO: 31307 - DNA, 275 bp, Zea Mays
acacatcacaaaggaaaaaagcaaatcagcaagtcaaaatagaagtacgttatattacaacaaaaaaagtactagggagcttcaacatagacggcaccaagtgtttactatccgtgcatcatctcatcataaatttgttcacatattttaaaaactacactgtctgtagccctcttcgtgaccctggcagctatcgctttggcttagatggcaacatcttctgcatcagcttcattgtgttttacttcaatgattacctatgaagtagaaacttc

SEQ ID NO: 31308 - DNA, 1365 bp, Zea Mays
cctggtaaatgagcccgcacgctgcctcctcctgtgtttccctctcccaactcgttagctggagcaggaatttcctcgtgtgcactatcgtgtagccaggacaatcgatgcatctactctgacgacactacgagatttggtcccaacaaagcttgctgcttccctgtggaattcccttgtcagatttaagtcaacgatacctgaatttccacaaacagaaacatgtgaactacttattgttgaccggtcaatagatcagattgcaccaattattcatgagtggacgtatgatgctatgtgccatgatctattgtgtatggatggcaacaagtacgtgcaagaggttccaagtaagaatggttcagcaaatgagaaaaaggaggttttgttggaggatcatgatccagtatggcttgagctgcggcatgcacatatagctcatgttaatgaaacgctacatgaaaagatgaccagttttgtatcaaagaacaaagcagctcaactacagcaggcaagatctggtggagagttatctaccaagcagttgcagaaaatggttcaagctcttccacaatacagtgatcaaattgacaagctcacccttcatgttgagattgcaggaaaactcaataacataatcaaagaacaccaccttaaagatgttggacagctagagcaagatcttgtgtttggtgatgctgggacaaaagaactaatcagtttcttacgaacccgcatggatgtaagtcgtgaacataagctgcgtttgctgatgatttatgcttccataaacccagagaaatttttcgaaagtgagaaaggtgcaaagctgatgcagcttgcaggattatctgctgatgatatgattgtagtaaataatatgcgctgcttacgtggagctgattctaagaagtcttcagttggggcttttactttgaaatttgatcttcagaagaaaaagcctggtatcaggaaggagcggactggagaagagtcaacatggatgctatctcgattttatcccatcctggaggacttgattgagaaacttagtaagggtgagctaccaaaagatgagtaccactgcatgaatgatcctagtcctagtttccgtggaattccagggagcacatctgctcgaacgagcccagctcatcagccagcccaatccatgagatctagacgaataggtggcacatgggctagacctcggaactccgatgatggttattcgaggtacgtgcaacctagatgtgtgaaaggttatcttctccagttgtttgttgttgtatctatacattgacagtgtcttgctcttccaataaaaaattccctcgattccaaattgtaagtcgatttttttgc

SEQ ID NO: 31309 - DNA, 1662 bp, Zea Mays
caaagaaattgtttttcttaacgatcacgactcgcgcaagccgcgagcacgacactagtgacacatgagctggggacgggagcgagagattatacctaccttgtaagctccagcctattgctcgacaggcttcccacataatgccagtgctgccgttgctgtccgcaaagccatcccctccctgcacgccccctcggcccggtggtgagtggtaggcggccgaagaattccagggtgggtggggagcgcccggaccggagacaaggaagatcgaggcatgaaggacctggtgtcgtgcttcagcgagcacgccgtgcggatctccgacgtggcctgctccggctccggtcccgccaatgcggcggcgggcgccccggaggccggaggaggagggcgggcgccagcggtgagcgcggtgaccaccgcgtaccggtcgcggctgtcggcgtccgggaaggagctgctcatcgacgtgacttggtcatggtctcgggcgcccgacgggcccgcgctctccgtcgccgtccacgaggcggacgccgtctcgcgccaccgcgccgccagcggcgccgcggcgccgcggcacctgcacaagaagaaggggagcgggacgttcacggcgggcagctgcgtggtgggcgtgttctgggactacgccgcggcgcggtacggcgctggctcggggcccgagccgacgtccgggttctacgtcgccgtggtcgccgacgccgagttcgttctcctgctgggcgacctcagccgcgggtacgtggaccgcctgcacgggggcatcccgatcgccgggtcccggatggcgcggcgccgggagcggtttgtcgggtgcgggcgctggtccacgagagcccggttcttggagtccggcgaggagcacgagatcggcgtcgcgctgctggacggcgacgcggaggcgtgggtcaccgtggacggccgcaaggtcgtgcagctccggcggctgcggtggaacttccgcggctgccacaccatcttcctcgacggcggagcgccagtcgacgtgacgtgggacctgcacggctggctcttccacgcgggcgccgagtcgccccaaccgtcctccacttccccctgtgccgtgttcacgttccaggcgcgcggcgcgtcggagacaaagctgtggacggacgacgattgcttcgacgacggagaggaggcggacaagctgccggtgacgccgagcggtcggcaacagaaggcgggaggcggtggggcgtcggggtcggggcaggggttctgcctgctgatccaaggctccaggagcttttccatgagcacttaacctgtacatgccgttagagactttctatcgccattttttttcacttcttgcttggggtttgtgttgggattgattaggaatttaggatagacattcagctggttgactcttgttgattaatctgatgcatgacaaggggtgttgtgattgtgaatagttgggatagtgtcagagagagagagagagaggttgacacacagaattagaaagtgatgttgtctttccagtttgctgcatcgctgtgctgatttcgtacaatgacatgattgtaagttctgctagttacttatcagaaattgagaaacacaccaaagattggatcttacgattactgtttacatctttta

SEQ ID NO: 31310 - DNA, 2800 bp, Zea Mays
cgaaattaatgcccatacccctctcattgtcccatcaaactcgctactggcctcgggcccgcccgtcgtgaggtccgagctcgatgcagccgatccggcggcggcaccgaggctttgcactcctctgtctctccgccgccctcctcgctgccgccactctgctccccggcgccgccgtcgccgaaggtgtcacgccctccgaggcgcgccggctccgcgacgaggtgaaagatatgttctatcatgcgtttgatggatacatgaagtatgctttcccactcgatgagctgcggcccttaagttgccaaggtgaagactcccttggtggttatgcgctcactcttatcgattctttggataccttggctttactgggtgataaggagaaatttggtgctgctgtggagtgggttgaataaaaccgtctctgtttttgaaaccaacatacgtatccttgggggtctgctatcagctcacctgattgccagtgattatgccactggtatgagaatccaatcttatgatgaccagttacttcatttagctgctgacttagctcagaggttgttgcccgcatttgacactcctacaggtattccatttggatctgttaatttattgtacggagtcgatgaaaatgaaagcaagataacatcaacggctggtggtggtactttgacactggaatttggcatattgagtcgcttgactaataatactgtttttgagcgagttacaaaaaaatcagtgcgtggaatatggtcacgcagatcaaaactcaatcttgttggtgcccatataaatgtctttactggtgaatggacacagaaggatgcaggaattggcacaagcattgattcattctatgaatatcttctaaaggcatatttattgtttggagatgaagaatacctgtacatttttcaggaggcttacaaagctgccatgcactatctccatcatgatccttggtacgtggaggttaatatgaactctggtgctactgtttggccactcttcaatagtctgcaggcattctggccagggcttcaggtttggttacacatatttctgataattgatgtggctttgtcgcacatattctagatgattgcttatgctgcttagatttaaggttttagctggagatgttgatcctgctattcgcacacatgctgccttcttcagcgtctggaaaaagtatggttttacccctgaaggttttaatcttgctacatccactgtacaggtaatgaaactgttaaactataatagtcaagagtattagcataatctcctatctaaggtttgccatttgcctctcattatccctaacaaaaacaatttttaccaaaccttatggaaggatgcactctaacccttgaacttcaaactctcatattaggcctttctacaggaaaaggattgtagataaattgtatgaatcgattgaagggttaatttttttcctgttgccctgtgatagctgggtgcacaaaagttgaaggacagaagagacttactgatttatacctgcactaatatttgctgttttcaacaattcatagaatggacaaaggagctacccgctacgaccagagttgattgaaagcacatattggttgttcaaggctaccagagattacagataccttgatgttggaagggacatattagcaagccttcaatatggtgccagatgcccttgtggttactgccacatatcagatgtggaaacccacaagcaggatgatcacatggagagttttttccttgcagaaacggtcaagtatctctggcttctttttgatttagctgctggccctgacaatattgttgaaaatggaccatataagtacatatttagtacagagggccatttgttacctgttactcctgagatagccttggaagatgaacattgttcatattttggagcattctgtaatggcggtgccgaccatggatatggtgctagtgctagttctactaagcatcgaaatggaaactatacccaattagatgatattcaaaccccttccagtcactattcaatgtccaatgtgttgtttacgccaggttacatcaagggagtttgtccaggattgactcatgcgcagaaatttgggatatcatactctgatgaagaggataactttatagagcagacttctgagagtcttgatcatcatggtgaatctgccatagaatctagcgtccaagaccaatcaagttctattatattgatctctcacccagtcgcaagccaacaggatgaggcttttgagagcgagtctggaagtcaagatcatgcaaatattgttgtaacttctgattctgattctgattccacaagccgtgataatactgttggctctcccggaatgaactcggaagaacttatggacgacatatagggcacctctagacaggacaaaagatgaagaggttgctcacagtgttgagtccaagatatcagctgaccctttgctcatgtagcaacccatttctgtggaatcttcagggtcaatggcttgccgaatgcagaacaagttagcaagcaagcaaaatgtctggtagacgattccagtatcttgccagcttcaacatcggaaattgatatttactttcagatagaatatattacagggcgtacattcactaatttgttcttttttttctgtatcgatcactaatagatattattttgattaatagagaatgcacgagttttgtacaccagatgcatatgaagaggcgcggcacacatcacaggatctatttagtgtagaacagaaca

SEQ ID NO: 31311 - DNA, 589 bp, Zea Mays
atcataccgttctcggtggcgacagcagcactgcccacggtgacccacggcccgactgcctggatgaagaaccgatgagaaattccgccgcaccgcaggcctcagcgctggattaggcccgtgtacacgatctaccaaccctgtagaatgcctggaaccgcacaacggaggttgggaggcgacgatggctacaatcaatggcggcgttgcagattcgcacggctacagcgagcaattccccaccgtccagccacacatcaccccctcgatgcggacataagcaccacccgagcggctgtacgccatgatgaagtactcctccacatccggccgccaccgcagcctcaggctgtatgtgtaccgtgccgtttcagcagcttccggctgtaccgccaaggggggagtgggagtccattaatggtgagggccgccggttgcgagccaaaggcggatggggaggtgatgtaggactaggtagggaagaagcacggaacgacgagcacgaggcagaagaatcgagcacggaggtggcggctcgagatggcagaaaaaaatgaaaaggaaagtctagttctgcatttaagcacca

SEQ ID NO: 31312 - DNA, 2372 bp, Zea Mays
gtaggattccgggactctactgcatggccgaaggctcgaagcccattattataacctatcaacgggcctattcagatttcagaggtcgatacggaaccctaggcgtctatccattagaaaattggactgattgaccgcaccgattccgcgatacgttcccgaatccaacccatcttcgtccgctccggccactcgtttcgccgccgtcggtcgccacccgcaaggtttggaggataagattcgggagggatggcttccggtgggcagccgcagttccggtacacgcagccgccgtcgaaggtgctccacctgcggaatctgccgtgggactgcactccagaggagctggtcgagctggggacccccttcggcaaggtcgtcaacaccaagtgcggcgtcggcgccaaccgcaatcaggcattcatcgaattcggcgaccaaaatcaagctattgccatgatatcatattacgcatcgtcaacagagccagcacaggtaagagggaaaaatgtgtaccttcagtactcaaatagacaggagattgtcaacaacaaggcaactggggaaggttcaggcaacgttttgcttgtgggaatggagggtgttgcaccagattctgtcagcattgatgttctacacgtgcaagccgttgtcacggagtatcatggcaggaagcatctggaacacatgtattttctgctttcggatttgttcataagatcgctacctttgagaaagcatctggttatcaggctttgattcagttttctgatgctgaaactgcaacatctgcaaaagctgcactggatggtagatgcattcctagctatttgctaccagaactggatgtggcctgcactttgagaataacctattcagcacacagtgttctcaacgtcaagtatcagagccacaggagtagggacttcactaatccttaccttccttttctggactctgctaaagatggctctggaccggatggaaaaaaacaggaagcagagagcaatatactgcttgcttctattgagaacatgcaatatgttgttacaatagatgtgcttcatgaggtcttttcagcttttggatttgtacagaagattgctatttttgagaagaatggctttcaagcattgatccagtatccagacattcaaactgcgtatgcagcaaaagaagcactagaagggcacagcatctatgaaggtggctactgcaaactgcacctcacattttcacgccatactgagcttaatgttaaggttaacaatgagcgaggtagagattataccaaggggaatgccactccaagcagtgatcaaccttccattcttggtcctcagccaataccaagcgttggtgctgctattccaccagcacagggtagtgttccttctgcagccaccaattcagtaatgccaccaggggatccatcagttgctctaccttctaatccttccagtgagccactcctgcaagcacctgttgtttcctctggagggcctccgcattaccctaatcaggccatcctacaaggcccacttggtgttgttgcacggttcccaggctatggtgccctgcagtttgctcagggctcagctcaagctcaaatggtgcagccttcaggccaaggaagtcaacatatgtcaggtcatgtaaattatcagctacctccaggttcagcccaattcatgcagtatctcagcaacggaagccatccacttccaaacgcacctgggccacagacaatgccttaccctgccctcagtgggcagcagctacctccgggtcttcagatgatgcaagctcaaggttttggaggcctgccgttttcacagggtcctggacaaccaatgccacagttcccaatgtatggcacccagcagtttcctccgggtatggagcccaagatgatgcgcttctctgagcagggaggccagcagtttacatttgcgccgcggggtccaaatagtcgttagcaaatttgaacttagcaacgttagatcgttgatggtgatgaatggatgtcaagccttctatgttgctgttttctaaggtgaataccgatgctgttccattactaggatctatacttggtttatctctcgtactgtggccaaaacaaatgtctaatctgaggtttcgtagccttgtatttgtatcgatttcctcacgcccgcagcttctgcctgcactgtgttacattacggttatactgcagtagtggaagcaaatgtaaaagaaacctagagacctgatgtgccaggttgaaagcccgtagctgcaaactgtaggctcacatcgcgtccagttataaatttgtttgtgctatgttaagagtacaattgtacaaaccaaggtttaggagaacc

SEQ ID NO: 31313 - DNA, 2058 bp, Zea Mays
cccgttcctatttttcctaaagcaggggcagggcaaaccgtattgttggcttcgcctagggtctcccttctactgtcgccgcaacctgaccaacctcccttctactgcccgcctagggtctcccttctactgccgccgcaacggcgcaacctcccttctactgccgccgcaacctcccttcttcgagtcccatccgacctagccctgcaacccgccggacgacgagcagtgaggcccgcggccgagatggaccggtacctgacggtggagcggccacggaacgagtcaaccatcgaagagaacgggatccgcatcaccgcgcagggcctcatctgcaactatgtctcctacgctacctccctcctccaggtgcctgggcttgtcctcaccatcgccgtcgtatcgtattgtacttaggatgcgctgttctgttcgagtcccgtccctgtcgattcgaagagatccccagcaacgtgagggaggtgttcctgaccggccccacctccaagttcggcagggccatcgcgctctacctctgcaggaagaagatcagagtcctgatgttcacggtgtcgtcggagaggttcctgaagatccagagggaggcaccgccggagtaccagcagtacctcgtgcaggtgaccaagtaccaggccgcacagaactgcaagttgatcatagttttgcatgaactattggcgttggctatctaaaaggacagaaaggcagacatgagcaacagatcccgctccatgggctgaaactgggattcgtgatggcaggcgcccctcttagtcgtgtgtagggcgagctgctgccatggtggctttttcttgcgggtgtgagctccgctcgccgccggtcttggacgccgtggctaggctcctaccacccctccctccacccgggactccacgctgccaccgccacacgacagtacgcatacactcttcttcctcccctcgctctggatggctggcgtccgctccctcagcgcctccgcccatgcccggctcccgcacttgccggctccccgatggagatgaatgaagaaaggaagatctgcaagaataaagtcgaggcggaggcttggtttactggtcttagtgccttgatatgtcgaagacagcatggatcccaggtccaacatatagatggaatccggattgctggacttcctattgattttccaagatcggagatgcaatttcatactgtgcaaaagcaatttcgctatgcaagtcacgcatacagaacctgaaaagttccaaggatgctttgttggatggtatagatggtggtgatgcatctgctgctgaagctgaaggaggctcagaaaaatctaccattgaaaaagagctagagcagcttactagcatattgcctgatcttgagaagaagcttgaggacctgtctgaagcaaacccaagcgctgacatggatgagatggtgaaggcaattgtgtccagggtaactgaagtgatgccaaaagctgcatcttttacttcttcccaaatagcaacctcaagcaatggattcgactcctcggttatgtctacgacagcgacaactggaagctctggaagcactgtgaactgaccttggggttgtaggcagaggcgtcaaacgagctagcatcaagccgatctctgccaaacctgttgctaagaaacctgcacttgattcaccatctctccaaggtgacaacagcatcaactctgaggttgtccctgcgacgcagactgatgaatccagctaaagctctacatttgaaacgaacgctttctgacgggggcacggcgataacacgccttctattctagtatgcttagatagattcaatgttagcgcaaacgactgatgataagtttttcagttagtattttaatttggatttagagtacacttatgtatgatttatttgacaatgcttatttatgagacattgaattgtacttatctatattacattaaatatgatgttattaaatatgtgtgtatgtatatttatcttttaaattattataatgtgacatctcaaaaatgattataaattga

SEQ ID NO: 31314 - DNA, 1071 bp, Zea Mays
gcgcacccttctttctccatccacttgtgtactttcgacgtcgtcttcctcagtagcgcccccttctttctccacccgccgtcgacgcagctgccttccagccatctccatatccgtttcgccgtccccttcctcctcatcaggtaaacctaattcccttcctctctccccatcaattcgcccctaacctaattcgtgctgatgatctcccccgaggacccgcgcaagtggctcgtcaagcgcgtcgtcgggatgcatgggggctccgtcacctaccttgtcgaccccggcaacaacgactcctcctccagaaccgtcgtgataaactacgcctatgctcgagacaatgaaacactatttgatattattagtgtgaagatgaacctctcaattgacaagcgatgcaggataaataatttgtccacaagcatgattgcattatcctagttctttcgttgcggagatggcagcggcggcggggccgtacaaagagatgctggaagtggtgaacgcgtgcgcgacccggatccggtggcgcctcagtccagcttccaagcgccgcctcctcaacggttgtgctgtggttgttgatgaacaaacccagttgttgccaaatatcctgtttctctgcactaggttgcgtcctgtggtactggtcgactatggtggcacaatgcctcagctacaagaaaatctttgtggcctgctatatcttgcccgacagttcaagctctacaaggttaggtctgttcagtttggctagaaaggcatcccctacctgaacacctacgacgaccgcaccatccgctaccccgaccctctcatcaaggccaacgacaccatcaagatcgatctggagaccaacaagatcatggacttcatcaagttgtatttgccctttcatggacttcatcaagttatatacttagttaggctcaatgttagcacaaacagttgatgagcaagtttaaatttagagtacacttatgtatgagttatttgacaatgcttatttatgagatattgaatattatttatctatattatattaattatagtgttattaaatat

SEQ ID NO: 31315 - DNA, 1019 bp, Zea Mays
ggagaagtaccaaactgggctgaacccgcaggagaaggtgaagctagagaaggagcccatggggcagttcgtggatgacgacatcagggacctgcctagatctccatggaggagatcgacgctgccaagctcaccaaggacgacgtcgacgtccgcctcaagtggttcggcctcttccaccgctacaagcaccagtgtacgcccactaactctacaccccctgcaatggttgttgttgctgttggtaggagcgaccccacgagcgtgacacggacaaagtagccttcggtgccaggttcgatttggtttctgctaagtttatcactcctacattttcgcaattagtttctataaattatatcactccatttcactcctatgaaattactgcgacttaatttcaatcgaggtcattcttcttgctccttcgctttgcttagcagtaaagacaataacttcatttaccttgctcaatagtttgccttttaatttgaacaaaaatctaatcacctgacattgcgtgggaggtaagctcctgtttttcacaaactttatcggtggacagttcacagtcctgacagacccattaatctgatagaacagttagcattaggtaattattttggcattggcaattttgatctactcctattttaaaacgccatcataggggtgcttgcatttcttgttcatggttttattgctcaagtaaaaatgcctgctttttatattacttattacatatgcatggaaaagcatgtagaaggtaacaccaataaagtttggatcatatgtttccatctataattgttgtcttggtattctcaatcagtggacttgtgcatcggcaaaatttgcagtctccataaggatgctaatgataggtcctcaacacaagccttattggaccatccattcttgagcgtgtatgatgacctgcatgtagataggacgagatctcccctcgccaccttcaatttcaggcaactctaattttttgtcctccttattaagcgaag

SEQ ID NO: 31316 - DNA, 1519 bp, Zea Mays
ctaactaattgcgaccctaccatacagcaaaacccagcacgccatgccaaacccaaaaccaaacaaccagaaacctccccttccgcctgacccctctccccgctgcgtcccccgaacggcgaacgctgccatcccatcctgccgtttgccgccgcaaaactcatcgttttttttttaaaatacctggcgcctgatcacggaaagggacggcaacaaatcgccgtgcgccagcggccagcgcacagccgagctccagagaggaggcggagctgcgggggacggggggagacggaggaggtcccggcgtcccgcgcctccccgattggacaacttaatgacccctagtccctagtagcaagtcggctttgtgcgcgcgtgctctgctgcccacccggccgccccatttgtttactgggtgtctgggtccagtccccgccccgaatcttttccctcctcccgcaccccaggccgcagcagcagcaccggcgcaccgccacccactcgccccgcctccgtgcccgcgcaactcgcgcctgcagcgtgtgggagatgtgatcggagcccggccgtcggttcgagtgttttcttctgcctctgggctgtggcgcggggaggaggcaagctggcggtgagatgggtcggtgcggaggaggaagcggagcaggagcaggagggggagctttgggcggctgtgctctcctcaccgccgccttggttatctcaacgctcgtgatccagggcgctggaggatctaagcaatctcatgcacctgctgttgctcgcaaggttcttctatccataacgaattggcacccacacaattacttggatgatgtacttcatccatcacaagtacaagatcaaaggctcgaacgtttaggccaagatgccccatcatttcatactggcaatgaacttccaaatcctcatctccgtcaagtacctgctgctttgccatctcttccagttcaaccatatgcgcctcatcctaaaatttctgctgacaatccaaccgctgcaccttcttttcaaaagataccctggttgtcattgacttcaccgcctttgcctgcaattgggcgacgaatgcaaagtccagcagcttctccagaaacagcagttcatccagctaaacatggcaaggatcatggaactccagtttcagcaccttcaaataaaagagaaggcatcaccacttgcctgcaaataattcatatgtgaaaggacctgctgtttctccctcaaagtctcccatcatccacaggaaaggacatggtgttccagttgctgcacctccaaaagaacactggagctatttaccacctgcaaatcgtagacaccacaaaggttctcgtcctgctccacgtaaaagtaacaatacttctgcaccaagccatgtatatcctggtagtcctgcacctgcacctgaacgtttgctcatcaaaggaaagggcaaggaaatttctgctcatgctccacgccatcccaatcattaccattcgcatcataattctccaag

SEQ ID NO: 31317 - DNA, 1878 bp, Zea Mays
cgcgaaactggcaagcccaactccctaaatcattctccacgagaccacgatgcctcttccatcaccgctctctacttctccttcgcctgcaagccagccagcctccattcgcgtggccgccaaaggcgccaaccgccggcgagctatgacaccatcggtctcctgcccggtcaagtgccgcccccacccctgccttgccccgcagccaccagcgccatcaccggagcttctcgccgctcgcggcgccccgatcgccggcgagctgcgggcgtgccggagccctccgtacttgcctctctcgcgctctgccgactccttggaactccgggcggcgtgccgcggcgctccgcctgccagccgagcccgtgctgccgtggcgctgggcggtgacggcccgtccgcggcgctgatagccggcgcacagtcgcgtcacgccatcttccgcgacgagctcgtgcggagagccttcactgccgccgaagcggctcaccgcggccaggtttcaaatcttagtcatctgagcaaactggctcgtagaaacgatacagccagtagaattgatgaagctgacagattacgtatagtcttccttgcaatggaagatgcaagagctgtgctcattaagcttgctgacaggctacacaacatgaggactctggattctttgtccaagactaaacagcagagcgttgcaaaggaaacgttggagatatttgctcccttggcgaatcagttgggcatcttgaattggaaggaacaacttgaaaacctgtgcttcaagtatctttacccagaaaattttgatgaactgtcaacaaaacttatcgagatctataacatagatatgattgcagctgcaacaagacgacttgaacaagcccttcaggtgagaggactatcctattatgccatatatgggaggcacaagagcatgtacagcatctacagaaaaatggcaaggaagaagctggtcatggataaaatttatgatatacatggggtgcgtgttattctcgagaataaggctgattgttttgccacattagagattatccatcacctatggcctagaattcctggcaagttcaaagattatatcaacagccccaaacccaacaggtatcagtccctgcacacggttgttctcactgaacaaacgctgccactcgagatccaaattcgtacgagggacatgcatttgcaggcggagttcggaattgctgctcattggagatataaggaaggctatccttcatcacttgcatgtgatgcttcatcgaaggaaacgcacactatcccatctcactctgacgcctgtctgttgtcctactcaaaacaatgtgatcacaaagggcccgtacttgtaatacttctggagaatgaaaagatgtcagtgcaagaaatcccccaaaattggacgatactggacctactgaaaaggtcttcaaactatgggatgccgttgaggctgaggctgaactgccatgccgtccacaactggaaccaggagctaaaaatgggcgacgtgcttgaactgatcccttcgaccccatgcaaatccagaggtcacacgagggagctccaccagaagtttgatcaccgtctcgccgtttcccagtcctgacagccttagaacaccgtaccttgtaaatacatgacgtgaacccatataaatcatctgaagtttagatttcccctgtgcagacaaaatagagatgaggagtcatcaaaactctgtaaccgtcgtatactcattcaagccaaaacaagacagcatgtaatgtaaatcagtatatacatgatacacatggttttagctcaggaaatgacaatatataccgacgacgatgcgcttacggtttttagtagcaaaaggac

SEQ ID NO: 31318 - DNA, 2393 bp, Zea Mays
tgactggtgggaccaaaaaaaaaactcgcatcgcgtccttggttcctcgcattagccacccactggattttcttgccaacgagcttcgactacaccaacgccgcttcgtcccagtgcttgctaatcatcggctcctcttaattgcagcaaccaccacgcttcgtgttttcagatcaaagaagtgggggaacaacacagatttggagcggcacgccagcaatacggaccgggggtgacctgaggcgtggagatttttggccgctgcctgcatctccacgtcgcggtcccaatcaagatcattatttctttctccttccttgtccccgcccaaatcgcaaggcttcgttgcgaatcgcccttggcgtggccccaggattcgacgccccagcgccctcgctggaatcgtgggcgctgtggaggaggactcgaggcggccgtcgcgcttgtctcgtctctcatcaatctcactctctctctggtctctctctttttttaactgcggggattcgccctgatttagaggagcgagttgctggtctcggcgccgtctagctcgtcccggaccgacgatttggggcagggcaggtccaaagacagggcgctgtgccgtgtgggcctcctcttgggcatccatggggttcctcagccttgtgggcaactcctttgggtgctctgcttccggtgagcgtcttgtctcagctgcccgcgacggcgacctgcaggaggcacgcgcactcctccaatacaaccctcgccttgcccggtactccacgttcggcggccggaactcaccgctgcactatgccgcggcgcaaggccaccatgagattgtctctctgttgcttgaatccggtgttgagatcaaccttaggaattacagggggcagactgctttgatgcaagcatgccaatatggccactgggaggttgttcagacactgatactcttcaatgcaaatgtgcacaggacagattatctgaacggtggaactgctctccattttgctgcactgcatggtcatgcccgatgcctccgtcttgtgcttgcagattatgttccaagcgtaccgaatttctgcaccctggtgaatcataagtcatctgaagaagattcaactgctgattttgatcatgatgctttggtcaagatggtgaatcagaaggcggatggaggcttaaccccacttcatatggcagcattaaacgggcatgtagagtgcgtgcaattgttgctggacttaggggcatctgtttctgaggtcactattgaggatggaacaactatagacttaataggggccggtagcaccccacttcactatgctgcttgtggtggaaatgctgtctgttgtcagctcctaattgctcgaggggcttgcattgctgtgcaaaatgctagcggatggacccctttaatggtggctcgttcctggcaaagaaattcagttgaagaaatcttaagtagagaaccagagggtcggatacacactcttccttcaccttatctctgtcttccactcatgagtatcatgaacattgccagggagtgtggatggaggtatctaaaccagtcacctgtttgtatcgacccttgtgctgtctgcttagaagggagctgttccgttgctgcagaaggttgcaaacatgaattctgcacaagatgtgctctatacctttgctcaactagctacacgtcagcgagcccagcgggtgcaataccatgccctctctgcagacatccgatcatctcgttcaacaccctccccggcacgagcccgataagagagttgccgaggaacagcctctcgctgtcgttctgcacggcgtgcccagccgtgagctccgactcttccgccccggtcggcgcccatccgtgccgctccgagttccagtgcgtccgcctgccgccgatgggctcgtcctccttccgctcgctgagctgccagaggataccagcgatgaagctgcacccatcgttctgcatgggttccatggacacgaacccctgcctcataaggtgctcgaggttcgggtctggccttgggcggtcggcttcccagagagagggggctaccagaagagcttggcctgtgacgttcagccccattgctgccaccggcagctgaattggcggttttgtgccccccgtttttttgaggtcgggttttgtttgccaattttttggttggtttgatctaatgttcaccgttgtgatcgatatggtatgaactcgctggttccaactccttgttgattcggagtacttatatatgtctgatcagaagcagcacgtaactgcttactaccttggtatgtaaataaccccgtggtgtttgttgtatgtttctgggaggcaatgaaatgcaaattgaaggaatcagttttttcagtgc

SEQ ID NO: 31319 - DNA, 1656 bp, Zea Mays
atttttttgcaattaaacaacttaagagactttacgttaaacatcactatacatgccctaattacaattgcaacagtatcatccgattgaatctactttttaagcagtagaggacagaacagaacaggacccggcccttcctcgttccttcgtttctcctccccgcatttgctggtcgctgtcatacgacggcgccggaattccggtgggacagggccatcctctccgcttgtcccccagttctgcatttccctcttcgcagacattcgagttgggcctgccgccagttcttcagatggccggagcgggcgacgcggccaaggagtacgtcgccggatccgccgccggcgtcgctcaggtcgtagtcggccacccgttcgacacggtcaaggttaaactgcaagctcataataccacggctcatggaaaggtgtacaagaatgccttccactgcaccagtaggatactgcttgacgaaggaattacagggctgtacaaaggtgcgtcatcttcatttattggtatagctgttgaaagctcccttttctttggcacatattcccaagccaaacagttattacaggtactcaaatgatctttccaactaaaagaactaaacatataatcgttgaacagtagctaagtaagcatggagaattgaagattgcaaatcttgagtcaaggcttgaccttagtttagtatagttttctaaagaatgttttttcagggaagctatgaggttggtaggccacatcttcaggtaattatcccttctgctgcatgcagtggagctctgattagctgcatcctcactccaactgagctgaccaaggtagtggcattggtgctaaattcccacttttttctaatcaatataaggacttataatgcatgattcaagtggcatttaatgatgtgatgtcaagactttttccagtgcagaatgcaagttcaagggaaggatgtaatccatggcgccaggtactccagccctctagattgtgctgtgaaaacattggaaagtgaaggggttaagggtatattccgtggtggtttggcaacattattcagagaggcgatcggcaatgctgtcttcttctgcacttatgagtacagtcgatactggatgcacaactatttggattcctcgagattttctggtagcagtcatttcgtggcggcaaaagatattgggataggggttgtaagtggtggcgttagtggaatggcattctggacagctaccctaccgttggatgtggcaaaaaccataatacagactgatccggaccctcatgtgagccgaaaccccttgcagattttgagcatggtttataagagagctgggttgggtggctgttatgctggacttggaccaactctagcaagagcattccctgccaatgcagcagcaattgttgcttgggagtacagcgctaagattctcggtataaagcgaggctagtattacgaatcatcgatgattataggtgacttcaacttaatctgcagaccagaaaacagaaacaaaccaggtgggaatatgcagttgatgaggaattcaactctgcaatcagccaactcggtgtccagagggttcctttgaaaggagtttcaaagcctcaaatctttaaattcgagaatatctggttata

SEQ ID NO: 31320 - DNA, 1152 bp, Zea Mays
ctctgctgcctcgaagcagggtccagatctctctcccccggctccggcgatggcttcgccttacgccggcggcgtgcagcctccctctcccgctggggcggtgcagcagcagcagcagaaccactctctggcgttccgcgtgatgcggctgtctcgcccctcactccagccagacctggccgctctgctccgcttcgacccacgcgacgtcttcctccctgaggacgcgctcaccggctccgacccgtccgctgccgccaaattcctccacggcctcctccaccctgcggactccgccactgccgtccctggagacttcaccttccgcgaccgcttcctcctccgcgacccagccgacgcgctcgctctgccgggcctcctcgtcctcccccagtcgttcggtgcgatctatctgggcgagaccttctgcagttacatcagcatcaacaatagctccagctttgaggccagggacgtcgtcatcaagagagacagagaatacttcttctggatacatcaaaatcccctgttgagtcaattagatctgggggtagatatgatttcattgtggaacatgatgtcaaagaactaggagcacatacgcttgtatgtactgctttatataatgatggtgatggagagcgtaaatatcttccccagttctttaagttctctgtttcaaacccattatctgttaggacaaaggttcgcaccatcaaggtaggtcacctcttgttgtgcaagggtaaataacaactgtaggttctttggttagttgtagatgccatctttagaagtcttaacaggtgtatattttgtatatagatcattacagcttgacaaatataacttagaaaatgatttgcgattaagtgagtagtttttgtgtttaatatagatgtttatgttttgttgtatgaactaatagctctcccattttttattaataatatttaccaagatttttcttttgtatttcttgccatcccatggaagctgagctaactcaatcggctaagggtgtggatgtacactcagatcacccaggttcaagtccttgtcgaggcgactttgggtgcctgttttcttcttaataaagccacctagctcctccttggctgatctagttttttcttgccatcccatttgttg

SEQ ID NO: 31321 - DNA, 274 bp, Zea Mays
tctacccccccaaattcagggcgttacataggatcaagtctcacacatatgatgactcatggtacagaaagaaatgtcacatctttattactttataggagttctatacaaaagaactaaataattacatcagatgaacacagcgatcctccgcaaccatagttgactgggagacgactgcctagacctctcacgaacttatcgcgacatccttcatgctccttaccttgtggtacctgtccttgacctaggggtaagtacaccaagggtgagc

SEQ ID NO: 31322 - DNA, 3510 bp, Zea Mays
cttaattcaaatttcttcccaacggaaaacatcgcgggctccctactccgctttccccaatccacgcccttccgaagagcggcgaatccgccccagaacctcgcgatttccctcaaaccagttctcggatcagagcgtcgtgggtgtcgccgggggcatggcgcagacgccgaaccccagtaggaggtcgtgggtcggcccggcgccgatgccattcctcacgccgcggccggagcggcggcaccttgagatgcggtgggcggacggagtgtcccaaagcgctgctcgccgtagcggcgtcggcgccgttgccagggatggatgcgagagggatcaggaggtgaacgttcaggtcatgctgcggtgcaggccactcagtgaggaggagcagagagtgaatgcgcagagcgctatctcttgtaatgaatcaaagagggaggtcacagttctgcacagcctcttcaagcaagcagacaagacatttaccttcgacaaggtatttggaccacaatctcagcaaaggtcgatatataaccatgccgttgcaccattagtgactgaagtccttgaaggctataactgcactgtcttcgtgtttgggcagactggaaccggaaagacatataccatggagggagagatgagacagaaggttagtgaactaccggatactgccggtgtcattcctagagcagtgtgccatatctttgaaatacttacagcacggaaggctgattatagcatgaaggtaaccttcttagagctgtataatgaagatataacagacctattgtctttagaggaccaaagcagattccctgaaggtagacaaaaaaggcctataactcttatggaagatggcaaaggcggtgcggtaataagaggtcttgaagagattgttgtctatagtcctagcgacatatacagccttttggaacatgggtcagctaggagacgcactgctgacactgcactaaataagcaaagcagccgatcacatgctgttttttctataaacatccaagtcaaagaaacaacagtaggaaatgaggaactcattaagtatgggaggttaaaccttgtagacttggcaggatcagaaaatattgctcgatcaggggcaagagagggtagagcaagagaaactggagaaatgaataagagcctactaactctgggacgtgtcatcaatgcacttgtggagcattcagttcatgtgccatacagggatagtaagctcaccagactgctaagagaatcattaggaggcaaagccaaaacatgcatcatagcaacggtgtctccatctgcccattccctggaagaaacgctggtcacacttgattatgctgctcgtgctaaaagcataagaaacaagccagaggcaaataaaaaaacatgcaaaactgttgtgctcaaggagctctaccaagaaatggaaagaatgaaacaagatgtcaaagctgcaagggaaaagaatggaatctacatctctcacgaaaggtttgcccaagacgaaacaaaaagaaagacaatgaaggaaaaaatagaacatttggagctcagtcttgaaaagcagaacaaagaagttcaaaaattcaaagccttgtacctagcagaacaggaatgccactgggactttgaaagtcagaacaacgatttgaaggtaaatcttgaaagcttgaagggcaagttcatagatcttgaagaagctcattgcagagctcacatgtccctgagggagaaggacttcattatatcaaatttacttcattctgagcacttaattattgaacgtgcaaaggatatgcggaacaccttggagaatgcaaccgaagatatcagtgtacttctgaataaacaagaaaggcaatcaaaaactgaagctgaaaacaaaaggttgctatctggttttcgggctgaattggatcgtagtcttggagttctgcatgctacagtcgttggatcagtatgtgaacagagtaaaattttggagtctataaatgaacaaacaaagttgtactttttagccagaaatgagtcagaaaaccaattggaaagaagaattgcaagagccaaagatatgtatgtctccggggtccaatgcatgaaggagctcgctaataccatgagacagcagtctatcatagattccgagcagatgaggcagaacatatctactaatgcaaatgctattggcaattttctagaagtgatgttttcagaagctgaacaagttctaaatgatgttctgaaatctacttcagatctcaaggaactattagccttttctgcagaactacaaaacactggattgagaaggaatcttgcttctgttcaagcaatgtcaaagcaatcaattgatttctttgaagatataaggatacatgtgtctcagctcatgacacttatggagcagaatcaaatggaaaggtcctccaagcttgttaaatttgagaatgagtttaaggaaacttgtgttaaagacgagcaagctgctctgaataagattgctgcaattttatcagagttgaccgccaagaaaactacaatggtttcatcatatatgggacagcttaatgagaggtatagtgaagatcagaagaacctgaaactggagatatccaacctacaacaggtttcagataatggcaaaaatgagtctgtggcttgtgttggagtgatagagagtcagttccaggaggatatgtcatcacatactaaatcaaatgatcaaatggaaggcatcttaaaacaatactcggagaaaggtagtcattttgtatcttactggtcacatatacaatcatctttgcatgatcttgttaagagctcaatcatggagactgacgattttattgaggaaagcagaaacaaaaatgaaaatatattccaggaagggcttctgttttcttcacagaatgatgcagagtttcatggcattacatctgacgtgctgactgtttcaaagaattccctcttactggatcatgaaacttgcaagatggtagagactaacactaccattttctcggatcatctggaactgctgaatgaaaagcacagcgaaggcgtggaatctacaagaaacatgatgagtgattgtcttgaaaaggattacatggctaatagtccggttcgaaaccatccacgggaactactgaccagtgcaaacagcttggaatcaattgacaaactaagagcttctctgccagatctggtggcaaagttcaggctcgagaacaagttgaatgaaatggataaggggaagcaatactcggatcaaaggacacgtgtacatggtaagttcaaaaccataataagtgctattaaaagcttgctaacatggagatcacatgaggaaagcacagcacagagaatagagtgatacgcagaacggctcataaatcattttgggaaagagaaaggtgagaggtaaggatatgtgatgcagaacaacacagaggagcagggccttctgagggaagatcacgtttcatcgaccagcga

SEQ ID NO: 31323 - DNA, 7545 bp, Zea Mays
ctcctcagccaatctcccatcctccccgatgcgtcctgcgactctgtcccccgaggccccggcgctcgtccgcccgtcgcgtcgcttcgatgcccccctcgcagtcgcgactcacctcctcctccgtgttccccattcatcctaaaaggcctaaaccctagcctccttgctcccgcgctccggccgctggcgccggtgcaaccacgcgccgccgccagtgcatctcgtccagggctgcacgtccacctgtagtgggttgtgcggccccaacgcgagttcggcgccgaccaccaccgaaccgaagtgatctgcccgtcccaacgcgcggcagcgccgccggacggtgcccgccacttcggcagtgcgtgctgcctccggtatagcggctgccagatcccgccgcgggacctgcagtaccagttcggtgctcatgctctaagatatgatataggattggaaagatggcgtcaaaaggtccccggtcaaagttagaccatgagacaagagctaggcgtcagaaggctcttgaagctccaagggagcctcgacgaccaaaagttcactgggaccatgtccttgctgagatgatgtggctgtcaaaggagtttgattctgagagaaaatggaagttgtccatggccaaaaagattgctcaaagagcaaataagagcatagttgaccaagcaacaaagggcgagagaaaacagaaggagaaagaacatagaatgcgaaaagttgcccttaatatttcaaaggatgtgaagaagttctggatcaaaatagaaaagctggcaagttcatttttgacttctaatgtcatgagaaagcaggttgtttataagcaccagctggagcttgaggagagaaagaagaaggcacttgataagcaacttgattttcttttaggtcagactgaaaggtattcgacaatgttggcggaaaatcttgtggatatgccctatcccgaaaacctagaaaacaggacttcacagataaaccaacgatcccatcaagaggaagtaccagaaaagaacttaaatgcaaccatttctgatgattttgataatatggaagtcgatgatgattatgagagctccttggacgaagagccagaagatgatgagcacacaattgatgaggatgaagctcagatcactgaagctgagcgcaacgaagaactagctgctttagaggcagaagctgatctaccacttgatgttattctcaagatgtacacaaaaactaaagttagcagggaaggcagtccagatagcaaagacatgctaagtaacttaggttcgaagattttgattgtagattctttgaagcaggctaatgggcgtgatcatgaacctgctcactcttcaagtgaagatggcaattcttctgaggaagtggatgatggccattcttatgctgagtttgtgaagaagaatcatggtaaaagtaacggaaatatttcttctatcaatgaccaggaggacaaagattacattgctactgaagaagtaaaggatgatgaagcaactttgtctgaagaggaagaattggcaaaaaaagaagatcctgattatctggaagaggttaagttactgcagaaggagagcgagataccactagaagaacttctcgcgaggtaccgagagatcatgaaacagcggagttgaagaattcaccccattttgttgaagaggtcaatactgacatgtctttggatgatcaatctgtgagcattttggaagcgaaaagtgatttatttgtggatcaccaatccagggatgtgctggaaactgaggacacggctccacgatcagaaatcgcatcagagccttgtgctaaacaaaattttgatgaagagaataatctcactgatgttaagacagtcaatggagataagagtgatgatgtaaagagtgatgatgtaattgctgatgctgcagctgctgcaagatcagcacaaccaactggcaacaccttcttgactacaaaagtgcgcacgaaattcccattccttcttaagcattctcttcgtgaataccagcatatagggctggattggttagttgctatgtatgagaagaggcttaatggaattctagcagacgaaatgggtttaggcaagacaatcatgactatctccttgcttgcacaccttgcgtgtgagaaggggatatggggtcctcatcttattgtcgtgccgactagtgttatgctaaattgggagactgaatttcttaagtggtgtcctgcttttaaaatactgacttatttcggaagcgcaaaggagagaaagcagaagcgtcagggctggatgaaaccaaatttcttccatgtttgcatcacaacatataggcttgtcatacaggactctaaagtgtttaagagaaagaagtggaagtatcttattcttgatgaggctcatctgataaagaactggaaatcacaacgttggcagactttgctcaactttaattcaaagagacgtattcttctgactggaactccactgcaaaatgaccttatggaactttggtccctcatgcattttctgatgcctcatgtgtttcagtctcatcaagagttcaaggattggttctgcaatccaatttctgggatggtggaaggtcaagataaagtaaacaaagaaattatagatcggttgcacaatgtccttcgtccatttatactgcgtcgactgaaaagagatgttgagaaacagttaccaaagaagcaagagcatgtcatatattgccgactttctagaaggcaaagaaacttgtatgaagattttattgctagctcagagactcaagcaacactggcaagtgggaattattttggcatgataagcatcattatgcaacttagaaaggtctgtaaccatccagatctttttgaaggtcggccaataataagctcatttgacatggctgggattaacatgcagctcagctattcagtctgcatgctccttgataagagtccattttctcaggtgggactgtctgatatgaatttagtgtttacgcaaaatgaatttagcatgagttcctgggaagctgatgaggtcatttctgcctttcctttgagtaccacttcctggaaccatgaccttgatactttttgctctaataaggatcgtcagggaagtaatttgacaaacatttttgaagatattcagaaagcactacaggaggagagaataaaggaatccagagaaagggcagcttccattgcatggtggaatagagttagatgccaaaagaggcctgtctatggcacaaacatgatacatgttttgactgtaaagcatcatgtatcaaatattcttgataagaggaacaaccctttgtgccacatggactattcatcaagccttgcagatcttgttcttccatctgtggaacgctttcagaaaatgcttgatattgttgaatcatttacattcgcaattcctgctgctcgagctcctccccctgtttgctggtacagcaaaggaaactctcctgtttttattgatccagcatatagagaaaaatgcatgaacgagttttctcccatcctgtctcctataaggtctgctattgttcgacgtcaagtctactttcctgataggcgtttgatccagtttgattgtgggaagttgcaggaacttgctattctgttaaggcgcttgaagtcagaagggcacagggccttgatatttactcagatgactaagatgcttgatgtcttggaagagttcataaatctatatggatatacatatttacgtttagatggttctactcccccagaagagaggcagactctgatgcagaggttcaacacaaatccaaagttcttccttttcattttgtccactcgaagtggtggtgtgggaatcaaccttgtaggtgcagacactgtcatcttctatgacagtgactggaaccctgcaatggaccaacaagcacaggacagatgccacaggattggtcagactcgtgaagttcacatatatagactcattagtgaaagcactatagaggagaacattctcaagaaagcaaatcagaaacgagctcttgatgatttagtgatacaacgaggtagctacaatacggaattcttcaagaaacttgatcctatggaattcttttccgggcacacatctcttcatgcagaagatcaggagaagaattgctctacaacctcaggagtttcaaatgatgttgatctggctctgtcaattgcagatgttgaagcagctattagacaagcagaagatgaagctgactatatggctctcaagaagctggaggaggaagaagccgtggacaatcaagaattcagtgaggaggctgcgggcagacaagaggaggatgaattggttaatgaggagaatggaaaacccgatgagcacattaacgaagaacaaaaatataactcttctgatgtagagaaggagaagcacattactctgtctaccaatcgattaaataaggaaaaggctcttacattggctgttggtgatgaagatactgacatgcttgctgatgtgaaacagatggcagctgcagcagctgcagcaggacaagcgagttcatcatttgagaaccagctccggccaattgatagatatgcaatgcgctttatggaactctgggatccagtaattgacaaagctgctttaaatcatcaagtaaatgttgaggaggaagaatgggagcttgatcgtattgaaaaattcaaagaggatttagaagcagaaattgatgaggaccaagaaccactttcttatgaatcatgggatgttgattttgctacgacagcctatcggcaacatgttgaggctttaactcaaaagcagttgttagaagaacaggaaaggcaagctcaggaagcaacaaaagagttggaggagaagaatgataatatgagtcaccacagaaagtcaaaaaagaacaaaaagaagacaggcaaactcaagcccctgaaaagagtgcgtctgtcgcctgaatcagaagtcatactggaggaaacctctgtagataatgcaccctcacctgagcttacaagtgatgaatcgccacaccattattgtaacaagcgtaagaagattacggttgccactgaggaaaatagtaacagcagaagtttaaagaagctcaagaaaactactaaatcaagttttatttctgaagccttgtcacctaggctgaaggaggaccttaatgattcagattcaaaatcagtgggtagaactaaaagtgatggcagatttttcatcccttgcatgccagtgaaacgtgttattgtaataaagcctgagagattgaaaaggaagggaatatggtctcgagattgtgcttcagactcatggtcatctgaggaagatgcagttctttgtggaactgttcatgagtatggtccactttgggaattggcaagtgattttcttcattttttgccaggcggttccttgtataggggaagatatcatcatcctgtgcattgctgtgagagatacagagaactgttctgcaaacatggaatgtcagcaacagataattctaacagtgaaaaggttccttctgggactggaaaggctatacttagagtgtctgaggatcaagctcagatgttggtgaatgtgaccagtgaacttcctaacaatgaattgcttctccagaaacacttcatggctgtaatttcgtctgtttggagatcaaaatgtcaccgtgatacctcctgttttacgaacacttactctagtgcattacatgtgttttctcctgtgaagaaacctggtggatcatgtgagaactggcccatggtaaactttagaccaagcttcaatctagttaggaaagcccttgcagatgttcaggctaagtctacactaatggtgattccacctccgtcaaggaatcaggaatacccatgcaattatttagaattagagttagatttcttgaaagatcaacatgcttatgatgaagacatcccatctgtagtaaatgtgtccatacaggaaccagaaccatccaaacagacgccagagccagtggaacaatcgttgttgtctgcactttcttgtagacaggctgagaaccggctcagaagcttgttatgatggtgaaagttctcattgggcatcatcagcttttcacataaatgatgctgcccgccacaaatctggttcaaagtctataggaaagcacaaagccgcattggaatctggtagacttctcaaatccaaagttcagaagattactgaatcgcatcaggaaggggcaattgctatgagtagttttctccgtatgcctgctcaactattgccaagtacagctgacttccacattagtgactccctatctgactttggtatcagagattctgaattctatttttccgaggatctcttgcaagaggttgacgcccttgagttcttcccagatcagggtgactctggtctccttcctggtattgaagagttagaatctctttcggatttcacagatatcggatgaacatagatgagcaaattattgttgatgggatgccctcctataccaagaggagacaagattgcctctggcaggagcccaaggatacaggttgaattgctcagccgtgcacagatgtgttgcaagcagcaagctatcatcatggctggctggagcaaagcactggcttggtgaggtcacattgatctgacaagctcggaggatgggtttgcactaatggcggcatttgggtaatttccatacatgtatgtatattggtagtctagaatcgtaggatgtagaaatgcctccctcatttgtgtttgagggtaggaccttgtaactcgaccacatggaaattttgttgagcaggtaccaacatagaagggaaaagaagaggccctcagcatcacccatttgtcgctgtatctcttgttatgttcattctctgtttaatccaatgctgtttggctatcttgccattgaaaacatctcagatgtcaagttggtggtgtacatatctatcagaagtttaggatgcggcgtcaatatagctgccaaagaatgatcagtcaagtgcaacttatgggcacattatatatttggtcaggactcaacgcatggtatcaatattggcagaaatggtgttccagatgcacttgaggactgcaatttctggtttgattgagacaccggagacaggtttttcataggaggtaaagagcgtggtcatagttgtacatgtaataaaattatgtagggtagtaatctccatcctgtacttttgggcttatggttctttggactctcggtctcggttatgcacttgtagaacagcgggctgctgctgtgagcctgtaacaatgctattgattgttccccaccatattgttgttttggtaagtagactctgcatcactgcaaagcggcgttagatactgtgacgggtctgtttcgctcaaaaatactttgagcttgtattcagtcttggcctccaataatctgtaccgctgtacgctgggaatgtttggccaatcccattaatggtaagctg

SEQ ID NO: 31324 - DNA, 2010 bp, Zea Mays
attgatttttttcccaaatgatgaggatgagacagatgacatagttgaggtggctcttgctgaacttgagatgatagaacaatatagtgccttcatgtctcctgtcgcggctgcggacagcatgacacccaaaaagttcatggcgcttgtctctgctaaaatccaaacatacttttgcaggggcgggtcgatccagagggcggtgcggaggatggccggcggcggcggcggccggaggagacccggcgccttggcggacccgaggaccggcgacgcgtcgtcggcgtcggctagctgctccggggatgataccagcattggtagtgccactgccaagagggaaggggcacgaaggtgcatcatgcagcggtacaggtcccagctcgagcaggaagtcaagaaactgcaaaggcaactgcaagaagagattgatttacatctggcgttggcagatgccattacatataatgcggcgctgatacttaagtcgtctataaagcttccagataaggcgcatgagctattaattagcatatcctctttggaaatcgctatcacaaagcttgaagaggatctaaatcacctgcattaccaattataccatgcaaggaatgaaaggtttcttgcggaaaataagccaggatacttgctacctacaagatcagattgtcaaccctccacagcttgcaattgtacatgggaagaagatgatgaaaaatacgttaaaggtagagaacgtgtatctctaaatatgctgctagaaaagcaccaagatatttcttcaactgggctgtttgtacaccgagatgaagagatgcaagaggcatgctctatggaaaaagaaggcgaagaagatcagaagatagatatgttaccatttaacctgcccaatttgaagaaaggcaacatgagtgaaaatctgtggaataatccaaatcagctctctgaagagatggtgctctccatgaaagatatattccttaatttatctacatcttccaagatgtcaccagaggagcctttttctaattcatcttcatcagcagagcatctatctggttcaacattgactactttgtcggattcatctgtaatagcctcagtgcagcccagtccttcaatgtacctgaaccacgatgatggtaactttgacccgtacaatgttaatggaaaggaagcacagagagacattggcagctatagttcagtagctgaagtgtcttggatgtatattggcaatgaacaacttgaatatgcatctggagctctgagaaagttcaggtttcttgtggagcaactatcaaaggttgacacttcttgtatgaactgtgatgaacggttagcattttggattaacctttacaatgcattaatcatgcatgcctatttggcatacggtgtccctgaaaacgacattaagcttttcgcgctaatgcaaaaggcctgttacacgatctgtgggcagcctgtcagtgcagctgaaatagagtttgtgattctgaaggtgaagactccagtgcaccggccacaactctccttgatgctggcccttcacaaatttaaaacatcagagaatctcaagaaatattcaatcgatggtactgagcctcgtgtgctctttgcactctgttgtgggatgttctcttcgcctgcggtaaggattttctctgctgaaaatgttcgagccgagctacaagaatcaatgagagactacatccgagcatctgttggtgtcaatgacaagggggagcttatggtccccaagttactgcagagctatgccaagggcattgtggaggactctctgcttgccgactggatctgccgtcatctaacactagaccaactcgctgcagtccaagatacatcgtcgtcacatacacagcgccttcttggagtgcgcagtttcagcgtcatcccattcgattcaagattccggtacctgttcttgttcgacaacagtagatgacagaactgcattgctcaatgtgcacaaagccaagagtgggc

SEQ ID NO: 31325 - DNA, 403 bp, Zea Mays
cgccggagccgttcgtttcggtgggtctgcgccggggggattgaccgaggggcggaatcttcagcgcgcataaaatgcgaacccatcccctctaaatctagaccctattcctccactcgaacccaccgctgtcgtgaacaccgagcgaagaaccgaaagaaagtcaccgccgccgctgcgaggattgagattaggggcgactctacccctgaaccctgtctcgggggcctcgtcggaggttggcgaagctcgggatggaagcaatcacgctaaggataaccgcggtactgagaattcctcaccggagcgggcgagcgcccgtaatccgcgccgcgtcgtggatctccgtagctgcatctccacccctggtaagtgacccatgcttagtttcacctctcgctgg

SEQ ID NO: 31326 - DNA, 832 bp, Zea Mays
gttacaaataccccagccacttgacgacacgggatgcaaacctatttatattctgtccttaattcccgtgtttctcgtccgtctccgctcctccgcaaccccttcccctcctccgccgaagcctctcctccggccgccgaaaccctagcctccgccgctgccgtcatggcaagcagcaacgtctcgaccgtttacatctctgtcattgatgacgtcatctccaaggtccgcgaggatttcatcacctacggagtcggtgacgccgtcctaaacgagctccaggctctctgggagatgaaaatgctacactgtggcgcgatctcggggaacatagaccgaaccaaggctgctgccgcgtccgtcggaggcaccaccggcacgacaccgcccgtgcacgacctgaacgtgccgtacgaggccacatctgaggagtacgccaccccgaccgctgacatgttgttcccgccgacaccattgcagaccccaatccagactcctctgccagggacagacacagcgatgtacaacatacccactggcccttccgattatgccccctcaccgatcagcgatgtcaggaatgggatggcaataaatggggcagacccaacagctggtcatccaagtccctacatgccaccaccttccccttggatgaatcagaggccgctgggtgttgatgtgaatgtcgcttatgtggaaggccgtgaagatcctgacaggggcgtgcagcctcagccactgactcagaacattgctccctgatgatatgtttccagaatgaggttgtggataaatagaatatgtatctagagttaatagttggttactg

SEQ ID NO: 31327 - DNA, 3644 bp, Zea Mays
ctcatttggtgccaagctaggccttacatctctagccacacccacacctgtacctgtttgctgctgttttttctcccacgcgatccaaccgtttgtttacgccgggctaggtttctcgaccgtacggggacaggacatcagtgcaactgtgcaagcgaccgccaccgcattacccggaactgcccagatcttcgtcgaatcgtcgggccctttgctggcgacgagcaaccacagcttgcaatggcacaatagtgacatcttgggaaacaatgaaacgttttgtctatatcaatgatgattcgtgccggtattcctactgtgacaaccggatatccaataccaagtatactctgtggaattttctcccgaaaaatttatgggagcaattcaggcgtttcatgaatcagtattttctactaatagcctgccttcagttgtggtcccgtatcacccctgtcagccctgcaactacatggggtccacttatcatcatcttcattgtttctgcttcaaaagaggcttgggatgattacaataggtatctttctgacaagaaagcaaatgagaggaaaatatggttggtaaaggatggcgtccgcatacagatcaaagcacaggaggtacatgttggagatttagtgtggctccatgagaatgatgagataccatgtgatcttgttctcattggcacttctgatcgacaaggcatttgttatgttgagactgctgctttggatggtgaaactgacttgaaaacaagaaccattcctccaatttctgctaacttgtcagtagagcagctaggaaaagtcaagggtgtaattgagtgccccaacccagacaatgacatacggagtcatgttaccttcgatacactgaatgggcttgtggagttgcagtttacacaggcaatgaaacaaaatctggaataagtaggggagctgcggagcccaagttcactgctgctgatgtaataatagacaagctcactattgcaatattcatgttccaagttgttgttgtacttgttctgggttattttgggaatacttggaaggacactcaggggcttaagcaatggtatcttatgtatcctatggaggtagagggcccatggtatgatttcttgattatcccgttacgctttgagctgttgtgctccataatgattccaatctccataaaggttactcttgatttggctaaaggtttgtatgcaaagtttattgactgggatgagcaaatgtttgattgggaaacaaatacacctgctcattcagctaacacagctattagcgaggacctcggacagattgaatatattttgagtgacaaaactgggacactcacagagaataaaatgatcttcaaacaatgctgcataagtgatactttgtatggaaatgacaacggagatgcattaaacgatgtcagacttgtaaatgcggtctcaagtaatgatcctgatgtcatcaaatttctgttggttatggctctttgcaatacagtggtccctatcaaaagcaatgatggtactgtgtcatacaaagcacaatcccaagatgaggaagctttagttaacgctgcagcaaagctgaatatgatgctcatcagtaaagacaccattacagctgagatttgtttcaatgggtctaagttttggtatgagttgttggacattttggaattcacttctgatcgcaaaagaatgtctgtagtggtaaaggaaggggagactggtaagatccttcttttatcaaaaggtgctgatgaagctctcctgcctcgtgcctgtccaggacaacaaatacagagatatcttgaagcagtagaaatgtattctcagttgggattgcgaaccttatgtttggggtggcgtgatttaaaagaaaatgaatataaggaatggtccaaaaactttcaaaaggctagctgctcattggacaatagagagtttaaaattgctgaagtttgtaatagcttagagcaagaccttcaaattcttggtgttactgctatagaggatcgtcttcaggatggtgttcctgaaaccattaaattgttgaggaatgctggaattaatgtgtggatgctaaccggtgataagcaaaatacagcaattcagattggacttctctgtaacctcataacttctgggcccaatagtcaattgttatctatcagtgggaaaactgaagaggacgtgctaagaagcctagagagggcattatttattatgaaaaatacatctgaaacaaagggtcttgcatttgttttggatggttgggcacttgaattaattttgaagcattccaaggagtcttttactaggttggcgatgctgtcaaaaacagcaatatgctgtcgaatgacacctttgcagaaagcacagcttgttgctatcctaaaatccgttggctacctaactctagcaattggtgatggtggtaatgatgttagaatgattcaagaggctaacattggagtagggattagtggtagggaaggactgcaagctgcaagagctgctgattatagcattgggaagttcaagtttcttaagagattgatacttattcatgggcgttattcatacaatcgaacagcatttatttcacagtactccttctacaagtcacttcttatgtgctttattcagattctgtttgcctttttgtcggggctatctgggactagcttattcaactcaattagcttgatggcttataacgttttctatacaagtttacccgtcatgactataatctttgacaaggatatctctgaaacaacggttatgcagtacccccagattttactgcattctcaagctgggaggcttttaaatctcactacattttgcggatggtttgggcgctcgctatatcacgcactcgtcgttttcttcattacgatatgcgcctactcagatgagaaaagtgagatgcaggaactgtcaatggtagcactgtccggttgcatttggttacaggcttttgttgtgacaatggatacaaactcattcacttgcccgcaaatccttctcatctggggaaactttgtggccttctacatgatcaacttaatactcagtaccgtcccaagtctccaactgtacacaatcacgttccgcctgtgtagccaaccttcctactggatctccatggctctgacggttgcagtaggaatgggaccggtggtggctttcaggtacttgaagaacctgtatcagcctagcgccgttaacatactccagcaggtcgagcagcgcaatggatctatcagaacttctgggaatctggagtcggcgggagccaatctcactaatctactgactggctcacgtaaaaacagggattctaattatcgccctctgctttcagagtctgcggagtctgtaagtgcaagcggcagctaagaattgtctaggctttccgtactagcatgacagtcatacactcatacagacggcagaacagtgaactgtaacagaatcatgcttgtactaaaaaatatttcgtcggggtcaaagccaataattgttttgttggcctaaatttgatcatttttctcagtctgcgctgtggcaccgtctgtgctgtccgctgtcgcacgtagggatggtaataggatctaaattttac

SEQ ID NO: 31328 - DNA, 632 bp, Zea Mays
aacacccaacacgatgcccttggggaagtactactgcgactactgcgacaagcagttccaggacacccccgccgcccggaagcgccacctccagggcgtgcagcaccaacgcgcccgcgccctctggtacgactccattcgccaccaagaccagcatggcggcgcttcctccctcctcctgcctgacggcaccctcgccaagggcatctgtcaccacttcgtccgcacgggggcttgcaagtatggggattcatgcagatacttccatccgaagccaaatggtgtcaatccagcattagctgcaccagggaagatactggggggacacgcctcttggggcaacctgccgccatcactgcaacctcctcctgaaggcggctaccctcccctcccgttcatcgactggggctgaaggggcgttgtctccctgaaattcgaaccatttaatatttcataccttgattggttgtgctaaatcgcatatacttggagcgcagtagagttaaggtgatcccagtttattttgatcttaaatttatctctgtaatagatatttacagtcagaggtacacttcgcagattgcgttgatgtttgaatgaactcacatttgcatcaatggtgctcttatggc

SEQ ID NO: 31329 - DNA, 1729 bp, Zea Mays
ggagagtggagacagacacagacatttaaatcgtggacagttcggggaccgggccgcaaataaccatcctccctagctttcccgttccagccgtcgcgttgagttgctgccgcctcccccggtccccccacctcccgccccggcgcccctctctctctctctcttctgccgcacagagcccaaatcgcggcggatccctcgctctccagggagccgctgcggcgccgggttttgtacaccgacttgtttgcctacctccagctcctcctcggcgacccatggctctcctcgcccccgccatctccggcgaggttggtctgcggctcttattggcaccgctaagctctaacatagtcatgcgtacagccagttgtgctgttgggattggtctacctgtatactccactttcagagctatagagaagaaggatgaacaagagaaagagcggatgcttttgtattgggcagcatatggatcttttagcattgctgaagtgtttgcagataagcttctttcaagtgttcctctctattatcatgtgaagtttgctatccttgtgtggctccagttcccttcaaacagtgtaagtttcccttgccccttccatcccccgtctaaatttcatatactgttcaactttaccattttaccactgtgatatggtttttgctcaaatgcacgatattagtggcacttgttctttgaattcaccattttctacttcatgaggtttgttgctgcgacccataacctatttctagatcttgtagtgggagtttgtcatgaactttccatcagctttatatatgttttcctttctattgcttatgaagtactgcatactcttggctttcttttaaacatcatatccatgttttcttgtgataagactcatactgccttttggacaaaaaatgtgtaactattatattgcttgctgtatctttgatgattgtttggatcgaattcgtgtcctttaatttcagggatcaaagcatgtatacaaaagatacctgcgcccatttttcctgaaacatcaagcaaaaattgataggtttctgaatattctgtcaaaggaacttacgaagtttgtgagcagccatgaagatgaaattcgttttatagaaaatatggctatcagaggggctacaacagcaaaccacatcgtaaatggcctcgaccaacctgaagaaacacaagcggttaatacaattgaaggtccaaatacaactgtgacagaagaagctggtgtgtcgggaactgaaacttaagcaaaactttctatctctgctcatgatcccagacgctgcttcaaaattgttgttgaggtcacccagcttgtttggattgtgaatactactgttcctgaaaggctagatctagaggcaatgttttagctttaactagatattcatatagcaagtaaaatcggtgttggacaaatttattacagtgtaaaaatgacccggtgtggaatgcagttcccagcaatgttgtcatttttcacgtgggaataatttgaagtctgcgatgaagaatctttctaaagcatgaattcgtgttggttagcaattagcatgctttagaatataaacttgtgcgtgcttgatcttgtagatcaatggtgcatcataattcattcaaatttggtgacttcgttcttcattatagcttgtgaagaatgatttaatgatagatcaacttattctgtcttaaaaaaacaaaaaa

SEQ ID NO: 31330 - DNA, 2090 bp, Zea Mays
cccatctctgccttgcttcctcggttgttcctcccccttcttttattaggttttttttgtctcattggatttgcgcctgtgctgctcacctgagcgcatactagtctctgcatcagctgcatcagagagtagagacctccgagctgctcttcaacacgcagattgggcagagccgcaaggtgcctgccgggagagagtgaaaagtgagagagcgcgcgctcaagggggccaaaaggaatttttttttatccagcttcttagcttgattctatctgatccgggagagcagccgccagtccaactaatccttgctgttggtgtgccggggctttgattgctctccagatctgaggcacctgctgggtggattccaggaatcctagcacgaagttgacagtggagttctcagggaggaaggaagaggctgaaagggcggcggagagagaaaggctataagagcgagctgggtccctcgaggatgccatcaagaaaccgcgtggaggggagggcgatgagatgagggatgctggccgcggtgatggactactttagctcctgctggggcccgcgatcgggtgccgggcaccgggaaaagggctccgacgccgctggccggcaggacggtctcctctggtacaaggacgtcgggcagctcgtcactggggagttctccatggccgtggtgcaggccaaccagctgctcgaggaccagagccaagtggagtccggatcgctctccctggctgacacgggcccgcagggcaccttcgtcggcgtctatgatggccatggcggcccggagacgtcccggttcatcaatgaccacctcttcaaccatctcagaaggtttgcaactgagcacaagtttatgtcagcggacgtgatccggaaagctttccaagcaactgaggagggctttctttctctagtcagcaaggaatggtctttgaagcctcagattgcttcagtgggctcctgctgccttgttggtgtaatctgtgctgggactctctatgttgcaaacctgggcgactcacgtgcagttcttggaaggcttgttaaggcaactggagaggttttggccattcagttgtcatcggagcacaatgcgtgctatgaggaagttagacaagagctgcagtcatcacatcctgatgatccacatattgttgttctcaaacacaatgtttggcgtgtgaagggtatcatccagtcagaagacgggcgggcgaagcaagaggaagcacgcgcgcgttgtcgctaagggagaacggagccgcgccgccgtggaaggtttgactggcgggcagagcaggagggtcgtgccactgcggaagagggttgctgccaccacctagggatgtaaatgatctcaagatctattggagatgtatatctaaagaaaccagagtataatagagaaccgcttcacagcaagtttcggcttcgagaaaccttccagaggccgatccttagttctgaacctcaaattactgaacatcgaatacagccaaacgatcaatttgttatatttgcttctgatggtctatgggagcacctcagcaataaggaagcagttgaccttgtccaaagtagtccccgaaatggaatcgctcggagactagtgaaagccgcgatgcaagaagctgccaagaagagggagatgagatattcagacctcaagaagatcgaccgtggtgtgagaaggcatttccacgacgatataactgtcgtcgtggtgttcatgccatgagcaaagctagctggagcaaaagcccctcggtttctcttcgagggggcggtgtcacccttcctgcggagtccctcgcacctttctcagctccggcatggttgaagagcaccaactgaagctgctgctactcttgaaaggaagagcacagtgcaggtctgcaggagagatgaaaaaagaacagcaatcaagtgtagcgttacacttgcacctgctgtgttgttgctcttcgcgaaactactgtcttgactctagactacgcctggtaattagtgcactgatagcgacgcggagtctagacagtagttttgcaaagagcaacaacacagcaggtgtaact

SEQ ID NO: 31331 - DNA, 736 bp, Zea Mays
aaacgtttttcttgattttgttttcttttgactgagtcattgaggattgatatatctgtgtacggtcgttccaccggaagaccagaataccactacgcctatgtagcacactacatgctaccaacaccaaacctgctcgtgagaagcctatgaagcggactaggacatcgccggaggggaagaagaacgggacatcgccggaggggaagaagaacgagagcctcttctgatgcttgacttcgtgtacaagttgtagctgaatgttcctcaaaatataggattaactagttctgtaacactaacaccccggcttggttatgacttagaaactgttaggccatgtttggttcacatctcctaaagtttagtcacttgtttaaaaatgttaaaggaggtaactaaaaaaaacctcttaaataggacattatagggactaatgtttagttcctaaaatttaggagatgactaaaggaaccaaacatagtttactaagccttagtaaacgtgtgaataaatgcctctcttgtgtggcggctatttttatttctgcatattattttcatctgtttaccttgatgttattgcaactggaattgcatcctgaaaattggtaggatcaatccttcaccaaacatttgtaggattaggaataagtgtatttaggccaaccagcattgtgaagaatgtaattctagtcttcttcggcacggttattatcaacatcggaaaggtcaac

SEQ ID NO: 31332 - DNA, 3482 bp, Zea Mays
cggcgcccaaagatcgaagctccgagcaggaaacgccaccgccctccatctcccccgtgtccctagccaggagcaccgtccccctcaccaccccgcctaactttcctatcctcatcccgacgcctggagatccatcctcaaacgccgctgctagggcaccgtcccgcgctaggaccccccgcgcctcgcaatcatgtcaccggcaactctgacgacctagggctcacagaggctagcaccacgatggccgacccgggcgcctccgtcaacatcgctgcgcgccaccacctcgcgtcgcagctcgcgaggcagccgccagtgacgcacacgggctggtggggaggggcgcgttcgtaccaccatgggaggggcgtggggcgtggcatcaagggtgagggaggggcgtcgaggaggcggacggcaacaagcccacacatccaacaccctaccaggtctttgatgctgctgcttcaccaaacaatgaaatgctcttgatgcatgattcaggagctaggaggatatctattgtcgtcgagttacatgaagttgactttcctctgctgctgttgtgctcagtgtggatgacattgtgctgcctcaggcaatgtcaacctcaacaccttgatgaacatgttcagtgtgcttggtgctggtggtggccttggtggtcgaaatgcttctaatggtccctttatgtggcacacatgaatacctacaactccataatgttgctgaatgattaattatggaatgtggacaatgcaagatacattttgagtacccttttgatctaggctctggaccgccatgcttgcgtcggacgcgggacgtccacgccgccatcgcccgtgagcagctccgacagcctcatcgccgcgttgcacctgctcttgtgtcgcaggctcgggttaccgtcggtgctgacaccgaggaaggcatgatccatgcggagcagcccaaggcgcgatgccacctccgctgtcacgcatgatgagctgcttcgcctctggcaccgccttgttccttcgcgatctcacattggacggtggatgaacttgggcttccaagatccgtaatacaaggtaaattgagtaccttttgtgacctcttctgtatttctaggcctttgtataacagctgtggacaaaacctgtaaacatgttggatgaactggagcagctattgaaaggtaactctatggtgaaagagctaacgcctaggacaaatgactaccttgtttcatttcgagaatgtatgtccaccaggattttatctgttaatttgaacaaaattcatatcaaagcacgacaggtacttcttgatatttccttgatttgcacagtgattgagtgagcttttaagggtacgaatgtagcagcctagaataattctatatttacttactactataaagagcgggagcaaaatatagctatacaattgatgtatatttagcatatcaaacaatgctcaagatacttaattaattgcatactatagttaggctgtatataccaatgcaatggtcactagcaagataatgcagcctcacagtcttatgacatcagccaatatataaattagaccatttttgttgctgcaactgcaactaatactatgttgaagtgtttttcgttaactctgctctgaaaatgctttttgcttcactctttgacatatctatatgactatatagccgatgcctgtttttactatatgcttatcatgaatctcatgttttccatatgaataatgctagctgttgcaacatctttgtttggagctaatgatacatttaatcctagacttgatggcaaagaacgggtgcaattttttgtctctctatttcctatttatgttgcacaaataattgtttccttttgttatccaaataaataattacttccttctccacccttttctccagttgtagcgagtgagttttagtaagggataaacaatagtaggaagaactctgttgtgtttcaatctcgagtatttgatggatggggcattgttctatagatggtgtatacagaaatgatcttaactgtcattttggtcaaaaccacaatagttctacttatgttagaaaatcaaaagatttaagtgtcttccatggtttaaagttcatgatgagcaaatttgacttatttttaattgtttatcatattttgagaataattttgctgcctattcaacagataccatggggggagcatttgatccagctagctggcaaacaagatttggtgttaggatgcgacagggcctccctccaatgcaaaatcacattaaccatgtcaccgctgtcaattgttttcttgagtttgttcccaaaacctcttaattattattgcccacggatagtcatgttatctacataatccgttttgccactcttcagggttctgcattgtgaatagaggttcatctttgtgattagattgccaccgccgctgctttctactcattcgacgaatgttttgcaaagaagaaatctggtttatcttaccctcgattccttcctatgatacaactaacaaaatgaattggtacattcaggtatctttaaaaccttttcacttccaaattagaatgatatcatgctcaagaggtaacattttctgatgttttttattttaatagtaattattggtcgctgactttttaaaactatttgtgttgtacttcaagcatcttctacactgcatctaagctttgaagagttacggacaattttgtactaattgttttctttattttcccaaatgtgtgccacttcctttagtatttttgcagtgcagacgattgaaaactactgttttacatcacctctctgtcataggaatagtttactactctaatgctcattctattaacactaaaaaaagatatatcgcttgaaaacaggtatgtatttcaatcttctagatttatatttctttctttatatatacaaaacagaaacgattgaaaactattgtttcccgtcacctcctgtcatagatggcttggaccctcttattatcctgggagcctcggtggtttggaagcatagaaacagagtggtgttcggtagagtttcttccaacctcactcttattctggagtctgctaatgaggaaagcgagaaatgacaagttgcaggagccaagggttatcctttctggctgctccaagccatataatttagggtggttggatccttcatggatattttaatgtacttctgttgttggcctccgtaagaagtgcatgtatcccgggcgtctttcagctctttgtattcttcgtcttttaatatagtggggcgcagttctcctgtgcttttcgagaaaaaaaaatatgtgcatctatttaagtctcttaccaataagtgtttataaaatatgtttcattgttcttagcttgatatgtggtaaggtcttcttctttcttgatcatctatgtatgccttaattcatatactccgaaataat

SEQ ID NO: 31333 - DNA, 1036 bp, Zea Mays
aaggaaatggctgttataataataatactacaaaagcaattgcatcgttccgagtagcacttttccaaagctctaccaataaggaaaaaaaaaaactcttctccacgcgtccttcctattctcctcgtcatcttcctgctgcgcgtccctgccagcacagcgccgcctcccctaacggccccaccatctcctcacatcgttatcgtgtcacggcctctcggcctcgcgcccttctgagctgtcgtcgtctccccctctctcgctcggctgtcgccgcggatctccctgcgtcggccgcaacgatggcctcctcatccgccgcggcgtcggccgccgccctaggtgctcgtcgcctcgctcgccgatgactccccagtcgcccgtgacgccgcgctcgctgccctccgcgacatcgcgccgttgaacccgatgctcatcctcgactgctgcgccaccgtctcccgtggcggacgtcggcggtttggcaacatggctggggtttttcttgtcatggcatctgcagtcagggctctcgatcactctgacgccgagagcgagttcctccggaaaatcgcgaagattgcaactgctgagattgttacctcaaaggaattcaatgttgattggcaaagagcagctgcttgtcttctggttgctataggttcacatgatccagacttgatgatgggggaaatttttcttcacttctctggaccaacttctgctctgccagccatgttacaaatacttgcagattttgcgtcttctgaagctttgcagttcaccccacggttgaaggacgtgcttttgcgtgttttacctatcctaggaagtgtgcgagatggccaacggcctgtttttgcgaatgcattcaagtgttggtgccaggctgcatggcagtacctgggagatgccccctctgagcttcctcttgataacgatgttatgtccttcatgaattcagtatttgagttacttataaaagtatggacaggctcacgtgatctaaaggtgcgtccgaattttggctttgagt

SEQ ID NO: 31334 - DNA, 2143 bp, Zea Mays
ccccctcctccccggtctcgcacgcgatgccccgccgtgacagtcgccgcccatcaacggcctcgccctccttcctccatcgtcccgctcgcacgaatctagctagctaggcgaagagctcgagcaagacgggcgggtcggcggcgcccccgcgggcccgctgcagcgcgtcggcggcgcgccagacccaggcatcggcggcgcccgtcgtcgtctcctcgcggtgccgcctcatgtggccgcccagcgcctgccccatctcgaagccgagcccgcagacgtggcactcgtgctgcgcctgcggctccctgtctcctcctccgcctccgccgccgccgacgccgtcgccggcctgctgatgatgcttgtgctgctgcctgagcgccctggcgccgacgccgagctcgaggccgtggcggccccgcaggtggctggtccggtggccgccgagcgcctggaacgaggtgaaggcgcggctgcaggtcctgcacacgaacaagctattccatggcggagcaggatggcgacgcggggcagaggccacccgactccgttccggttattatattggtttaaccttggatcgcgttaattcgggccatgaggaggttattccggtggtttgatatcggatctcgttaattcgggccctgaggagtttgtgcgggttgaaatccccaacacgctaattcgttcgggaacattcctcggtgctaatgaagactcaactagaacccttgcagaaatcgagaagaagattgcaagggctaccgtgttacccagaaatcatggggagaatgggagaaactatgttcccatatgaggtctcctattcttcagctgaagatcatacttgctgtggagcctttgatcccttcagagggaccaaggattggagagaacattttcggttacacgatagtggacatcttcagtagcagctgccgtggccaccataagaatcctccttcagagccatatgtccttgaggttggggttttgcaagattatgttggaagtggaggctgtgtgcaaggcgtgacagcgtgtcgtggtcaaggaccctaagctctagcgccaaattcatatcacatttgttctagaatgagatcatgaatggtccctggggttggcctggttcacgctccattctcagtgcgttttccgacatcgttcttcaagcaagcatgcgagctggctcctattttcactgagcttgtggattgtgtgagcttagatggggagtccttgcaagctgctttgtctagaacaaagcaggttcatgaatttaccgcaaggctgctagatattcatgataagatgatgttgataaataataaagaggattaccaatgctagaatctgtatggattctatcagctgttcgcctactgatgcttatgtgccaatttagtgagactggagtcatacactccatacaaatctatacaaaatcaaagtggttggcaatgcagtgatgctcggtgaaatcataaactacgtgcagtccctacaatgacaagttgagtttatgtccatgaaactggccaccgtgaatccccaggtggacttaaatagcctgcctaacgtcctccctaaagatgtacatcagtcttgtggtccgccacatttctcgctggagacctcagacgcttcgttgtcgtacctcagccagcctcaccatggaagccctcttggctgcatggacaaccagagttgtatgcatccacttgacacgacgttttgcctggcgataaatccgcagtatcatttcctcaacggtgttagcgatgcatcgtctcagctaatttgatgcttgtgtttatggaaaccaagaggtggcgctgatccattggaaacctggttgtgtatgaatgggtttccagctacttctattcttggagatagaaaccaacatgtttggtttttgtttttattcgctttagaacaactcatttttgtacgaaaagaggcatttagctataattgtttgttgtagtatgtttaccgcaggatagccgttccatgaaatacataaaaacctgatactgttgttatatttggtttagtcatgctcttatggaacctttaatgaggatttttctatatcaagatatcatcgtcatcgtcattattattgcat

SEQ ID NO: 31335 - DNA, 817 bp, Zea Mays
atcaccttcaacccggcaatagcctcccaggacgtgagcggcgcgacggcgtcatcgtcgaggaggttctggcggaatgagagcttgcggagatgggggagttggccgatgcgaggatcaacagaagagaggcggttggcggtgaggtcgacctcctccagcgtgggtgggatctccacctcgcttagatcgtgcagctggtagctcgtcaggtcgagggcttcggccatggggcggcgcatggctctggcgcggtctctgcaaccgctgcacagcgccgtctcggcggcccggctgacgtcgcggctgggggcggaggtggaccgggccgtgtcgcagggtacgctctgcagttcctacccgggagtctgagtctgatacagtagacaggtctcagtgtccctcgataatgaaaggaactgctccagatggcagcaacatcagcagcagatagttgtaagacttggtcatcataataatcattcttgttcaatggttacgttgtttatttagtggcactttttgctatgcgcttaccataatacattcctggtaacggcttttcttttgaattctatgtgtggtcaaggttttaaagagcatagtcatgttcatgtacgcctgtctccatttatatatgtggagatatgggcatcagttcaaagctgggatcaaatttctgggtagcatcccggcaaaatgtgacattttgttgcaaatgttgtttcattacgtttaaagtgtttttttctcttgaaatatagcgaagattgaattgaagttgatgttgggacattcaaacttacgccatcttcag

SEQ ID NO: 31336 - DNA, 1976 bp, Zea Mays
gtctcaaccacccacgcctcatctagagttgacacgcgccatgtactggacgattggccgctggagacgacgcacgctcggccatggcgctcgctctcctatccccctccacgccatcccatcgtatactgcttcgtcctattccatttccatctctgccagtcgcgcgcgccactagtgccggtagcttcggcctcgcgttcttctgccccctctctcgcggttcctcctcgctgcagaggaccggcgcggcaggcggcgttattgatagtgccggagagggctcatcggaagaaccggtcgctggatggctcagcgcagacctgctcaggcggatatcaggcgcggcggacgcggaccgggtcctggacattgttgccgagtcagttgaaggcgcgggtgccgctctgggcgcgcccgagtgcaacgcgatcgtctccgccgcttttgaccgtggcaacatcgcgctcgctctctcggtcttcgaagccatgcggtccggtttcgcgggagttggaggctggaggtgggcaaggcctgatgtgaggacttatgcgttgcttgtacagcggttggcggccgccccgcgtgttgctgatgcaatcatgataattgattatgtgtctcgcgcaggtgcttcttctatggatgaggttcctttcggaatcattgttcgctgtccaacctgcatgatagcagttgctgttgtgcagcctcaggatggaactcaggttgtttcctgttcaaagtgtcgatatcaatatgaattattttctggagacattacgagtattgaatccgaagaagttagcatggatatttcagccctggagaaagccttgagatttattaatatgaggaaagatggtattccagctgctgtccactctattgtgatccgctcaccttcaggaacagcacgtacttacagatttgctacccagaatgtaactcttcctgctcaagaaggagaaagggttaccatttccttggcggccccagttaacgtttaccgtgacatgggacccctcaaggttgctgcgcgctcacaaggatttaaacctggagaacctatgtgtctcactaatcacatcaatgggcaagtctcgaagttgctaagagctccatcaaagaacaagggaacatttttccttagcccatatttattgcaactgccattgcatcagctgccataggaacaacactaaatggagtggtcctgccaaaaattcaaaaggcaagtccaattttgacaagaaaatgtttctccatcatgtaaatagttttcttttaaggtttgattgagtcaatgaaattagattcgtctatcaggaaccaatgatggtagcaaatgattcttagcattagcttgtcctatctactccatctatcttgtgatataatgcatttcaaaaaaattcagacaacttaagagaatactcaaataatgcatgcaccgatggattaaacccaattaaggtgtttttttttattttcaaataatgatttccttcttaacaaaattttgctagatctgaacataggcactaaatagaatggtttattcaatataagttttagaaatcagaatgcactatattcgaagatgaagggagtataacattataagttaggtttgcattaataaccattcggcctttacttgattcattaacttatcttttctcaattatatacacagttcttgtattgccttgtggattaatatttcagggtggtagctagggtggtaatgggctctaaattttacgctataaaatttaagaatcgaatcggattaggaccaggttttatttctattcattttttaactaaaatttatgaagggccataactttttgtgaagaaatatttggatcttgatccattaccacccctagtggcagcctagtttccatgtatgacaaaaaaatggaatttgtttccttgaggcattgacttatgtctcttgtttt

SEQ ID NO: 31337 - DNA, 3428 bp, Zea Mays
cgtttgaaatccgttgcagcgttttcatatttcgtttcagcgaaaactcgtcaaatagaaaaattggcatcaaaattttcgaaatctcacaattgggccttctccgataaggcgataaccgaaccgattccgtgaaccgcccccgaactttccatcgaccttttctcccctaaaaaaaaccgagcgattccaaatcagactgccttccggttccccatctcccctccctcagcgcagactcagccatggcttccgccgaaaccctagcccgctccccctcgcgcgagccttcctccgacccgccccgcgcaggctcttccgagccccaccacaacggcgccggtgactcgtctcgccgccgccgccgcagccgctgggagcagtctaacgacgactccgccaacaactccggcggcgagggcggggccgtgggccggaagcgcaaaacgcggtgggccgaggaggagccgcgcccagccatcgcgctgccggacttcatgaaggacttcgcggccgagatggaccccgaggtgcacgctctcaacgcgcgcctcctcgacatctcgcgcctgctgcagtcgggcctcccgctcgacgaccggcccgagggcgcgcgctctccgtcccccgagcccgtctacgacaacttcggcatccgcataaacacccgcgaataccgcgccagggagcgcctcaaccgcgagaggcaggatattatctcgcagctcatccgccgcaaccccgccttcaagcccccctccgactaccgcccacccaagctccagaagaaactctacatccccatgaaggaataccccggctacaactttatcggcctcatcattggccctcgtggcaacacgcagaagcgtatggagaaggagactggtgccaagattgtcattagggggaagggtagtgtcaaggaagggaagtttctgcagaagagggacctcaagccggatcccagtgagaacgaagatctccacgtgcttgttgaggcagagacgcaggaggcactcgatgcggctgctggtatggtggagaagctgctcaccccggtggatgaggtgctcaatgagcacaagcggcagcagctccgggagcttgccgctcttaatggaacaattagggacgacgagttttgtagaacatgtggtgaggctggtcacaggcagtatgcttgccctaacaagatgaacacgtttaagagtgatgtgcagtgcaagatctgtggggatggtgggcacccgactattgattgtccagtcaagggcacttctggtaagaagatggatgatgaataccagaacttcctggctgagcttggtggcggcagtgcacctgagtccatgaacaaatctggtggtccaatgttggctcttacaggaagtggtggtagcggtggtgcttctgctggaacggggagtaacccgccttggtcagccggtggtggtgctgctgtcattgggctcaatggtatcaagaaagactatgacgagacaaatctgtatatcggctacctgccacctacaatggatgatgatggattagtcagtctgttttcgcaatttggggatattgtcatggctaaggtgatcaaggatcgaaacaccggacagagcaaaggatatggatttgtcaagtattcagacgtgtcagaggccaatgcagcgattgctgcaatgaacggtcaccatcttgaaggtagagttattgcggttagagttgctggaaagccaccacagccggcaccagcagtgtcagcacccccatcgtatcctcctacggatcctacttcaggtggatattcctcccaatcctacatgggggtaccaccaccacctcctccagggagttacgctccagttccttggggacagccaccaccgtatgcttcatatcctccgccaccaccaggctctagcatctacaatcctgcaccccctgcacctggccatgctgccccacctccatatggggtgcagtatccaccacccccagcagctcccatccctccaccaggcactacatcaagtgatggagctcagaactacccccccggtgtaacaccaccaagttctggtacacccactcaccctgttgcaacatcagtatatgcatcatctggcgcaccaaatgcaccattgatgtaccctccaccaccttatagttattccccatactatcctcctccaccatttcagccaccacctccaccaccactggctagtgttgatccctctcagagtattgcaactgcaccttgggctacccacagtgcagtgcctccaccaccaccaccacctttgtcctccacaaccgaccagcctactgctccctatggtgccgatgcagaatatgacaagtttatggcagatatgaagtgatataagcgaagttgggtgattcttccaatgaagggcaaaaggcttgatctttcttggagcttataccaacctgatttatttcttgttggaagtttgggactcacatcttaaccttgctgtgtgctgttgtaaaccattgcagaggttgcatgcttaagaaggcatcaagtgttactggctcagctggcatcgaaatatttgcttatgtccttgaactattttaaagaaccttttactaatgcttttgttttgatatctattcttgttattatttgagattatcctgttatgtcactttaatgctctgttcttcgtgacagtgtgttaaccctcactattattcatattttgttcttcatcttgatttggtagtgctagcagtccttttgatctggaacagaaaagcttgctgcaccatgctggttggtataacaccaaaattaaaatgcatgtttggtatcttctgatgaatctgtcatgcttttctatcttatgacttcacctaagttgtttggcagttgttgtgacagcttggcacaggcaatagcacttgatgaatatcagtaggacatgctggcatgcagatctagtctggagtcctgtgcgcaagacacttgtcacaatgatatttgtgagatggtctgaaggtttggaggttggcttcgattatgtttttctaagtaggatatcaccataagcttattctagtcaaagaatgcgatagtcagtccacaaccagcattaggaaccttcatcatgttgcagatataccagcttcctagggttgtctcatagatttctaggtgttaactgtcctactttttgtctattttttgaagttactttcttatccagtgtgctgtgtagatgggaaaaaatatgtgatgtaatgattaagggtacaagtctttttcccttgtcatttgtttcctttctcccttgctttcttcctttctcccttaatgtaagcctagttagttttgcgatggatgttttttcatgattgtggtgtctaagtgggacgcagcctcactgttg

SEQ ID NO: 31338 - DNA, 1829 bp, Zea Mays
ctctccctctccgctccccattgccgcattgctctccctcggctcggtccctctccggctctccctcacggcctcgcccactgcgccttcgaggagctccgaatcccgatcgcctcggtccccgcgagctcacatggtgggggcgcgcaccagaggctagggttcccagttcccatcattctcctgctgattaaaaccgtggggttttggagagcctgaggctgtggcggcggcaggaatgaacggggaggtggaatgcagcgtgtgccatgcgaaggtgccggtgccgccgccggtgtcgaaagcgtacgacagccaccggagcactgtgtcgtcgcggcaacgtgcgctaaacgtgctcctcgtctccggcgactgcgtccttgccggcctccaggctagacgtctaaaggtgggagacaagccactttttacagtttcaatatttatgcaggctgctcgcaataatgttcttctttcagtacctgcttttctctatgctatcaacaactatttgaagttcataatgcagttatattttaatcctgctagcgtgaaaatgctgagtaatctcaaggttctggtaatcgcagtgcttcttaagatgataatgaggaggcgattttccgtaatccagtgggaggcccttgcccttttgttaatcggaatatctgttaatcagctgaaatcattgccagaaggttctagtgtgctaggtcttcctgttgcagctggagcctacctatatacattgttttttgtaacagttcccgcattggcttcagtttacaacgaaaaggctcttaaaagccagtttgataccagtatttaccttcagaacttgtttctgtatggttatggtgcgatatttaactttattgggcttgttgtcactgctatcatccaagggcccagtagttttaacattctagaaggccactcaaaggccacgatgtttcttatctgcaacaatgctgcacagggcatattatcatcatttttcttcaagtatgcagatacaattttgaagaagtactcatcaacaattgcgactatcttcaccggagtagcctctgctgtgctgtttggccacacactgacgataaattttgttcttggaatttcaatagtaatcatatctatgcatcagtatctttctaaccaaattaaggacgaagtgcctagcagcaaagttgaaatggctgaagctcatgatcacagaaaagaacctagttatgtcaacgtgcctgattcaggggcaagtgagtctaaacaccgccatggatctgacgagaggcagccacttcttcccgtatgattttgtagaagaggcgcactgtttcctcaacagagcagcatgtaaagagagtatttttagcgggtatttgacctaattgtctctgaagcaacattggtgccatgctgttggcggggtaaagtatatgcatattcggcggcagtgacgagcttcgtgaagtacactaatagagtaatggtctttggatgaatgagtcgatacctttagcctaatgggtggtaaaactagtgtgataagatcagcgaggaataaagtcaccaccattttttcctgtcttgtgagttggtgagttgatattgatacagccatcagccgtggttctactctctctctctctttctcgcggcaccatgtaaatagaaatatcagttcatttctgatggcgcgtgccacggtgccaaccagagattttattcttgtatgtgcgtgttgcatgagagatactacggcgtgtttactgatcactgagctttgcatgtcttctgaattacagcaaaacgcctaattggta

SEQ ID NO: 31339 - DNA, 3153 bp, Zea Mays
attcaaacaacccctcggcacccgtctccggtctcccttccgtcattgcgcgtcccaccttccgtccccacaatttccgctcccctcacgagcatttcccccgcctacccgtcgccgacggccatggcccacctccagctcacggcgctcgccggcggcgccgacgacgagatggaggaggtcgcgctgctgggatcctacgacgaggaggccggggtggggccggaggcggagggggaccgggcggaggccggcatgcggcgggtgcaggtgcgcgtaaccggcatgacgtgctccgcgtgcacgggagccgtggaggccgcgctctccgcccgccgcggcgtgcgccgcgccgccgtgtcgctgctccagaaccgcgcccacgtcgttttcgaccccgcgctcgccaaggaagacgacattgtagaagcaatagaagatgctggcttcgaagcagaaattcttcctgactctactgtttctcagccaaaaccgcataagactttgtcaggacaatttaggataggggggatgacttgtgctgcatgtgtgaactcggttgaggggatcttaaaaaaattgccaggtgtaaaaggtgcagttgttgcattagcgacctcattgggtgaagttgaatatgatccttctgccattagcaaagatgaaattgttcaggccatcgaggatgctggttttgacgctgcactgttgcaaagtagtgaccaagacaaggtcctattaaatgtccaggggttacatttcgaggaagatgtagatgtattgcatgatatcctgaagaaaatggaaggcttgcgtcagttcggtgtaaattttgcaaactcagaagttgacattgtatttgaccctgaagtagttggtttgagacagattgtagatactatcgagacggagagcaacaataggctgaaagctcatgtacaggatccatatatacgagctgcatcaaatgatgcacaagaggcctctaagacgcttcatcttcttcgttttagtttattcctaagtattcctgtatttttcatccgcatgtatcttgaggtgctcgcgaaaggaaagacatcagatgctatcaagaagcttgtagagcttgctcctgctacagctattctacttctgaaggacaaagagggaaaatattcaggagagaaggagattgatgcgtcgttagtacaacctggtgatgtgttaaaagtgcttcctggttcaaaggttcctgctgatggtatcgtcatttggggtacaagtcatgtcaatgagagtatggtaactggtgaatctgtaccaatctccaaggaagtatccagtctagtcattggaggcacaatgaacttgcatggtgttcttcatatacaagcgacgaaagtaggatctggaacagttttgagccagataatttctctcgtggaaaccgcccagatgtctaaggcccctattcagaagtttgctgattatgtagccagcatttttgttcctattgtcatcaccctgtccttcttgacattccttgcatggtttctatgtggatggttgggagcatatccaaactcatggtctgctgaaagtagcaattgctttgttttctccctaatgttctccatatctgttgttgtgattgcttgtccatgtgctcttggtctggcaacaccaactgctgttatggtagcaactggagtcggggctagtcatggagtacttgtaaagggcggagatgccctggagagagctcagaatgtgaagtatgttatttttgacaagaccggaacactgacccaaggaaaggctactgtaactgcaacaaagattttttcaggaatggatctgggtgactttctcacgttggtagcgtctgcagaggcaagcagtgagcatccactggcaaaagctatcttggattatgcattccatttccatttcttcggcaatcttccctcaggaaaagacagcatcaagagaagaaaagaagagatactttctcagtggcttctggaagtcgtggactttgctgccttgcctggcaaagggattcaatgttggatcaatgggaagaaagttttggtagggaatcgtgctttgataactgaaaatggggtaaacattcctgaagaagctgaacgtttcctggtagacatggagctgaatgcaaagactggtattctcgtagcgtatgatggtgacttcattggcttagttgggataaccgatcctttgaaaagggaggctgctgtggtcatacaaggtctaaaaaagatgggtgttcatccagttatggtcactggggataactggaggactgcacgagcagttgcaaaggaggttggcatcgatgatgtcagagccgaggttatgccggctggaaaagccgatgtaatccactccctgcaaaaggatggcagtgttgtcgcgatggtcggagatggcatcaacgactcgcccgcccttgctgccgccgatgtcggcatggccatcggcgcaggcactgacatcgctatcgaggcggctgactatgtgctcgtccggaacaacctggaggatgtgatcacggctattgacctctcacggaagacgttcatccggatccggtggaactacttctttgccatggcctacaacgtgatcgccatccccgtagctgctggcgcgttgtttcccttcaccggggtccagatgccgccttggttagccggcgcgtgcatggcgttctcgtccgtcagcgtggtgtcgtcgtcgctgctgctgaggaggtataggaaacccagactcaccaccgtgcttcagataacagtggaataagttccttttttttttggcaatttgttgtatctcactttatcggagagaaatagatacaaacgtgaatgttggtgtggacgtgcggtgcagtactgagagtcaaacacagaaacacttgtacatatcgaacagtttgcaattgcaaccgagttatacatgttaactatgtgagggatcaagagacatgcgacaagacaattctagttttctcctagtgttagtttggtttggaggataatatgatggatctgcccctagagtagaatattccctgtcacatgtcattcctcgccatctcttttaggcattatcggtgaggccgtcttcttctccacgcgctgc

SEQ ID NO: 31340 - DNA, 1914 bp, Zea Mays
atgccggagagcgccggtagctccggcaccgctgggggtcctggactcggccgtggattagtctctgacgaggtacaatcacgacagtcagggcgacaagtgagtgccctgaattttcaggcttctctagctgctaaggatctccaggtttccagtgagtcaaatccaaggctgcattcgtcttcaagtaccataagccatcatctcagattcaatcacctcaattaccatgaaaacaaggaagatggcctggggtctgaaaacgctgaaacaagtggtcttcaaagctcatctaggaaacctgtcatggtaaggggaagtctcattaatgaagctgttaatggtgacatatcaggagaaggaataagttctataggatcagagctggaaaatgttcctagcacagtctccactaatgaaattggtggctcaacttctgaatctggtttgggcccctcatcgatgacatctgaaaggatcatgtctgactcagaagtagagatatctccgcaagggacctcatccacaactgtcatgacaagtgaaagatcagatgcatctcaatctagcttaacatctgtgttttctaactcttcaactgcatcatctgtgatcgtggaaccaatgccagatccaatccctacaacggcagatgtccccatattcagtgggccacatggtgaagctggagggagtatattacatgacgacatgatgagcattttctcaaatgacggtgtaggacgctctatagattcaagcagcagtgaaacaaggaggagtcacagaaggatcctgtgggatgcattttccaggcgtggctcaagaggttatccagaatctgatgctgatgaaatgggattttttagtacatggctagaccttggtgatgatatttttgaagagttgggggaatcaagatattttcatcgcaggcgacatggttcaatcagagtaagccagtattcaagatcccggattagggagcatcgccgtgctgtttttgatagtggtaatgaacaaaacactgctgcatgtcctttggggattcatcaaattggccgatgcacctgtaattctttctttattgctgaagaatctagcgcccgagcaagtatatcaagaattgtcatgttaactgaggcgctatttgaggtgttggatgaaattcaccgtcaacctgcatcactttcactttccatggtctctgttcaggctcctgaatctgtagttgattcgttgccatgtgccatatctgcctaaccgaatatgaggacggagaccagataagaacccttccgtgcaagcacgagttccacctgcaatgcgttgacaagtggctgaaagaaatacacagggtgtgccctctgtgccgtggagacgtctgcgaagtcgcctcgtgaagaccttggcgctgccatccttccgatgtggcgccggtggatagggcaccaccgccaggcgccagctgttccgtggttgaagctggttcggtcaggcaatggtgatccaacttggacagttgacaccgcaagagcacgtcaactttgactgtctccctgccgaagagaatggccaaaccaaccctgcgaccgatgagtcgctgttcctgtcatcaacttttaagataccgagactttgtatacagtagcttttgtagcctcccgcctcgtgtatgacagcctgtacatatttgtaaattctggaatcaaatgtcacaatcccctgttctcgtgacctgatgttgtagggaacatattcggtgctgatggagccgggaacagagatgtgctgatggagatggaacttattcggtgctgagccttcgtggcttgagcagcggaactgctggtgaaggtctattacagagcatgggctaactaccgtaaataacaaaaattaaagacagtaaac

SEQ ID NO: 31341 - DNA, 1630 bp, Zea Mays
actgaatttgcttatttccggctcttgttgaaaccgccacccgattcctccgctcgccaaatcctcgccgtgccctcgtagcaattccttgcgtcggcgcatcatcgcggcctcctctccctctctctctctatctctctcaatctctccgttggcaaatcgttgaatcgacgtgcttggccccggccgctctgagcccgccgccagcctcctcgtctgaagaagaacgacagccgtcgggctccggtggtcccgccgaagaacggcaggtagccagccgcgctcatcacgccggcgactcgattggcattgtattggcctttccgtttgttgagttctcgaagcaaaacgacctgatgagattcctcaaggggagcaaggtggaggtattgcaggaggcagatgtgccgtttggttcttggaggcctggtgagatcgtctccggcaatggacacgcctactttgtgagatatgatgaaagtcccgttgactccagcgtggctgttgaaagggtgccaagaaggttgatgaggcctcgccctcctgcggatgatcctgtacgctggagtttgggtagtatcattgaggcctttgacagctactcgtggaaggttgccgaggtggtgagagtgcttggaaagaatcaatatctagtcaggctccttgggtcctcgctggagttgagtgcacatgcatcggttcttcgaatgaggaagctttggctagatgacatatggattgtgactcagaagtattctgcaagatgcttggatggtggtgcattccgaggtcaatcaaaagataaaaatttagaccataacttcagaatggacagtcgtcaacttgagaaccagaatgcctttgagggtgatacatctagaggcatcaagagaaaatcgtctgctatatcaacacatcctcaatgcagtgaaatcactaagagattgcggacaccaaatagagatggaaggtactcaaagctggttgatagaagtttttcccctttggctgaaaaggtagatgatgttgattccccatgcattattctacgcgggaaatgcatccatgctggtcataaatggcatactggaacaactgaagaatttagtgatacagagagtatatcatcttctgttggcagttctagtcctaacagtacccctcatagatcacaacattataatttggtctaccaaagtggagatagctgtagtagaactgatgatgatgaagcttctacatctgaaagagaaacatcagaacatgataacaatgggtcgagggaagaaacccatgtgctggaattacatgcttatcgcgcaacaatgttagccttgcatgcttgtgggtcaattagctgggagcaagaggctttgttgactaacctaaggtcaagctgggtcaagactggttccagattaatactggttgctggataaaatggtcaaattagattggtttatcatccaaagacaaaaaggtgatctgcttgttgtgtgatttttcacagaacaagcatatttcttctatgccatcaagaggaccgaggagcagagggatctatgggtgttaggaggggctaaaaaactagatctcctaacaaccccaatcccaggtctttagatcggag

SEQ ID NO: 31342 - DNA, 491 bp, Zea Mays
aaacgcgtgatccacgggcgccgcgattcgcgccaggatttggtacaacaacgtccctcacccaaagctggtggagtataagaaagatcagaactgggttacaagatttggtgattatcttgtttttcctggaggtggaactcaattcaaagatggcgtgggaagatacattcagtttgttgaacagattatgccaaccatacaatggggaaggcgcacaagaactgtcttggatgttggatgtggtgttgccagctttggtggatacctgcttgacaggaatgccattactatgtcatttgccccaaaagacgagcatgaggctcagatacagtttgccctagagcgtggaattccagcatttatagcagtaattggaacacaaaagcttctgtttcctgataatgtgttcgatgttgtacactgtgcaaggtgcagggtccattggtatgcaaatggcaagtattctatttcttcacaatattcataaa

SEQ ID NO: 31343 - DNA, 838 bp, Zea Mays
tcagtcatgaactcaagattctccagctttgctggttctggtggttagatagatgtcatcactgtggtactaatgcaacagctacaccaatgatgcgtcgcggacctgatggaccaagaacattatgcaatgcatgtggcctcatgtgggcaaataagggtctcctgagggacgtaacaaaatctcctgtacctctccaagctacgcaatcagctccgcatctagatggtggtaatggaagcgccatgtctgcgcctggctctgagctagagaatgctgcagcagccatgaccaatggccacgagtcatcgagtagtggtgtttaatccagcgatggggtaaaagccacgaggagcatcatcccggagtgatctctgcagtaggcggtcagctgctgtactataattgagttggaggctgcttagatatggaatccttccatttaccttggtgccctgtagttaagagctatgacagtgctttatcccgtgtcatgtttgcagccgctgcgtctataacgaagctatttcttgtcttgaggcgtgactgttaagaaccgttgaagtccactcagttttaaccgtgcagcaacgtcttcgatcaatatctcagagtacttagggagcgcttgccacacggagcagctaaaccaccgaaacgtttccattttcaactagaatcggactgtgccattttgaaatgcgtcaccgaaatgtaatcgatgtatatcgaattggcagaaggttggttccgtatatgaaccatctcagtttctttgcctgaattgcaaacttgcaatggtactttttttagtgcaaacttttaacttcgaaaatca

SEQ ID NO: 31344 - DNA, 1007 bp, Zea Mays
caattccccggtaaatcaataccactcggtccgcgacgctttcctctcccttcgcgatgccgacgatttcctcgcgttgcctcccttcgcgccgccgcctccctcgcgtcggccgtcgcctccccccacatcggccgtcacccctcaccggacatgaaccaattagagagctcaagtgttactcggggaagagggaaaaacaaaaggatctggacttattatgaggatgaggagttaattaaagcactatatgagatatctttagatccaaagtggaaaagtgagggaggttttaagaatgggtattgttctgttctagaaaatgaactcaaagcaaggctaccagggtgtggtctcagtgctattccacacattgagtctagagtgaggcattttaggaccaagtatggttctattgaggtcatgcttgctaagagtggttttaatcagatgacgatgcttttcgcgcttcctgagactcttaggagagaattcatcctgaacatgattgcagatgaagctcaaaggaagtgacttgtcaaattatcaatgaagaatgtcaggagcatttggtgaagagtgatcggcatatcaacttctggaagttgaattttgaagacgtttgaagtcctaagacatttctagaacatgaaaattatgaattcctaaggctagctttttttgactgactgtgttgttgactttgtgtgaaaataacccgttgtttgaaacctattatatttgctagctttatttgctattcagcaagacatataaagttgctagctttattggttgtctgtgttttcaactgtttgtgaaaataaccagtataaagttgttgtttagaacatgttatttgtgctagcgcaaagctgaaaataaaatcagtatttttgtgcgccataattttgaagttgttctttaaatcagtatttatttgctacggcagttcataattttgaagtaaaataactatttctgtgcggctgctaggcttatgtgtg

SEQ ID NO: 31345 - DNA, 378 bp, Zea Mays
actgaggattgtataccagtctaacacagaactaccaaaccgaccgagccgcgaacttcacccctgccttctctcccttctccgtccaggccctagtgcccgcgaatctcgtgcagcaagtgagcgccgccgccagactacgccaagtgtccagttcctcgtcgggtgatgaggagtactctagttgttcctgtggctggaaggcgtttccagttctggaggaggattagttaggattgtgtataagctttggagggttcctaccttcctgctattgtaataagttatgcactttgagtatatcaggacttgtaataaatgtaactcttcctatgcaataaacttcagttttagaaatgaaaagaatcttttataaag

SEQ ID NO: 31346 - DNA, 1949 bp, Zea Mays
ttacgacctcgtttcccaagagtccgctctctcgtcttcctcctcctcctcctcccccttcccgagctcctctctcttgccgtccacgctcgactgcgcgagacactggtcaacgcccgggtggcaggcggctctggtggtgtgttgtgtgtgtggtggtggggtcgggtgagtctagctccgtcgcttgcgccggaagaacttgtcgggagctgtctctagccctcgggttccatggggaggaacggtagcgtgaagcgctcggcgtcttcgagcgctgcgggtgctgctgcggggccgccgtccttctctgtgaatcccgccgactaccggttgatggaggaggtggggtacggtgcgcacgccgtcgtgtaccgcgcgatcttcctgccgaccgaggatgttgtggctgtcaagtgcctggatctcgatcagctcaataacaacatcgatgaaatacaaagggaggctcaaataatgagcttgatagatcatcctaatgtaatcagggcttactgctcatttgttgtagagcacagcctctgggtgataatgccattcatgacagagggttcttgtttacacttaatgaagatctcataccaagaaggttttgatgagccggtcattggctccattctaaaggaaactcttaaggctctggaataccttcaccggcagggtcaaatacatcgtgatgttaaggctggtaatatccttattgatggtgctggggtagtgaagcttggagactttggtgtttctgcttgtatgtttgatagaggtgacaggcaaagatctaggaatacatttgtaggaacaccatgctggatggctccagaagtgctccaacctggcactggatataatttcaaagctgacatatggtcatttggaatcactgctcttgaactagcacatggccatgctccattttcgaaatacccccctatgaaggttcttctcatgacactccagaatgcaccacctggtcttgattatgaacgtgacagaagattctcgaagtcatttaaagagatggttgcaatgtgcttggtcaaagatcaaacaaagagaccaacagctgagaagttgctaaagcattcatttttcaaaaatgcaaagcctccggagttgactattaagaatatcttatctggtttacctcctctctgggaccgtgtaaaggctctccagcttaaagatgcagcacaattggctttgaagaaaatgccttcttctgaacaggaggctctctccctgagtgaatatcaacgcggtgttagtgcatggaacttcgatatcgaggatctcaaggctcaagcatcattgattcatgatgacgagccaccagaaataaaagaagatgatgacattccaagaaacattgaggatttatcttcacggaaccatttggcaaagtcatctgcaaatgaatgcaactccagccagcgagcttttgccaccactttaaattcggatggaaacagccccaccatgaacgaagcttttgattttgatattagcgatgctgacactacaagaagggctgatggatatgaaagcaacacaaggcagaatgattcgttgccctctacatcaaagagagatccagagtcgaatcattgggcaagtgatggccagagacaactgacttctggtgggaacaatagctcaacatctgaaaggggctatggttttgagagggatgcatctgtgcaaatgatatctgacaaacaaagaagtgagatgagaaaaacagcaagccttagtggtccactttcactgccaactcgtgcttctgcaaatagtctgtcagctcctattcgatcttcaggaggcagtcttgcactgctgtagattttctataaggaaaaaagtctgaattactcccctcgcctatagacaatgttcacataaccccctaaaatatatttttagttcatttt

SEQ ID NO: 31347 - DNA, 3324 bp, Zea Mays
cgcacgcagacccagctcgatgccctaaccgtgcccaccggagtctcgttcccctccgaccgaggacccaagccccaaggttctccatctccagctatggagcaccatataattcagcaagtcggagagcatgagggggaggaggaggaggatggcatgggaacagaagcggcattcgagggggtgcacaatcacgacactttcaggtacaagcacaagaagaggtccaaggtgtgggaggagtacaaacccatcttcctgaacgggaaggttcagtttgcagagtgcctgtactgccacagccgcatgagctgcaaggactccaatggaacgagccatctctggcggcaccagaagatctgccctggcaagagggacgtggtgtttcggcggctcaaggattcctacttcccatgtgttttggtgaatcagagtgaaccggttacaccaggtgattcggtgaatcagattatttcagagacacttgacgacataagttcagtaattcccaatagattcaaatccaaggtgtggagagagttttcacctatctatgttgagggtaagctccaggctgctgactgcgtgcattgccgcaaacgcctcagtgcaaataagtttgggggaagaagccatctgagtcgacatctgcagacctgtcaggcacgaaggggctacaataatcagaagggaacgctttacccttctagtgttcctgatttgaagtccattgggcaagatgagctctcacctgccttggcaaatgggaaggttcacatagcaggatactccagcaaacatctctggtctagtagctctgctgacacttcccctattgtccggcccattcaagtgtcggcgcatcaacctctgccatcacaagattttccaagcctggggaaacagagaacctcatttacaaccacaactagtgacataaggaaggttgaccaaggaacagcttatcaagaactagccaggatgatagtttcgcatggttatcctttatcaattgtagagcatgaagaaatgagaagatttgtaaagagcctcaaccctatgattcatgcagatgcagtctcacacaatgatatagaaggacattgctgtgctctatttgagaaggaaaaggcaaaacttaaagatcaattgaccctttcctcccggcgtgtctctttgtcagcaagcatatggactcctgagggagccgaaccaacagtaaattacctttgtttgacagcacattttattgataaaaactggaaagttcaccgaatgataatcaagtttggcatgtttcggtcctcacctactgatgtggaaaggatggtacatcataaggaggcttgtgtaccagagtctgaatgtggagcatataatgtcatatgggatgccattagagattggaatcttgatcagaagattttgagcttgacttctgttggtgaggttaggaatgctttaagttcctcaaagctgaaggaaatacttgtggagaaaaaatgccttcctatcagaggcaagctatatgatgttgcttgtgttgatgatgtccttaacactattgcttccaaagtgcagcaaaatatcattcaccttgtcggtgacatggtaacagagttttttgttgcacatacatcttcatcgttgaatcaacaacagcttatggaagtcatttcacagatgagtctgaagtgtccacaagaagatgctaagtggtggtacaaattttattttcggcttgaagtttttttgcatttcaataagccatttccttttgaagaagcagcatctccagagcatgtcatagttgctgagtctatttgcaagattttgaggacgttttatcgtgttattgaagtcatttctgcctctagttctccgacagcaaacatgtacttcaatgagatatggaaagtgagaacagtcttgcaagaagaagcatcaagtgagcatgcagaaatcactgcgatggtcgcagagatgcaggaaacattcaatgagtactggcaacattcatacttatggttatgcatacctgttatcctagaccctagattcaagttcggtttcattgagttccgtctgaaacgagcttttggattaaaatcagcaagctacttatctggcatacgtgaaacactccaggaactcttcaatgaatactgcagtccagtggatcagccgaatgtgcgtgtgccaaaaagcgaatcttttagtctagatgacaacgactcatttgaagattgggaccagcacctcaatgagcaagcgagcagtcagaaatccacggaactcgataactaccttgcggacggtttggttccaaggaaggatgacttcgataacctgaactggtggatgtgtcacgccacaaagtacccgacactggcggctatcgtgcaggacatcctggcgatgccagcatctgctgttccatcagaagcagcgttcacaagcagtggaccagtaattccaaagcaccacagcatgctaagcatcaagaccattgaggcacttgtttgcactcgagattggatgagataaagcgattgtgtaccctgaactctgaacaaccaatgatgggatgcagttttgttcaggggatggtcctggctcccaaccagtgggatccagtccccagccaggattgggtggtggatcctgtgaaattcctgcgttagaaacaggccctcagaggtttggcatgctttattggtgatcttggacacttctggttctggaatagcatccctagtggctataccagttcgttgcaaatggactcgcggttgaaagaataaactgagctactacttcagtccaatgttgcataggaaacatatatggctggtttggtggccagggatcatcaggccagacaatctttctctaacaccataataccatcgccacaattatgtgtagtagcacatcttatcttgtactaccattattcatggtggcgtccacagcgaaaagtaaccgtacgcgtcgaattgccgatggattactggatgtatgttagcaagaaaaaacaggctggaaagtgcaacacagctggggagagtgcgaggcaaggttgagcagttgaccattggacgcatatgcatgtgtacgtaacgtgttcttatatgcatgcttcatccccatcagaattcagaaagcacatttcatcctcaggttttccctactcttgcacgcagccggtcaatcgacatttttaaacacgctgatacagatgctcgatcagtagctaaaattaaacacctgagattaacttggactgatataaaatatactatatcattcactgagtgtctg

SEQ ID NO: 31348 - DNA, 3633 bp, Zea Mays
attcggaactggaaatccatcccaattcccctggattgctggcaataccttcaacttcaagttgttgaatatgtgaatagtgatgccccttctcttcctgagtcacaacatcggggccttgttcaacgactcaaagggaagactggacgatttcgtggcaatttgtccggaaaacgtactgagtacacaggaagaaccgtcatatctcctgatccaaatttgaaaataacagaggtggctattcctgtgttgatggctcgagtcttgacttatcctgaaagggtttcaaactataacattgagaagctgagacaatgtatacgaaatggaccattcaaatatccaggggctaattttgttacacaacctgatggcatgaagcagagcttaaagtatggtgatagaaggattactgctcgggatttaaagtgtggatgtatagttgaaagacatttagaagatggagatgttgtcctctttaatagacagccgagcctgcatagaatgtcaattatgtgtcacagggcaaggataatgccatggagaacactcagatttaatgagtctgtttgcaacccttacaatgctgattttgacggagatgaaatgaatttgcatgtccctcagacagaggaagctcgcactgaagcgcttatgctcatgggggttcagaataatttatgtactcctaagaatgatcttcctttactcttttgtgctcataccttggtgatggaatggagaacattgatttgccaacaccagccttgattaaacctgttgagctttggactggtaaacaactatttagtgtgttagtccgacctaatgcgcacacaaaggtgtttctgaatcttgctgttcaagaaaaaatttattcaaagaaaaagggaaaaaaagaggggggagaggaggtaaaggaaacaatgtgtggaagggaaacaatgtgtcccaatgatggttatgtttatttccgaaatagtgaactgttatctggacaagtagggaaggccactttaggtaatgggaacaaggatggcctttactctgttcttttaagagattataattctcatgctgcagcaagctgtatgaatcgtttggcaaaatttagtgcaagatttatagggaaccatggtttttccattggtgtggacgatgtccaaccaggagaacatctaaatcggcaaaagaaaaaggaaatagacggagggtacaaaaaatgccatgatcttatttctttgtttgcgaaaggcgcgctcgcattgcatcctggttgcaacgcagcccaaacgctggagcataacatcactggtgtgttaaatgaaatcagatcaattgctggaaatgtgtgcatggatacgcttcactggaggaacagcccattgattatgtctcagtgtggttccaaaggttctccaatcaatatcagtcagatggttgcatgtgttggacagcaatcagttggagggcgtcgtgccccagatggttttctaaacagaactcttcctcactttcctataaattcaaagacccctgcagctaaaggttttgttgctaattcattctatactggtttgactgctactgagtttttcttccacacaatgggtggacgagaaggtcttgttgacacggcggtcaaaacagcagaaactggatatatgtcccgcagattgatgaaaggcttggaagatctctcagttttctatgatcagacagttcgaaatgctagcggtggtatagttcaatttttgtatggagatgatggcatggatcctgcaaagatggaaggaaaagatggcatgcccttaaatttggatcaattgtttatgaaagtcatggccacatgtcctcaaaggggatcagatacattatctccagtgggcatcaaacagatgttagaggataagttcttgcagcatgacacctcatctgatggtggctgtagtgcagagttcaagaaaaacttaactgaattccttgataaacgtatagaattaatgaaatgcacaagaagggcactccatctacatgaggatcatgtagaaaagaaagattcttgcctagaagaatctattgctgctattatatctggtatatctgcaaaacaacttcaggttttcttggacacttgcttatctcgttatcagtcaaagaagattgaagcaggagcatctattggagcaattggagctcaaagtattggggagccagggactcagatgacactgaaaacatttcattttgcgggagtagctagcatgaatgttactcttggtgttcctcgaatcaaggaaattatcaatgctgctaaaaagataagcacacctattatcaccgctcagcttttgtcaaggaaagatgtgctttctgcgcgcattgtgaaaggatctatggagaaagcagtgcttggcgaggttgcagcaaccattcagactgtcctgaaatcaagtctgccaaacttggttgtcaaacttgatatgcaacttatagaaactctccacatgggaatatctgctgattctgtgaagctgtcaattttgaatcatccaaagcttaagttaaaatctgagcatgtccgagtcattgatagagccaagttgcgaatatatccagctggaactgacaagctcaaacttcagcttgaactgcataacctcaaatccatccttccaaaagtgattgtgaagggcattccaactgttgaaagggttgttattgatgaagttaaagtcaacaacgcgacagaaagataccaattgttggttgaaggaacaaacctcctggcagtcatgggtaccccaggagttgatgctaggaagacgaaaagtaatcacatcatggaaacgaaccaaacacttggaattgaagctgctaggagatctattattgatgagattcaatacacaatgaaaagtcatggcatgaacattgatcggagacatatgatgctcttggcagatttaatgacatacaagggtgaaattctcggcattactagatacggcattgcaaagatgaaaagcagtgtgctgatgcttgcttcatttgagaaaaccgcagaacatctattcaatgcctcatacagtggtcgtcaggatcagatagagggagttagtgaatgcattatcatgggcattcccatgcagctcggtaccggtattctcaaagtcaggcaaaggctcgaccatgtgcctgaattcaagtaccaaccggacccgatactgtcgtgatacatacatgtggactgaagctggaactctgtacatatatatagctgggtcatacatgcatagcgtagcgtagcctagggcaaccctggcggcttgtcatttctccggtgaacatctaactagtctcgttccatctccatgaggcagactctaggtcaacaactccctcttcggctgcatcggcaaatgcgagagtaaaattgtggcaaacacttgctacatcttctaggcagtggtacatgatcgtgttacatatctctgcaggctaatgaagcctgggaagaatcattgtttttttcttgactagataaatatctgtgttgtaaaggaaaaataataatacaatgagaattaagaattacacgcgtgtttgccaaaccacgatacttcagtgaga

SEQ ID NO: 31349 - DNA, 1070 bp, Zea Mays
aaacgcagccgaagaggaaaggagagagaggcggcgaggatggggcggaagtggaacgagctgctgtcgtcggctccatggaggacgggggaggcggcagaggacgaggacgcggcaaggatgagccgagaggggaaggtcagcgtcaccagcaaccccgaggagatgcccaccatgagcgtgccctggagcagacgcccggacctcgacctcaccatcgacgacttcgaggaggacgagatcgaccccgagctgcgctactccttccagcggaacagcagggggccctgttatgcatcagacacctttggtgtgcgacgagccgatgacaccgtgcttcctttactacaggaattttatctagatttggcagaagacaacagaaaaattactccacgagattacctagagctagcattgaggcctgttcaaggtggaggaagggacatatctgcaaagaatgcgatacgggactccatccgtgcactttttccggacagggaatgttttacacttgtgcaacctgtgaacaatgagaaagatctccaacgtcttgatcaacttcctgttagattcaaacttttcctaagttcatttacgcaaatagcaaaattgctcttgaaacatatttacactttaaacagtttgatggcatgtacaaattatgtatgtccctttatgactgctttaaatgtttttgctgttggtgctgggtcagctcgttcaaaatttgaaaagctccttcacagttctctcaaaaaggcctttgaggactacaaaaggaatgcttttctggaggctgacttgcaatgttctaataaagttcagaacatggaatcaaaggtgcgagcagcatgtaacagttcgaatgaaaaattagatgacatagtcaggagtatgagtcaacggcctatggtcctggaaaatggaaaaggctagccacattcttacagcagtgtttggctggccctgttctggaccttttcagaagacagttagagcatatagatgctgaaaggaacgccctgagattgaaatgcaattcaagagatgtggaactatctgagaag

SEQ ID NO: 31350 - DNA, 307 bp, Zea Mays
cggagtttatggcaccagagctgtacgaggagtacaactagctggtggacatctacttctttggaatgtgcgtgctcgagatggtgacgtttgagtacccgcacaatgagtgtacacaccagatacatatctacaagaaagtgatctctgtaagaagatccttggacccgatgagccatttcacaacaattgtgattcaggttgaagtttgaaatgattttcctgatttctgaaaaatatagtacccatggattacaccgttgcagcgggcctgaaaattgatcttgcatttacagacgatcataca

SEQ ID NO: 31351 - DNA, 1434 bp, Zea Mays
atcctttcacccttcagcccgcgtgccctctgtttctctcccggttcttcccctctcttgcgacgacagggttgggtaacgccgctcgccgccgccgccgccatacgcaggtgccgaggccttcgtcgatctcttagccgtcgacaagcacccaagagatgcaggatagaatgagacggcaggggcaatatggtgaagcggatattaactctatggttgctgcccagttgcatcactaccaggcacagcaaagggtacagaaacaccctgagaatagctacactggaagagatcctgcacaagcttctgcggagcatcagtacactccccctaaagcaagacagagtcaatgggatcgaggtggaccaaatgcgccaagccaggttccatcatatgcatataacgaagcccaaggtgctggaggtgcgcaatccttttatgatgggcagagatctgatacaaaggttggtctagaaaagcagcccagcaaggagtctagggagcaacctcgtactgaacgaactgaaacaagatacgagaattataatcttcctcggacattcgaaggtcttgaacaaagtttccatgaagacattattttgctatccaaggaactacaggaggcagaggatgctgaaaattctagacacatggagagattgaaggatataaatacacagtaccaggagaaactattagcacttagagctcggcaagcgaactatagagatgagttcctgcgcaaggaatctctagcacgccagcagcaataccagcacgccagcatgagccattacgctagcaattccacggctggggagcagcatggttataacccaacggcagcaggcacgcctcctgttgctgctggaggtgcttatggtgaggctcatcggggttatgcttctggccagtatgaatcatttagcgatcgtccagattatccagagttccatgatgggggcagaggtcgtggtcgtagttctgagcagcgtgctcaataccctggtggtcgtgcttataattccggtggccggcgattctagatatgctttgaactttgaaggacgatctatcactctgtcaagcgagctcatatcacctgatgtcagtgtgctgtaccgtgctatactcgaccgagaaacctaagcgctcataaaacttgttctacaattcaggtgcatcgaactactttatggttttgctagagttcattctggttataattgtagaggaacgaaacgatgagagaacactgacttttccgtttctctgcattcatgtaatatgatctcggaagcaataacatttcatcttctatagcttcgagcatcagagagatggtcaaatgacactgatttgcattacatgtgattgtgaaacatttgcttttgaaaatgccaataaaaagaagcatatcccacttaaaaaaaa

SEQ ID NO: 31352 - DNA, 1056 bp, Zea Mays
ccgccggcccggccaatcatgcatgcatgctgccaccttctctcgctcccggcaaggccaacggcgaggcagcacgtgcagccactgcgcggcgctcaacgtggccgcgcacgcagcttgtcccccgcggatcttggcttcccaagaccccaatcctctcctcaccaatcacctctcgtcgtcgtgacgctgtgcgctcagctctcccacacattcgcatctcctccccggcccgtcgccatgatatatactcgcctcgcatgatgcccagcgccgcccggcgcccgcccgtgcatgattaattaggtcgcgcgctagctgtgcggactgctaggagctagctccatcgtcgtccggttgttattcctccttctcaacacacattgcccgttgccaacatcatccttccagcttcctggccgacgagcagtgccttcatatatacaaacgaaagcatgcaccatcttcggcccgcagaaggacggcggcggcggcggcaagaggtcgcagcaaccaaacccagcgacgatggtacggcacgtcgacgacgccgccgagagggccaagctgcacggggaggtgatggcgtgcgcctacgaagacgtgcaggtcatgtggtccatgctcgaccagacaacaaggattggggatctcagtggcagctcgtgaccgccggcaattgtccgttcatgcattttcctagagccacaaaggtggagatgcagacatggtgtacatagcaaaatatcttctcaccaaacatcccccccccccacccacccacttgctttcttgggccttgaattggaagagctatttgcgccgatcaattgagcccagaaccaagtgcccgttttgtacgtagcaagatttattagcttttcttttggagtttccagctcagttgagagtttgaatcctcagcactcttctctttgaggtactcgattggagtgatgtacattgccacgcaggaaaaactggcatttgtgtcagcccagttaatttttatcggcattcagcacagcccaagaaaattaacgggatatttggttt

SEQ ID NO: 31353 - DNA, 4140 bp, Zea Mays
cggcgccctttccctgtccgtcctccgtcgtctccgccggctcttcttcactcctcttttccgctggagtccccgatctcccccgcatttcccactcccacttctagcctcccccacgcccccatcctcagttcctcaccaccacttgccccgccaattcccaaatctcccaggggcttctccgcttaccacccccgcccgctcgcgatcccatcgcctcgacccgacccgagacttgctcgtcgcggagcgccaccaccacgcctcgccgccggcggcgagtggacaagcctagggcttatctacgggtgatggcggccgcgccggccgccgcaagctcgaccgtctcctagggcggcggttacccgaggctgagctcgtgcgcgcgcgtggggggatccttgtgctcagctcgcgaaaccctaggggcagcaggaggcgaagcttgcagggcggcgatggacgtggactcccgcatggcgacagagtccgactccgactccgacgctcgcggcggcgggtcggggtccgggagcgagacccccacggcgtccgcgtccgcgtccgcgtccccgtccacgtccgcgcccgcgcccgggacgcccacggccgcggccgcgtccccggggctggtggcggggcccaggccggcgccggggtacacggtggtggacgccgcgatggacaagaaggaggacgggccgggatgccggtgcgggcacacgctaacggcagtgccggcagtcggggaggagggctcgccggggtacgtgggcccgcgcctgatactctttggtggtgccaccgcgctcgagggcaactctgccacgccgccctcgccggctgggagcgccgggatccgccttgctggtgccaccgcagatgtccattgttatgatgtgttatcaaataagtggaccaggcttactccacttggtgaacctccttcaccaagagctgcacatgtagccactgctgttggtaccatggtggtcattcagggtggaattggccctgccggcttatctgctgaggaccttcatgttctggatcttacacaacaacgaccgcgatggcatagagtggtggttcaaggtcctggtcctggtccacggtatggacatgtgatggccttggttgggcagcgattcttattgacaattggtggcaatgatggaaaacggcccctggcagatgtatgggcccttgatactgcggctaagccatatgaatggagaaaacttgagccggaaggtgaaggaccaccaccatgcatgtatgcaactgctagtgcccgttctgatggtctccttttgctttgtggtggaagggatgccaatagtgtgcccctatcgagtgcatatgggcttgctaagcatagagatggtcgctgggagtgggcaatggcccctggtgtgtctccatcacccagatatcaacatgcagctgtttttgtcaatgcacggcttcatgtctcaggaggggctcttgggggtggtcgcatggtagaagattcctcaagcgttgcagtattggacactgctgctggagtttggtgtgataccaaatcagtagttacaactccaaggacaggaagatatagtgcagatgcagcaggtggtgatgcttctgtagagctcacacggcggtgcaggcatgcagcagccgctgttggtgatttgatatttgtttatggaggtttaaggggaggtgtgctgctagatgacctcctagttgctgaagatcttgctgctgctgaaacaaccagtgcagctaatcatgcagcagcagcagctgcatccacaaatggacaaagagaacctggtagatatgcctacaacgatgaacaatcaggacaaactgttacagtttcaagtcctgatggagctgttgttcttgggactcctgttgctcctccggtcaatggggacatgtatactgatattagtcctgagaatgccattatccagggacagagaaaaatgagcaaaggtgttgattatttggttgaagcatcagctgcagaggctgaggcaatcagtgctactttagctgctgtaaaggctaggcaagttaatggtgagatggagcattcacctgatagggaacagtctccagatgctgcaccaagtaccaagcaaaattcaagcctcataaaaccagatgttgctcttgtcaacaattcaacagcacctcctggtgttcggttgcaccatagagcagttgtggtggctgcagaaactggaggtgccttaggtggcatggttaggcagttgtccattgatcagtttgagaatgaaggtagaagggtcatttatggaacccctgagaatgcaactgcggcaaggaaattattagatcgacaaatgtctattaatagtgtgcccaaaaagctgaaagctcccattaagatatttggtgatctgcatggtcaatttggtgacctcatgcgcttatttgatgaatatggcgctccttcaacagctggagacattgcttacattgattatcttttcttgggagattatgtcgatcgtggtcagcatagtctggagacaatcagtcttctccttgcactgaaggttgaatatcctcacaatgtacatttaattcgagggaatcatgaagcagcggatatcaatgctctttttgggttccgaatagagtgcatagagagaatgggtgagcgggatggaatctggacctggcaccgtgtgaacaggttatttaattggcttcctttggctgcactaatagaaaagaagataatttgtatgcatggtggtattggtcggtccatcaaccatatagagcaaattgaaaatcttcaaagaccaattaccatggaagcaggctcagttgttctgatggatcttctgtggtctgatccaactgagaatgatagcgtagagggactcaggccgaatgcacggggccctggtcttgttacctttgggcctgatagagttatggagttctgcaacaacaatgacctgcagttgattgtgcgagcacatgagtgtgtgatggatggctttgagcgattcgcccaaggtcacttgatcactcttttctcggcaacgaattactgtggaacggcaaacaacgcaggtgcaattttagttctcggaagggatctggtggttgttccgaaactcatccatcctttgccgcctgctatcacgtcacctgagacctctccggagcatcatattgaggacacatggatgcaggagttgaatgcaaacagaccaccaacaccaaccaggggccgccctcaagcccccaacaatgaccgaggctcccttgcctggatataacaggctggccatattattaaacaattgatttcttgtctcctatcattggcttgaggctaaaattatccatccattctggacacatggaagcactctgctgaaagcacacactggcccaaaacaatgtcgaaagaaaactgttcagggagcgagactaagcggtgctctgaaggcgaaggccagagaagagtcactgtcgacagcgctccccaaatcctttccacaaacaagtagaagagcagaaccaagtgttggtaaaccacaggatcttgcctgggatcgcgcctgtacatactcagacgccagcagatagaggaggggttgtgtatgtgttctttttgtcttagcgtcgaaagggatagcagcgtccattgtactaggtattcatttgctgtagattttgatttgttgcctcatgttgcaaagtatggagtgggaaagttggtttcctcgtgtgacggacggtggtctgtcaggtcttgtataatagcgttgtcggctgtttatgtttgcagcgcgtcagctgttacttagcacaccttacacctccctcatgttgtaattcccatcaccggtgctgatgaatgtgcacaatatattgttgtctgttgtccaaagttttgggtcctggacgggttaggtgatttgatttggtttattggagaagcaatacgttgtttgattttgagctgtatgctgtgcacctttgggatttattttattttgcaaatttgtgtactagcttacagttcagtggtcttgctttcagcaccgtgcaagcctactaccaaactcaggcaaacaacaccgcatagtcatg

SEQ ID NO: 31354 - DNA, 2030 bp, Zea Mays
gtatctactgaccatcggcaattcaaacagcggtactacgaatttctcgactactaccgagctccaaatggcccgatcttcctatacatctgtggagaatctacgtgcaatgggattggcaataactacttagctgtggtggcaaagaaatttggtgctgcattggtttctcctgagcatcgatactatggaaagagttctccttttaacagtttgacaacagaaaatctacagttcttgtcatcaaagcaggctttatttgatcttgctgttttccgccaatattatcaggaaaccttaaatgccaagtataatcgctctggggcaaacagttcttggtttgtttttggagggtcatatgctggagcactcagtgcttggttcaggttgaagtttcctcacttgacatgtggaagccttgcaagttcaggggttgttcttgctgtatacaactttaccgattttgacaaacagattgggatctctgctggtcctgaatgcaaggcagcacttcaagaaataacaggacttgttgatggacagcttcagtctggccgtaactcggttaaggagttgtttggagcgacaaagttagaaaatgatggtgacttcctctacttactggcagatgctgctgctattgcgttccaatatggtaatcctgatgtcttgtgctccccactagctgaagcaaagaagaatgggacagatttggtggaaacatttgctagttacgtgaaagattattacattggaaaatttggggcgtcagtagcatcatatgatcagcaatatttgaagaacacaactcctgctgaatcctactatggtggtaccaagtttgcagtgaggttgcatatttccaggtggcaccaaaaaacgatagtgttcgttccccaaagatcgacacgaggtaccatttggacttgtgcagaaatgttttcggcgaaggagtctaccctgatgtctttatgacaaacttatactatggaggcacaggaattgcaggttctaaaattgtttttgcaaatggatctcaagacccatggcgccacgcttctaagcagaaatcatcagacgaattgccatcatacctaattgagtgcaagaactgcggacactgcagtgatctctctggatgccctcaagctccttcaaacattgaaggtgattcatccaagtgctcacctcccgaagctctgaacaaagtaaggaaggagattgtcgatcacattgacctgtggctatcagaatgccaagagcaaggacatgacaaggagccatggctgggaagcagatggagcatagctgctatttgatcaatctgtgaagctataagcatgtgctgctagagtaaccaaggcaaatatgctttctttttcttgcagcactgtggtttatcgtttcggcaaacaatgtgggctgctgagtaagaggacatatctggtgcacataaaaaattggtgcacatggtgcatatattaaattatcaccactcattttagatctaacgtctttagttgatcattcaatttacaaataacaccttccaggcttccaccactacacaccaccacgttggagggtgcttttagcaaaatataccaaacaactagaaacgttagatctaaaatgagtggtgatgatttaatatgtgcagcatgtgcaccaatcttccatgtgcattagatatgttctcgctgagtaatccacctgtggcgaataaataaagcagtcagttctcagtctgtcatgatttcagggcctgtttggaatgcgggagtttttatttttcctattcctactctccttttttttcttctgtaaaattgaacagctctttacaaaatccctgcgtgattcctacgaattcctgcgtttcaaatatgccctcaaaatgtgagcgatgtacacacggatggcaagtttgtcgatatacatatatgcatctgtcgcatgccctttagcatgagaaacgattgcgatgtttctctgcccttggtgctaattttctgaataaaatctgaaag

SEQ ID NO: 31355 - DNA, 1016 bp, Zea Mays
ggaggcggtgttggctaaggatgcacaaaaattatacgacgcacaaaactcttccattacagtagtagagatagagaataaaaatagttgtaattggactacgggtacagaaagaagtatagaattttttttttgcaaaagagacgattgtgaaactgtgacaaatgcttcaatcttgggttccattaatcatccttataacttctttaagaaagatgtatgctatggatggaaatgttttgtttacaatagctaggactgatttacatcattacatggccttgccccctttcatccatcaccttgagtctgcaaagaagggtaacctcgtgctaactgggccatcatgggccacctcggcatacagtccaattgccttcaccctctacctccatgatggcagcccgcaagccggagaagccgctgaggacgacgaggacatcgggaggataatctgcgactgcatcgacggtgacttctccaactacaacagggccatagtcgagactgtccaaacgggctatggccccgctgaagtgatctatgccgtcctgagcaacggcgtccaaggccgggtcgccatcaaacttgctcgcctgccagtgtccaaagctggagaagaagacgccaccgccattctcgggaggattgttgctcgcagcaagctgttcgacgtcggctgcgtgctcttctacaaagagggtgacaatggagtgagcgtgcgaccgggggggctgattcagttggcgagggaagcgctcgccgtgccgctgcacatgccgctgacgattgagcttgacctgcatcgctgttcgggcgatgaaattgttggaggggtccttgagttcaatcctgcgaccaacggccagcacacggaacgacttgttggagaaaatggcgctgaattggaagtgacaatttcatggtcgcagtacccttggatggactccaagcgccggctgcaggggcccttctcgctgcgcatcactaacgagtccggcgagacactggtggct

SEQ ID NO: 31356 - DNA, 280 bp, Zea Mays
gatgctatgaaagggagatatttccgcgatatttcaattgtgagggctggaggagatagcgccgcccctgcgcccaaagtagacaaagttgttgtctacaggagcttcatgaaggcagggcttcggtttcccttgagcaaatttttagtagaggttctgaagacttttgaaattttccttcatcagattactcctgaagctatcatcaggatggggatttttatttgggccatgaggagccagggactagagccgagtgcaaaatgtttctgcaacatgc

SEQ ID NO: 31357 - DNA, 971 bp, Zea Mays
cgagagtgctacggcgtcaatcctttctatcctcgtcgtgcccagcttctcttccctcttttcccctcactgatgaaccctagccgccgtctccatgccggatcccgcacccgagcctgccctcgccggcgccggcgctgctgtgtgcagcccctcgcctcaacattcagttcacagattttcagttcagtgatattcaactgaaactggatggtaagttttcagtgaccatgttgaggcgaacaacagttcatgtcactgaaaatagaatgaccatgcatttttcatagaatggccatattcagttcacagaaataaatggaccgcagttcacagattagaattcagttcacagattacaaccggaattcagttcacacagattaaatggactgcagttcacacagcagttcatagattagaattcagcggctagggttgccatgctgcctgtgccgtacaccatcacacagctagagctagttcaattccctttcccttcccgttgtcacccctctgttcagtccacaccacaccctcctcaaccgcaccgtcgtcgtctagccgactagcggcgggagctatagcttcgacgagccgacgacaaacaccaacaggaggggaaaggagggaagagaagctagggcctagggagggaggagagctgctgggagacgacgacgagaagactggcgccgtaacgctagccgtccgtgacctgcgcctgatagaccttactgaaagatcgcaaggctaacaacgacgactgctgatggtatttttctattatggcaaagagaagacttgtatcctttctattttgataaacatgtgtacaccgaattgaagctcagttctgtaggaggtgactcatttccgttgaacatattcatcgacgccactcgtgttttgttcatcgacattaattctatacacgatgcttgggtttagaatacatgtgtttggtaggc

SEQ ID NO: 31358 - DNA, 666 bp, Zea Mays
  misc_feature (666)..(666): n is a, c, g, or t
gagcccgcgactgccctttcctcttatttccattaccccgagcgtacattctctcctctctctcttggcggcgactcggcgaccggcgctgctgccccacgtttggtgcccaggtcttcgtgggccccttagccggcgacgagcatcaccagctgaaagatggcgaggataccgtctttgaagagcctcaatgcgtttccacatgcggaggaacacttgttgaagaagacttactctggtgctgttgtgacaattcttgggctacttataatgattacactgtttgtacatgagctgcagttttatctcaccacatacacagtgcatcagatgtctgtagatctaaaacgaggagagactctgccaattcatgtcaacatgtcatttccttctttgccatgtgaagtattgagtgtggatgcaattgacatgtctgggaaacatgaagttgatttgcatacaaatatttggaagcttcgcttggacaagcatggccatatcatcggtacagagtacttgtctgacctagttgaaaaggagcatggggcacatcatgatcatggagcatcatgatgaacaaaagaagcatgaacaaaccttcaacgaagaagcacagaaaatgatcaagagtgtcaaacaagcactgggaaatggtgaagggtgtcn

SEQ ID NO: 31359 - DNA, 1875 bp, Zea Mays
ttcttgcttccagcaaccgttcgtctagccggcctgacgtcgcggcgcccaacacggcaacgcgcctttttcttccgcacgctgcgctggcccccttctcttggtaacttagccgtattgatatatgcactgatgactggccagaggcgacgatggagacggtctgctagttcaagttctacttccttccgcggccgcacgcgcgtcgttcgacgaattgccggagccagctgaaaatcgccggaggtgctctcggcggtcctggcctgattctctaccgacgcgagctgtggtcagtagccacgtctgtatatccacgtctagctggccatctttgcaccctccccacgtccatggaccctccaagaggtggagcttccacctccagtgaattagaagaacacagcagtggtagggtgccctggtgagcgctcatcatcctctgtgatgacgatgatgatgacaaaagagaggtcatttgttgctaagtcgagacggatgagtattgagtaggcggccttataggagcactaagatgttccgggcaaatttgtggcatttacacacatgctgttactgctgattcttctttaaaagccatggatgtatgtcaaataccacgacctccatggaggcaaacaagaatcaaggaagtcaaattacaccgatttggcaaacaagtactatgatcttgtcactggcttttacgaatatggatggggcgactcattccatcttgctggcggatatccgggtgagacttcccgtgaagccattaagcggcaccagcattttttggcactacaattggggctcaagaagggtatgaaggttttggatgtgggatgtggaattgggggacctttaatagaaatcgccagattcagctcaacatcgataactggactgaacaacaatgactaccacatctcaaggggcaaggagctcattttttcagcaggtttgagtgagcaatgctgcttcttgaagggggacttcatggacatgccaatatctgataacacctttgatgcggcctatgcaatacaggctacatgtcatgcaccagatgcacaaggcgtctatagtgaggtctaccgtgtgctgaaacctgggcagtattttgcactggatgaatggtgcttgaccgaccgatttgatcccaacaacgccaagcatttggccatcaaggctgagattgagctcggtgatggcctacctgacatccgtaccactcgccaatgtgtccaagctatgaaagatgcaggatttgaggtcgtttttgcaaaggatcttgctcaagtttttccttgcccgtggtaccgggtgatggatcccacctacttttcatgggctcacttccaatgcacacgcccaggacggatcgtcacccgtgcaattgtcaatacactagagttcctccgtattgccccagcaggcagcatgggagcctacaacgtcctgatgagtgcctctgatggccttctaaaaggtggccgggaaggtatcttcacagcgaccttcttcgtcctgggccgcaagcctctcaaggaagttgatatagtaagcctctcaaggaagttgatatagtgaacggcggcgtcctttgagctgcaagattagtatggggctgtactcataagagctatgaatcatggccaacgtgttctgtgctgaggtgtgtttactggattgtcttatgggttatggcccttgcgctgtgtgctggcctgctgggtcatgttcccgcagtagcctgtatctgcttgtcagcttgtgtgctgtgtactatgcactatctgaataaaaatgcagttttacgcattgttattaatcgcaccatttcttggcaacacgactttgatcggaccaatg

SEQ ID NO: 31360 - DNA, 4962 bp, Zea Mays
cgatctttctctcaatccgcggcctcgggtcgggtcgggtcgggacccagcccaacactttgaactggggaaacggccgcctccttttttaacgcaatcatctctaccgggcgtgttgctcgcctttttgcttccgctccgcctgccaagcaggcccggcgtccaactctggtggcaactgccagggcagcccggcattactggttgtcttgaagaagaagatgatggtgggctcttcccgccaccagctgctgcagaggaaggggaagtccgtggctgacaagggcgccgccgccgccgccgccactgtggcggcagagaaggtggtggtcgcggtgagggcagccacgagggagatctccaagacggccatcatctgggcgctcacgcatgtcgtgcagccaggcggaagcatcatacttcttgtcgtcatcccggcacacagctctggcagaaagttctggggctttccgctgttcgctggagactgtgcaagtggccataagtctatgttggatcagaaatgtgatttatcagagttgtgttctcaaatgttgaagaaaattgatgtgtatgacatagacaagataaatgtgaggtataagcttgtttccggctctccttctggtgttgtagctgctgagtgcaagcaagcacaggcaagctgggttgtgctagacaaggatttgaagcatgaggagaagcgttgtgtggaggagcttcagtgcaacattgttgttatgaagcgatctcagcctaaagtccttcgacttaatcttgtgggatctcctgataaagagtctaaagcaacatgtgcagttccacctgtgctagatggttctaccagtaaaattgcaactgatgttaaggaagcacggagttcaattcgaggacctgttgtaaccccaaatagcagcccagacctggagacacctttcggaagtactgaagcgggaacttcctctgtctcgagttcagaccctgggacatctccgttttctgcttctgaaacaaatggttctctgaagaaagaggtgcaacaaacaaaggataaaattcagcattcagatgctaatatttctgattcagacagtgaaacattgagccctccagcaaatttctcacttcagccatggatgtctgatattctacagggaccagcatcgtcaagatcacttggaaaagttccacgaaaaaatcgcactgcaactgcagatgttttgttggaaaagttttccaagctggatctcctgaatgaaattaatgctatgagaagcaggtcagacttaaacttccgaggagatgtcagggatgttgttttgttggcaaggaatgcacctcctggaccacctccgctttgttcaatatgtcagcacaaggcacctgtttttggaaagcctcctcgctggtttagttatgctgaactggaacttgcaactggtggtttctcacaagcaaacttcttagctgaaggtggatttgggtctgttcatcgaggtgtccttcctgatggccaggctattgctgttaagcaacacaagcttgctagttcccagggtgatgttgagttctgctcagaggtggaagttcttagttgtgcacaacatcgaaatgttgtaatgctgataggtttttgcgttgaggacagaaggcgtttattggtttacgagtacatctgcaatagatctttggattcacatctctatggtcataatcgagaaacattggagtggactgcacgacaaaagattgcagttggtgctgctcgtgggctgcggtaccttcacgaggaatgtagggttggctgcataatccatcgtgacatgagaccaaacaacatccttgtcacacatgatttcgaaccactggttggagatttcggcctggcgcgatggcaacccgatggagacatgggcgttgaaacaagagttatcggcacattcggctatctggctcctgaatatgcacagagtgggcaaataacagagaaggctgatgtatactctttcggggttgtgttagtggaacttgtcactgggcggaaggctgttgacattaaccgaccaaagggtcagcagttactaactgaatgggcacgcccattcttggaggagtatgcaattgacgagctcatagacccacgactcggagagcgctactctgaaaatgaggtgtactgcatgctgcacgcggcaaacttgtgcataagacgcgacccacattcaaggcctcgcatgtcccatgttcttcgcattcttgagggtgacatggtcgtggaatctggtggttctgttactggcagtagtgattctgggagcagaagctggaggatgctgaacgaacagcaacattgccaggagtacagtagcccggctcaacaagagtcgcaaagggcaggcgaggggaaacgctcctacagtgccttgagggcctcttgggaccgagacaagcagagtatctccaacagatattagtgccgtctcataatgcagtgcagctgagattgtttagtcctgtattattccttcgccctacctcccggtctcaattttttttggcttgctcttttgtcttcacttcgtagcaatttgtaggccgaaagcttttgctgatacattgccctggtgtatagtagaaatgggtaatttcctatattacaaagccggttggaaaacggcgttgattaaggtatccacgtcacctcatttgatatcagccgtatgatctagatctactggatacgagccatcttgctcccacctgccgccagccgcctccacataaatatttttttcctgaatctccacactaccagagtcttccagcggcttcctctccctcctcagattcctctcctcgcgttctccctcgctaccacgcttgcgtgaatgccctcaccgcctctccccgtgctcgcccaaatcaccgcctctccctccctgtcgcccctgcgccacggtggttcacgcctttgaagtcacctcactcatcctgccgatgcagtcacccacaccgcctcctcccctccgctcaagccgcaccgcgatagctacacgccgcgacatcagctgccagcagcgccccccctaacaacgtcgcggcgtcctcgtgggctaaccccctccatcacttcttctcgccgggagctccatccaccttctccagcacccccacccccgctcaaatggtgtcagaaggtacgggaaccaatgggtttgaaggctgttcttatggaatataatgagctagccattaaaccacggaagggctgagagaaaattgggaggtggaagagatgcgctcaccaatcatctctgcgagagaaagcagtgccacatgggcccagcaatagcagcgtcacatggtggtggccatcgtcacgtcgagctagagatgtcaatgggtaattccccatcgggttatagcatcccagacccatccccatcatgtttgatacatccccatacccatacccatacccatcatgggtacaaaactcatcccatacccatctccattcgggtttcgggtccccaatgggtccccatccccaattaaggaataactaggtactaacatctagcacaaactatccagatttcatacatcaccacatcggcaagcactcatccacgaactattgtccattcatccattcatcagaagagaaatcagtacttgggaccaatataagaaatggagtctgccgggtttgatggccgactcggcctcaactcattcatacaaacaggacatgtgtacgcatatgaaataaccatgggtaatcgggttcggattattgcttcccaaacccatacccgtttacccaatgggtggagattttgtcccatatccatacccatggggacaatttttgtcccatacccgtaccctaataggggaattccccatgggttatcgggtatcgggtccccattgacatctctacgtcgagctctccctctccaccaactaacagttcctgacagtggagcagaaattcattaagagcatatagggattcacaagtgattttgagcccaacaatctcgctgccaccgatactcctggttcgtatatttggttactcaaaacatgagatgatcctctgaagtagaaagggaaacactgaatacgctcttgctgaaatattctatagaaagacacaattccattttggcagatgcaagtgaaagatctacagggaaggtatcttttgttcttatattttggttgcttaacaaataccttacgtagaaactataatcttctctctaatcatatcttagtggaaagtttattcttccattgaacatcccactgagtgtaatacatatgcagaaattggggtagcatataaccgccgcaagggaaaatatggtgtagcagatgaggatataatcttatatggtcaatgtgtttgaattggtccaaccattgatattgcttcacggttgctagacttgagagtcgcggttttgcatagtcctatattttatctgcactaagagtaatatatacagccaagcagacgtttggtttaacatttacaaggtatgtttggtacttttgtttttttggaattaatggttgtccgatgcttgtcattcatatgagttctaatatcatgcccccttaaagtactcatcatcaaaagtttccatgtgaatgttttaaatgtatatttaaagggttggaagacatcagactgttattcaaacaggatcttaagtgtcgtgaaagactacaagtgaggttcaacttggcaaattatttttccagtaactaaggagcaacaattttatgtattttagcttgacatatgaatctaggtacttacatttttggaatcgggcaaacagtgatagtttgaatcacatgttttgccaaaaggaattattagaactgttcaaagttggaaaaaatacatatttatgttttcttatgcatggataaattgct

SEQ ID NO: 31361 - DNA, 1463 bp, Zea Mays
gcactgagtccccatcgcacatccactactacttagctgacttgttactgagaggagttacttctttggagtctggctggggctagaggaatttctcatctcactctagtgccaagtgcaaactagggctcctcagtcgaggtcaagttgtcttttttactgtaatagattggtgagggtgaaaaacttgttcgggcactttttggtgtggccagttgtcgtcaacctgctgtcatatttgtggatgagatagactcattattatctcagcgcaaatcagatggtgaacatgaatcaagcaggagactgaaaacacagtttctaattgagatggaaggttttgacaccggaaatgaacagatcttacttataggagcaacaaacagaccccaggaactggatgaagcagcgcgcaggcgactcacgaaacgtctatacatcccccttccttcattagatggacttttcatgctctcggaagaagaaacaagtgccatctgtaaattaactgaaggctactcaggatctgacatgaaaaacttggtgaaagatgcctcaatgggaccactaagagaggctcttcagacgggcgttgaaatcgcaaagctcagcaaggaggatatgcggccagtgatgctgaaggatttcgagaatgctatgcgggaggtaagaccttctgtttcctcaagcgagctggggacttatgaagaatggaacaggcagtttgggagcctatcgatctagtctgtcggcaggcatcaacgaatacaatcatgtcggcactatagaaaaaggagctcaacgattttagccggaacatgacatgcataacacagctctacagtttaacaatcttttgaagcatcaaaatttgaactgtctatttggagtgctgagtaatatccaggagcctacatatcaaatagtttcaattgtttttaaatcttcacttttctgtaaatttgtttgccttggttttgattgacatatgactagcgcggaagtcaaatactccgttccaaattataaaatgttttagcttttccgcatacagttttttagatgaataaaaaaattaatgtatctataaaaagcaatatgtaaagagatggtacaacattgacaacaaagaagaagatttgtgggtccaactcagacctagaccgtcttcatgggtagtgtaaaatagagaatgcggaactgtagatgatattgtttgatactgtttgtaaagtaaagtttgtttgatactgtttgtaaagtaaagtttgatatataggatgagataggagattggataatagatctgctagagataaccttctcatgctctcgaggatcgaaatagataatgttccatgggatcgaaatagataacgaagaggactcatcttacaagggttgtatctttgtaatagcagtatgtcttgaattataagggattttatgtaaatattgaaata

SEQ ID NO: 31362 - DNA, 782 bp, Zea Mays
aggtctccagggctgttacgtgtgcattgtcattggtttctgtgagggagggggtcataagtgcttgtcatcatctcattgtcaactgaagcctgttttatgaatcttcgaagattggtgttcagaaaaagacaaaaaaatgcaaattgcacatgaatcgagcggggaaatgtcgtttggatggggacgtcagccagctttcttgggaacatttagcaagaggcttaacaggtgtttcaatgatgctacaaatggggttccaggtgatggttggtctctaatgagcaatgatggtgctgaggatgttcctattgttgtcgactctttctccaaacaaacttattggtgctcatgtcaactcctcccagatgttttttgactgttgaaggtggtctcctgcgtgttaaggtataaattggatgaacttgcggaactgatccaagctgagcggacagagatcccggccgccactgatgatgcctgagttgaagaagagcagagggattcgtcgtcctggaattggaacagaaccgctctgtgctctgtcagtgtcatgaattaattaagagctccgcgtctgaaaattattgcagtatatatatcctgggctgggacgcatgcataccaagcgcgccggcctgttgtagcagcttcgctttatactgtgcgtagaagttgatctgtgtaggaatataaaataatccagtggccaccaggcggacaggaacagcttgttgctccataacaccatgattattagctaccttgctttcaagcgtttc

SEQ ID NO: 31363 - DNA, 2248 bp, Zea Mays
cgcacggacgacatcgaggaaccctagactagagcacattgcacgggcgacggcgcgccaccggtgactggcgtcccctcctcggtcctcactccccagcatggcgacgccctgccgcagcaggggcttcgagcgtgtggagctgcggtgtcccagggagctggacccacggccgagctggacgctcggcgatgtgctcgctgagcttgacgcgctggatgccacccgccgcgctgcgccacccacgcccctgaagcagccgccggattgggctaacggtggtggtgagaaggcctttgtgatgcgggttgatgacgacgacgaagacgacacagaagatgaagacgatggtacaagtggtgggaagtcccgggctctggtggccaaaggagcaaggttctcgtgtaatgatcttgcatcaagtgattcagaggatgaattagatggtcaggttgccccataccacttaatggagaaaagggacctagcgaagagcattcttcttgagctggaacacgagcatcatctaaaagttcaaaagtactcgataaacacttatctatggtccaaagggatcatgaacaaaaatcccagattgttgaacgccgaataagagatgatgcagctcttgaagaagctaaaagaaaagagcaagctgtcaaggaagaaaagttaaggcaggaaagagcccagcaagaagcagaggctagacagaaggaagctgcaaaattagcagctgaagcacgaaaaacagcatttgaggctgctaaaaaggaagcagcagaaaaggaagcagcagaaaaggaggctgctaaattgagagatgcagcagcttctcaacctagtccgaattcccagaataatactgcagaaggcattaaagtttttggcgataaatacgcactagaagcagagtcacggaggcatgcattagtacagaatcaagtgccagaaaacattcatcacagcaaggaattcagcaaatatgaccgacaaattgccaaatccataagtaaacttatgccaactactgacagtgtcagaacaagggctagtgagcttgttaaagctttaaatggacaggattgtccccgtccaatctcttgttgtctatttgctaacaagattatttccattgtcaagagtagaaatacaaaggacaagacctttggaaatttggcctttgcgtgtggatatgtcatgctattagttacaaatcaggtaccagacgcaatggattatcttttagctgagttcaacagagtttgcatatacacggttccaaagcatatgcatgctttgaatgcacaagcacgaaatagagattattacagactgataggttaccaggaagaaaatggacagctcgagagcactgaaagttatctaacatacgtcgttgcatatgttaaactctacgcagcaatgattcagacggaaatcaaaggtgttcgtcatcctcatggtttagctgagggatggaagtggcttgccatgttcctcaattctctcccagctactacagccactgcatgtgcccttcacgctttcctcaagatggctggttttgcacttcacaagaaatatgggtcacagttcatgaaaatcctggatgtaatatcacggtgctttttaccagctttgaaggaacaaggcaacaagatgcaggctgaggctgtcaacaatctacagaattacctgaacgacaagatctacctggaggaaccagaagggcagtacctcgtccagcaactactatccaaggagttgttcatgtaaagatcaaaacaccagatcggtatgagacatcgtgtgtgatcgtctgaagggcggtacctcgtccaagctaccactatcgcaagaggggcctcatgtagagatgaaagcaccagatcgatatggagctgttcgtgtttcagaaacacgatcgagcctttcaaatctcacgaacattatttatgggacagtcccccagatcatttcccccctctgcacgggatcctgacgatgtatttgtttatgtgacttgtatccggccaaggacaggtatgataggttgaggttttatgtttgttgtagttgtacatgtactactagaatcgtgaccagaacaaaataatactcgaccacttcggcgtgggcccagcggtggccaaagtcaaggtcaacttgacacgcgacactttgtctactctgtttgcaatgaaatctaatgtttgtgcttcaaacaaaatagttttaatataaa

SEQ ID NO: 31364 - DNA, 3232 bp, Zea Mays
tcccgaatcgatatatagccgaacacgaaccggcagtcctcaaatacagttgctgcaccgcaaccccgcgccaaagccagcgcggccaaacgacgtgacgaccaaacgaagcaaccaggcgccgaaaaggatagccgaagtgcgaaacccaacagcaaggagaaggcgaggggaaaaaagaaagaaaaggcgcatcgaaaaggcaaagagcgagctccctctacccgcgatccccgcacaccggccgccggcgttcgtcgccgccgcggatgagatgcgctccccctccggcggcggcagcgtggtggcccgcgcacgttcgtgaggggccctccgccacgcgcccaggttactgtggctccgagtccgagttcgctccccgcgcccgcgctatcgccgcggggcggagcggatcccccaacatgtggcttttctggcgcactaggaatcgcttctcccttgaggagctccggtatctaacagatcagctacaaaaggttcatgttgtcaatgaagctaataaggaatttgtgattgaagcattgcgatcaattgcggaacttatgatatacggtgaccagcatgatgctttgttttttgaatattttatggagaaacagatcatgggtgagtttgctcgtgttctaaggatctcaaagctgtcaagagtgtcactccaattgctacagacaatgagtatcatgatccaaaatctgagaaatgaacattcaatttattacatttttagcaatgagcacatcaacttcttggttacgtacccattcgattttcgaattgatgagatgttatcgtactacatatcttttctgcgggcgataagtgggaagttgaacaagaatacaatttctttgctcgtgaagacgaaaaatgatgaggtcacttcctttcctctttatgttgaggccttaaagtttgcttttcacgaggatagcatgattcgagttgctatacgtaccttgacactcaatgtctatcacgttggagatgaatctgttaacagatttgtttcccgcacgcctttatcagattatttttcagacatggttcagcattttcagaagcagtgcattgacttggataagttggttgcacgctcctcacgaaagggaaattcttctgtgccaatatcttctattgaagatgcaattgtgcaaattgaagacacactgtattatttcagtgatgttatgtcttctggtattcctgatcttgaaaggttcatcactgaaaatatcttgcgagttctggtatttcgattcttactcccgtcactgcagaggcagagcacagatttggacttaagtgtcactacatccatgtatctactttgttgtatactacacatttttaagaataaggatatggcaagtactgtagctgctgccctttttcatcaacctgatggccctgatgataggaagcaaaggacacctaatggatatacatctgagcatgatagttgcaaatctgagaatcattgcaccactgcctctggtatcgagcaatcaagtgaggagccaaattctttgtcttctgttagttggaaacacttgcccaacaattcatcgcgaagtgattgctgccaaggaaacacaccaagggaacacttgctgtcctatatcacagaaggagatgattcacaagctttgggttcattgtgcttattcgctacattattgcagacgaaagaacttgatgaatcaatgctggatgcccttggaatcctccctcaaagaaagcagcataagaaacttctattacaagctttagtaggtgaagaccttgctgaaacacaattattttcgtcaagcagcagtctaactgatgacagcatttgtagtgattttgatatttatgtaaggaagcttcaggataaatatgggctacaatgtcaccatccacggcaaatgacttccaaagctcacagatatcaggtgctcgatgctttagtcgaccttttctgcaggtcaaaggtttctgcagatgttcgtttggttggtggctggcttttccggcaactgctgccccatggagaggaagagttcactgcttttcatctaagacgactaaaggattcacacaaggattgtagctcaaagctttctgaggaatctggaggatgctggtgtgacatgcttcttcctattgttaaagaagcttggaggaactgcaagaaagcaattgaggcatcttcgccaccaaaaggatccaaatctattattgtacccatggatttgtgttcatttgaaggtgattcttctgttgccatcgcagaggcactctatgagatggttaagggttttgtgctgcagcatcaagttatactcttctgtcttggagaaactttcacagagctacctcctatttaccctctggttgatttgcctataaatactagggcaagcgctgcagattttggtggttcagttcctaaacctgggcttgaagtcaacttagccaagaatagatacaaagcatgggaagtggttacatctacgcattcgcccttcttcggtcccttttttggacactgagaagcataaagcgaagacaaagaagtatcttgttgatgggagatggacccttgcttttagggacgagcagtcctgtaaggttgcagagagtatggttattgaagagatgaaactccaacgaggtgctgttgcagagcaattgaagccattggttgaatttgacatgcctgaggatggaatgcagcacccccagacttcacatgaaaccccttctgatgatggatcatgactaaattttcatcaagtgcagtgttgagcttctcaattaaggagacatggcaacagatggccgcaaaagtgccgcattgaacatttcaagcatgctggcaggaaaacccaccatggcaagtcatcgacaattctgtacattacattgggagattagagatgtctccttgttaacacacaactgtagagtttcgggccgtcctgagttgaactagctggataggattctttgtacaatagtttgtttctctccttgcccgttgtaaccttatatatcacatcaaaacccattctttgttaagtttcagggcacagttgtgttgtgcacacgaaatgtttaaagaaatttgcagttagtcatacctgttgtcaaagcaagccttgcctatgtggtaataaaatgtcagatcgataatttttcttggaaatatgaatgttcatggactgtt

SEQ ID NO: 31365 - DNA, 1320 bp, Zea Mays
gccgtagtcctccggtcgaaatatagtgtgcaattctgttcctgtagaaggaacgatgacccggcggaacggctgtacgatctacgtgggcaacctccccggcgacatccgcgagagggaagtggatgatctcttctacaagtatggacgtatagtggaaattgacttgaaaattccaccaaggcctcctggttttgcttttgttgagtttgaggacgcacgtgatgctgaagatgcaatatatggccgtgatggatacaactttgatggccataggttgcgggtggaattagcccatggtggacgaggcacatcttcttttgatcgatctagcagctatagcagtgctggacaacgcggtgcctcaaaacgttctgattaccgtgttatggttactggattaccttcttcagcatcatggcaagatctcaaggaccatatgcggcgagctggtgatgtctgtttcactgatgtgtatcgtgaggctggagcaactattggaatagctgattatactaactatgaagatatgaaacacgcgataaggaagctagatgattctgagttccgtaatgctttttcaaggacatatgtccgggtgagggagtatgatgctaggcgcagccgttctcgctccagaggcagaaaccgctctaagtcaagaagcagaagccacagccactcgtactcaagaagcagaagctgcagttatagcaagagtaggagcccaagatctagatctgcttcagagtcaaaatcacctgttaaggcaagatcaccatccagatcccctcctgtttctccccggcgtgacaagtctgcaagcaggagtcctgccaggagcaagagtctgccccgatcttgttctccggcaaaatcagagtgaatcggattctgcacttgaaacgttcagaaaggcagagctcgagctaaaagattgctgtacggattatgagcactgtgctagtagcattgctgtcccttccatatttttacaaatactctgttctttgaggagatcactgtatgctactactctgtacctgacatgatgcaaacgttgttggtttttgaacttagcagaacgatgactttgatcagctccatccattccttccattttttttttctgaatatttcaaaagattgtagtatgcagctattgttattctctgatgcactcctgtgtcctgtcattgtggaaaaaaaatggaattctaccattcatgtgatgtgtctaaaaaatgcaactctagcttgcgattagatgcagttgtttgcttttgttcaatcaacagatatgaagaataaaaagagtag

SEQ ID NO: 31366 - DNA, 4515 bp, Zea Mays
atatgtttgaatcagtcttaatcagcgcaaaagaaaagtatggatgagtttggtgcggcacaccacaaggaagagcacagaaaatcccaaattcccaccacgcaggtcgcaggcgcacccgtctctcccttcttcctcctctccctcttctacacccgacaggcacaggcacaggcacaacgcatcgtccccctccctttccagcgccccaaccacaaggaacagccgaacaggtcggggtcaagccatcggaccttgattccgcttgccctcctgctttatcccgccgccgccgtcgtcgtctcaaccgcccactccttcctctccctgccgctcctgcgaatcgcgaaatcggagacccccggaccgccctccaatgacgaccatgagcgacgatggtgaccgcacctgcccgctctgtgccgaggagatggacatcactgaccagcagctcaagccatgcaaatgcggttatgatatttgtgtttggtgctggcaccacatcatagacatggctgagaaggaggaaacagtgggccgctgccctgcatgccgcacatgctatgacaaggacaggatcgtcaagatggctgccacttgtgacaggacagtggcagagaaaaatgcagagaagaagcacaggacccaaaaggttaagccaaaggcagcaccttcagcagcagcaacatcaactgtagaatctaagaagcatctggctagtgtcagggttatccagagaaatctggtgtatataattgggctacctgcacatttatgcaatgagagcgtacttgagtgtagggagtactttggccaatatgggaaaattttgaaggtttcagtttcccgtccgactgggcctccctctcagcaggcatcagcaaacagcaatattagtgtctatattacttatgccaaagaagaagaggccatccggtgtattcaagctgtacacaattttgtcttggaagggaaagtgttaagggcatgttttggtactacgaagtattgccatgcatggctgcgaaacatgacatgtgggaatccagattgtctctatttgcatgatgtaggcagtcaggaggatagttttactaaagatgagatcatctcagcatatacaaggactagagtccctcagatggcatctggtgtttcgcaaagacgcacaggcactgtgttgcctcctccaggagatgatttctcttacagtgcggtggtttcagccaagcatacatttaagaatggaacacttaataccaccagtcagcccagactttcacctccaaacagtagttctgggaggtccacgcttccatcagctgcctcatgggggcagcgtgatttgaatgccaggacaacagctactggagcgacatcgtcacaatctcatacaaaaccaaaatcagaatcacaaagtaatccattttcaagttcttcagtattttcctgtacaaaaacaccctcttcatggaatgatgatacaagtacagcagcaaaaatatctgaaggacagcaactgtcagaaaaagagtctagaaccttgcagccgtataagcctggtatttcaaaggaaacacaagctttatcatcactggagtcatcactggacatagacttctcaacaataccttcagcttggaatgacgatgacattgtagtaccagatgtgatgccaaaaggaagtgatgaaaatcaagttgcaaataaaaatggtgagctaacccatccagcatccaagtcactggttttatctaagaaagacataaaaatgaacattaccagcaaaactccttcagattttgtatcaagtccagcaatatctaaatcagatgtaagtactagtgatggtgaccactcactcaccaatattactcctaaatgccttgcttcaaatgctgtagaatgccaatctagtcatactgctgtggagaaaatgttggaggatattggatccaaggacactgacatggagaagctatctgctcagatatcttcagtaacattaggtggcaacgacgagattcagagtatggcaggaaatcaacaaccagatgtaatgccatgcacatctgttgatgtgctcatggatcagaattttggcagagacctagctcatcccaatcctgacgagctcttattgccttctgaaaataaggatagtattgtttcttgtcaatatagttctgataagcgtcttgattggagtttggagatgcaaaattgtagcgttactcctttaaatgatagaatggactctgcactgctcactgacaaaattcatagtagacagctggatggttcagagcaatcatcatattcatcatttgttgaatttcctagtacagtggatacctcattgtggaatgatacagaaaataacgctgcattgacgattgacaatataacttcttcacagatgcagccagggttttcttcaactgataacacttatgccttgctaaatggaggtcaagatgggctaggtactgtatatacacatgataatgtttctgtatatacacatggcaatgtttctggacatcctggaatgggaagtcatcaccatagagcaatgggttcattaagaaacaatagtataggaagttttgacaagaccataagcgtaaataagtatgaaagaagaataatttctgatacgttgtcagagtttaatccatgggatgattcatattcgactgctaacaattttgctaggatgcttagggaatctaaaaataatgatgtccattgcattgcgccttcatggaaatcaggaaccgggatcaaagagtccagattttcatttgctagacaggataaccaaggaaacttgtttgattcatctctcagaaactgtggtactggtactgagcagaatttcagtttgctaccccagaattctcgaggaaatatttaccagaatggccttgcattccaatctctagagaatgaattttcaaacaataactctcctggtgtattagatatggcaactactggtacatcgatgtctaaaatatctgcccccccaggattttcggcaccaacaagagtaccccctcctggattttctactgcatttccatcccaggatagtttgaaccccactcctgtgtttccttctggaattttgtgccatggcgggtctatcccccctcctagattctcttcattttcttctggaatttcaactcaggaagtgtctaagcctcctactagaccgccttctccattttcttctagattttcatcacaggacggtcttgacccctcttctagattccctttttcttctggattttcatcacatgatgggtctaatcagtcgtatggctcaacgaacccagaaaatcttctccggggtactgttcagggtggcaacagtaatcattatcaatctcagtttggaaggcactcaagtgacatggagtttgatgatcctgctatattagccatgggcaaagggctgatgcctggaattggcgattcagggctggagatgaaaaatactcctgcttttcaagcacagttgcaaccagcaagtagtgatccaagatttcagttacatgtacagccaaatgtgcagtctcgtcaaaacatgagattcacagaccctatgcaagatggtttgaaccatatgaacgataattacctggcatccagatttttagctcagaaccagggtcctctatctccttatgtgcagattccgcaacaacccagaaactcgcaggttataaatggtcactgggacgggtggagtgatttgagacaagggaataacgctcctatgtcagacatgtccaggatattatatccaagtgaagtgaacaagttgcatatgctgggttcaaatgatgtccataacagagcctttggaatgtgatcgtctcctgggataatgtgcgactttgagctgacatgttcaacttggggcgttttgtgcaagtaactggttgcacaacacatagtatacctgaggtggttaatggtgttgtgctcatgagctggcacacgactatttattgctgttggagttgaccaaaatgaaccttagttttggtccatccatttggaattaccaggttcattctcgtctatgatttgtgaagcttgaatgaaaagaaagattacgtgcctgagaagaacaaggcagctgaagttgaaatagatagagatatgtctattatgggatgtggtgtgacttgcgagcgaaagagatgaagaagattaggtgggcttggcttgatggcagcttgttttttcttgtgtcttgtacatgatgatattggtcggtggttgtatatgacttgtgatcgacggtggctgcattaacctgtagtggttgcccttgctccttcctgcctgttttgtttgcagctcctcctgttttgcatagtttatgctgattaagggaattggtgaaagtctagtgttacccatggtataataatagggaactggtttctttgttagcattacttcatttgtctaaaaaaaatccgttaaccg

SEQ ID NO: 31367 - DNA, 1409 bp, Zea Mays
gacgggctccccgggcgccctcctcatcgtctccggcccaagatacatccacgggctcgccggcctctcccacgccaccgccaacgcctggtcgctcctcatgagctccggatcctgcgaccaggctgacgccggcaggggcgacttccaggagctcgaccagatcgctgccaccaagcccttcgccaagctcgccgtcaaggcaacaaccatcctcaacgtatctaggtcttccctgccaacaagaacaaatggcacgcccgccgtgccgatttgaggtggttttggaggtgaggaggggtacgatttcggtgaccctaggccttgcgggtccggtggatggaagcggtggagctgccattaccagctaaggtggagttcaggaagccaaggtgagaccgctgctgaggtaatggagcgcatccagagaaaacttagagttcatgatgatgaattgtccaaggaggaatgggtggagggacgagcaagatgtcaatgttctattgaaacaaactgccttaattattaggctatcactactgaaacaaactacctctgtcgtcaacctactaacttccatattcttcacactcagctttgcaaaatttacttgactggctttttttggcttaaaatataactcagggagacgtgattttgggacgatcaaactgttgggattgcgcttggacattccgggcagcgtgcacccaagattgaccaagctgattcgacggtgctaggacaaagatcctgatgcgtgtctgacttttgcagagattactatagaactccaagatagtctacaccatatcgaggcacccaagggagccagccgtcgttcttgagcaaagatgtagaagaaataagaggaagaaaaagaataagaatacatacgtagggcaaggtttcctacttttttgtgtgttacacaagttgcagtatgagtgtttgtggtgtatgtcatagttataaatatttcaaggccaagtaagtataaaaaccgaccttagctcagttggtagagcggaggactgtagtggattccccatgtcatttgttcttgttggcagggaatacctagctacgacaaagatggggatggctaggaaagaaaaccaattgtgggacaatgataattgatatcaatgtcagccccttatatgctacacctgcaacctgtaatcataccgtcaactgcacctgacatccgtgcatcagaagtttttaattctgatgatttagattatgtctataaatctgttgaggatggcatggaacatatttttacttcaacaacacaactccaatttggtcatgatttgtgcttgaatgaagaagtcaagatttccttttgactcagcctgtttttctgaattactggtttgttacaaaattgtagatataat

SEQ ID NO: 31368 - DNA, 1253 bp, Zea Mays
aaaatcgcgacctggtgactcagttggacagctctcaccactgaaccagaaaagggagatttttcaagatcttgctccgctgctttggcactcatttggcacaattgctgcgttactccagtgtgttgcatcgcaccctgagaccaggatccttttcctaaatgctcatattccattgtacctgtaccctttcctcaacactaccagcaaaacgagaccttttgagtacctaaggcttactagcttgggggtcattggtgctcttgtcaaggttgatgatactgaagtcatcagttttttgctgcaaactgaaataattcctctgtgcttgcgaaccatggagatgggtagtgagctatccaaaactgtggcaactttcatcgtccaaaagattcttctagatgatgttgggctgcgctacatttgcgccactgctgagcgtttctttgccgtaggcagtgttttagcaaacatggttgtttcacttgctgatcagccctccacaaggctgctgaagcacatcattcgttgttacctccggctgtcagataaccctagggcttgtgctgcattgcagagctgccttccagacatgctcaaagatgggaccttcaataactgccttagggatgatccagcgacaaggcgctggctccaacagctcctgcacaatgtgactggcggaggcatgggaggtgctcctcaaccaggaatggatcccatgaacatgggaatgtgatgtgcattctagttgttgcaattcactgcaataacacatcacctctcagtgaattacaactagagaagatctggccactgtccagatgaaacttagtatggtgtagcctgactttctgccggggtaaaaataggaatgttgtttggtattgccataagctaagctgtagaaacaagatcggcaggcttctgttattgtgttcttgcaccggagctcttgtgcgttgacccttcagaacctgagaacaaaggaggaaacccccgtcccgtgaagctttgtcgcagtgccgatcgatcaagatcttgaattgcttcagatgatgccataagaaagcatactgaaaagaagtgtatgccgtgtgctatattttacgagtttatgggttgcttttgtctttctagtggcgtcgtgtaacaaagtccgctgttcttaatttgttcaggtaacaattaattaatccagcaatattttttcccaggttaccaataataatataaaaatatattctataaaa

SEQ ID NO: 31369 - DNA, 2005 bp, Zea Mays
cagaaattcacaacatatgacaaatatgcaatggaaatgtgaagtgaggcaaccaacaaggaagacacagtgatttgtttgaccaaagtttgggcctcaccaagaatttcctcgtgtgcactatcgtgtagccaggacaatcgatgcatctactctgacgacactacgagatttggtcccaacaaagcttgctgcttccctgtggaattcccttgtcagatttaagtcaacgatacctgaatttccacaaacagaaacatgtgaactacttattgttgaccggtcaatagatcagattgcaccaattattcatgagtggacgtatgatgctatgtgccatgatctattgtgtatggatggcaacaagtacgtgcaagaggttccaagtaagaatggttcagcaaatgagaaaaaggaggttttgttggaggatcatgatccagtatggcttgagctgcggcatgcacatatagctcatgttaatgaaacgctacatgaaaagatgaccagttttgtatcaaagaacaaagcagctcaactacagcaggcaagatctggtggagagttatctaccaagcagttgcagaaaatggttcaagctcttccacaatacagtgatcaaattgacaagctcacccttcatgttgagattgcaggaaaactcaataacataatcaaagaacaccaccttaaagatgttggacagctagagcaagatcttgtgtttggtgatgctgggacaaaagaactaatcagtttcttacgaacccgcatggatgtaagtcgtgaacataagctgcgtttgctgatgatttatgcttccataaacccagagaaatttttcgaaagtgagaaaggtgcaaagctgatgcagcttgcaggattatctgctgatgatatgattgtagtaaataatatgcgctgcttacgtggagctgattctaagaagtcttcagttggggcttttactttgaaatttgatcttcagaagaaaaagcctggtatcaggaaggagcggactggagaagagtcaacatggatgctatctcgattttatcccatcctggaggacttgattgagaaacttagtaagggtgagctaccaaaagatgagtaccactgcatgaatgatcctagtcctagtttccgtggaattccagggagcacatctgctcgaacgagcccagctcatcagccagcccaatccatgagatctagacgaataggtggcacatgggctagacctcggaactccgatgatggttattcgagtgactctgtactgaagcatgcatcaagtgacttcagaaagttgggccagcgcctatttatctttgtaattggaggtgctactcggtctgagttgcgtgttgcccataagctgtcaggcaaactgaagagagaaattatccttggctcctctagtcttgatgacccaccgcagttcatcactaaactgaagatgttatcaaccgaggaactgtcgcttgatgatttgcaaatataacaattccaaggacgattgtccgtggcattctacactgctagaggggcatgatattcattcggtagccaatgtcagttacaatcgagtgtacacacatggcagcgaccagagactgtaatataggtggcgtctttattagattggtggatcagtgaagttcaatgttccgaggacttctatttgtcctcagattgctgctattttgtggggaaagtgtatattttttcctcaaaccggtgagattaattcgtgtaataataacaacaaaaagaagagctagagtaagaacaaaaatagtaataataccagtagcaataatgataataatataagagcaatgaatttacaacaagagtatgtctgagacatataggggtttttagtttgagtcaatgtttacaagtcgggcgaccagctggttgagcgagagggccgaccaggcgactaatcgtgattagggtgatgattagtcgacctatttgtcctggtcgacctctg

SEQ ID NO: 31370 - DNA, 571 bp, Zea Mays
atggagcggcttataagcgtgggcgcggacttgatagtaagaagtctgttggtggctgaattggttatgttcagctcttgcgcagaggagccgttactggtgcgcgcggcgcggggcgaggatggcatcccacattggatgatgcgacaggcagggcggtacatggcggagtaccaggcgtcggctaaggggaaactcacattcggccatcaggttcggggagcttccagctgcgaggttttgaggtgggattttgacctcaaggtccaaggagatgcttatggcgtcgatgtcagatatcgagacaacaaaacggggcagcatgtggggactggatcagaaccttgatcagcccaaggacaaggatgtaagtcaactgaaggacatgtacagataaaggtacatcgccattgtatgttttctacaatatctttccacatggtattgatgaagacgaggatgtaattggagctctattgttgatcattttacactcactctcatccctctgatgaagtatgttttagttgtcttgcaagctaatgataatggtcaaggtccatgcaccgtg

SEQ ID NO: 31371 - DNA, 3890 bp, Zea Mays
ccctcttatcccgtcgcccagatctaattctgtttaacgccttcgtctccgcggcgtcagggcgatcccgccgagggtataagctggtatcatggcgtccagcgcagtagcaccaagatggttaaggggtaaggtgaaggctgtgacatctggggattgtcttgtaattatggggtgcacaaaggctgagatcgaacctgagaagtccatcaccttatcctaccttatggccccaaggctggctcgtcgtggtggagttgatgagccgtttgcatgggaaagcagagagtttctgaggaagctctgcatagggaaggaggtcacattcaaagtggattatacagctcctaatattggacgagaatttggaactgtttttctatgtgataagaatgttgcatactcagtagtttctgctggatgggcaaaggtaaaggagcaaggctccaagggtggcgaacaaaacccgcaccttggtgagttgttgaggttagaggaagttgccaagcaacagggtgttggtcgttggagcaaggaacctggtgctgctgaagagtcaataagatatcttccaccatctgcaattggtgaagcaagtggttttgatgcgaagggttttgcggttgaaaataaaggcaagagtttggaggccattgttgaacaagccccatcaatggggagacgcccatcggcacctactgtaattgctgaaactgatgatactgctaatgacacgaacggtgaagattctgagggaacacctgcccaactgactacagcacaaagacttgttgcatctgcagcttctgctgaaattccaccagataggtatggaagagaagccaagcacttcacagaggctagagttctcagcagagatgtgcgtatcgtggtggaaggcacagacagctttagtaatataattggttctgtgtattaccctgatggagagactgcaaaggacttggcccttgagcttgtcgaaaatgggcttgcaaaatatgttgagtggagtgctaatatgcttgatgttgaagtaaaaataaagctgaagaacgcagaactacaggctaaaaaggatcaattgagaatctggacagggttcaagccacctgtgacaaactcgaagcccattcatgaccagaaatttactggaaaagtggtagaggttgtaagtggggattgcattattgtggctgatgattctgctccatatggcagtccttcagccgaacgtcgggttaatctgtcaagcattagggcccctaagttgggcaatgctcgtacagatgtgaagcctgaccattttgctcgtgaagctaaggagttcttgcgcatgaggttgattggcaagcaagtggctgttgaaatggaatattctcgaaggatcagcaccgtggatggacagagtgttgctccaacagcaaacattgctgatacaagagtattagattatggttcagtttttctgggttcaccatcacagactgatggagatgacatatcttctgctccgagctctgccagccagcctggagttaatgttgctgaacttttactctcacgaggctttgctaaaacatctaaacacagggattatgaggaaaggtcgcactattatgatgctctattagcagctgaatcacgggctgagaaagcaaagaaaggagtgcattctcaaaaagaatctcctgtgatgcatataacagatttaacaactgtatctgcaaagaaggccaaagatttccttcccttcttgcagaggaacagaaggcattctgccgttgttgaatatgtttttagtggccatcggttcaaactaacaattcctaaggagacttgcagtattgccttctcattatctggtgttcggtgtcctggtaaaggcgagccatactcagatgaagctattgctttgatgaggagaaggatactacagcgtgatgtggagatagaggttgaagcagttgacagaacaggaacattcataggttcgttgtgggagtccaagaccaacatgggctctgtacttctggaagctgggctggcgaagctgagttcttttggcttggataggatgtcagatgctcatgtcctaacaagagctgaacagtttgcgaagcaacaaaagattaagatatgggagaactatgtcgagggtgagaatgcttcaaatggatccgcacctgaatcgaaacaaaaggaaatcctcaaggttgtcgccacggaagttcttggtggtgggaagttttatgttcagacagtgggtgaccagagggtggcttcaattcaacagcagcttgcatctttgaaacttaaagatgcaccagtcattggtgcctttaatcctgtgaagggagagatagtcctctcacaatttagccttgacaactcctggaacagagctatgattgttaatggacctcgctctgtagaatctctaaacgacaagtttgaagtattctatatcgactatggcaaccaagaggtggttccctacagtcgtctacgacccgtggacccatctgtttcctcttctcctgctcttgctcagttatgcagccttgctttcataaaagtgcccagtcttgaggatgactttggtcaggaagcagcagagtatctaagtgaatgtttgctcagtagctcaaagcaatatcgggcaatgatcgaagaacgtgatgcttctgggggaaaatcaaagggacaaggaacctgaaatgttctcattgttactcttgttgatgcggagacagaaagtagcataaatgctaccatgcttgaggaaggccttgctcggcttgaaagaagcaagagatgggacactagggagaggaagacggctctccagaacctggaacagttccaggagaaggcaaagaaggaaaggctccggatctggcagtatggcgatgttgaatcggatgaggacgagcaggccccagctgcaaggaagcctggaggtcgtcggtagagctccccaaatgtgagactctgctgggagttatagatgcaacttagagggtaccttatttattcggttagaaaacagaacttagcgaggcgaaactttctcggtttgagcacttttgatattccgttttttacatcgtaagcttataaggttaaaggtacattgttttttctctgaacacaataaaggtcgtctatgcgctgcagttctttgtgtagtcagaatataatatttgttgatactaagaaatgcagtgaattaaagttaatattgcatttaattattctcgtgcaataatgatttctctcgtacgcatttactgattgctttgtggcttgattactgactgctttgttgcttgatgataacattcttcgaaactttgctttgttccttgatgatagcatttttctttggccgcttgctttgtcaagtgaaaattatttgcaatacatacttcgccactattgattctctcttgtaggcttttaagtttagctccaaacaacaaaattttagagctctagtttagagttctaaatttgagttaaagctctaaatagttgctgttgggcctatgcttcgtcgccgaaggtcttctaggaagaagcggctttcggctgaagctgtttgtataagatggccgaaggtccctcttcatgaagcttcggtattacaaaccgacttaaagatagaatgaccttttagtccataaaggtctgagtcaatgttgtaaacttttataaggggcatacttgtaatccctcacaggctgcgccctgtgcctataaatagtgaacagtattcctttactgttcacggattctagtaattgcaatcgcatattctggaattcaaccttttgtcaaggcagaggtattattgtattcaacgattggatatattaagaaaatat

SEQ ID NO: 31372 - DNA, 570 bp, Zea Mays
agatggtgcatgatgaagaggtcgaagacctcggggatttggatggcgcactgcccgagccgtcgagtgtgaaggaggggactgggggagctggcgccaccattcgatgctggtgagggccccttggcgacccccgcaccgccttgtgctggcgaagacctcgtgccggccgctgcgctgactagagtggacgcttcggtggtggcggccgaaccggctcccgaagaccctgcggcgacggccgacccttcgaaggtggcgggcgaaccagctcccaaagaccctgcggcgacggctgacccttcgcaggtggcggaatagggactagggctatcggttgtaaaattttgtttctatgatactgaaactcggttgctgcgcaggtttcgacgtatgggcctgcacaagcaatcgctgctgatgatattgattttgtgggcggcccgcagccataatgcctgctaatgacagtttaattggttctagatctaggtgtttttcgtctcatggtgagcctgagagtctgttttcctggaccaaagagtcttcagatgaggacttagattattt

SEQ ID NO: 31373 - DNA, 4160 bp, Zea Mays
ctaagttctaaagttttgttttgtgctatccatagctcatttggttgaattatcttaacaggccccaagccttcagaattgtttggacgttacacttggaggattgaaaacttctcgaaggagaagaaaagagaaatgaaaagtgagccatttgaagctggtggttacaaatggtatattcttgtatatcctcaaggatgtgatgtctctaatcatctttcattattcctttgcgttgctaatcatgacaaacttctcccaggatggagtcattttgcacagttcactatagctgtagccaatatagatcctaaaaagatgaagtactcagatactttgcataggttctggaagaaggagcatgattggggatggaaaaaatttatggagctatcaaagattcaggatggttttcttgttgatgatgttcttgaaatcatagctcaagttcaggttatcagggagaaagtggatagaccttttcgttgccttgatcgtccttaccggagagaattgatccgcatctatatgacaaatgtggaacaaatataccgacgttttattgaggagcgaagaagtaaattaagcaagctcattgaggacaaaataaaatggtccagttttcgtgctttctggtcagcaattgacccaaacaccaggcatcgcatgtccagggaaaagactgacaccatattgaaaatgttagtgaagcaattctttgtagagaaagaagttacttccacattagtgatggactccttgtatacgagtctgaaggcacttgaataccagatgaagggcaggaaaggcaaaacaaaattagcagatttggaagaactacctgcgcctatggtccatgttgacatggacatgtttattttggctgatgatgtcatagctttgcttgagagagctgccttagaacccttgccttgtcaacctttagcccccaaggatgataaaacttcccaaccccgcatgaaggatggaagttctggtgaggtttacaatgtttctatggagcgtgaggaaagacgtctaactgagcttggtcagaagatactagagacatttgtgctatctcatatatttagtggaattgaagttgcgtaccaagaagctgttgcattgaaaaggcaagaggagcttattcgtgaggaggaggaggaggctgggcttcttgaacatcagatgaaggggaagcgtggtggtggtgtaaatgaaaaggacaagcgtgccaagaaaaagcagaccaagcaaaagaagaaccgtaaggctaaagacaaggaaagagatgagaaatgcgaggttaaaattctggaaaggcttcgtgatgaaactgccattgataatagtgatggcttaccatctcaggtggaagtgatagcaaagattgatgccttggaagaaggttcttcagatgggtcagacatgtcaaatagagggaaaaatcagcgtaacaagggcttaagcattattagctttgccgaggaaggtgatggtcttccctccacctctaatgtcactggtggtttaggccgcaatagttctggctgctgcacagctccaaaactggatcaggatactgttctacttaccttgagagatagacttcgtaagttggggcagcgtctgcatgagaaaaacattgaggggcagaaacttctcaaaaaacattttgaagctagggacgcaaaagcgaaggaagaaccttctgactcatctaattctttggataagccacctgatgttccagagatcccggtgcattcatcagaagataccgttgatcttaaagtgaatggaacaccaaagaaggatgcatctgtggtcaaccctgttctggaggattctgtttcaggcataccagtcactgcaaacaatgaacctgtgccttctcccaccacaacaaaaatggacccagtttcaaacaaagttaatggatcaagtttgaaaatgaaagtcaccatggcatctccttgctccaaatcacatccagctgatatggataaagatgcctctcttccttctaaatcaccacgaaccaatagagctgctccagttcctcctaagctgccttcagctgataaagcaacgctagttccctcaaagctaccttcggttgataaagctactccagttcctcaaaaatctccgttggtaaacaaagtagctcaggcccgtcccaaatctccagcagttgacaaagcaactccacatcgtcccaaatctccagcagttgacaaagcaactccagttcgttctcaatctccagcagttgacaaagccactctagttcgccctcaatctccagcagttgacaaagcaactccagttcgtcctcaatccgcagcagttgacaaagcaactccagttcgcccaaaatctccagccattgataaagcaactccaattgctcccaaatctccaccagttgataaagcctctccagctctgccaaaatcattatcaggtgctaaagatgcgctttttccttctaggtcgctgcagattgataagtttactccagccgccccaaggttatcacaagatgataaggctgctctgccttcttcagaacagtcacatatatctccagctactagttctgaagctcaaggggcaactactaggaaggtcacaactaccacctcactttcagaggctgctgcagcatggaggccttcaagtgctcctgtgttacccacaccaagatcaaccgggccagctgcttcacatattcaaacttccacattgctttcccgctcgatgagtgaagcagctgggagaaggccagtaaatgatccttcattttctgccccatcttatactccacagacctaccggaatgcaataattggtaagtctggtctgtctatgacctccgcaagccttgcgtatcagccgtcttctctggatcaagacactgctccttcacggcctctatcagcatatgcatcaagtacagtcatgatgcctcctgcaggaagatctgatcagtcatcagctaggcatggattcaagtctgggcctggtaagttagaagcacatgacggctggcagcagtggaaaggtgacagtaatgttgatatgcatctctggagggaccacgctccttaccaacaaatgaccaacagtcaagcatatgagcagtctcggagggacgatacttatcagcaagcatgcagcagaggaacagaaaagttcagcaggcatgcaggactgcaagctaggcagcagttccaaaccgagacacccgccagtcatgtatggcatcaaccgcaggggccagtggcagaagaatttccacaccttgacatcataaacgacttgcttgaggaggaccagatcaacggcagtataccggagtcgtttcgtcaagactacaacgtgtttggcctgccgttttcaccgagaggaaacttgtcagacatggaaatggcttctgttagaagtcccgctcggttcaattcacccaagtacgatggtggattgtcgggggcttatgacatgaatgctgtcaatgggttgagggaacggcagtttccctcgttggatatctactctaatggcctgtctgacgtgagtgcttctaagccttggctgaatggctctgccagtccatcggtgagccttggggtcaacacaaatggataccacccccaggtgggtgagtacctgggaggtggggtgaacggggtctccttgtggcgccgccatgccaacggccgctggtaatgcgaggtgcctgtatacaatcatacagtcggaataatgttttgttgtaacagatggtttcgggcctgagctgatgcgccatgtaattaaaagtttttaagttttaaaagggaaagaaagagatacaccctgtaaagtctgcgcctttattaggataatttgagtgcttttctggttgaagttgaactctgacctaactttgttaaatttcaaagctaaatttggcggtggcctgtgggagagagaagaacggtatgaaggttagcctgtccgacgagtgctgacggagcaacctacctaatcgcctacactttgtgcttctgctaaacatgttagtaccctgtccaaaaaatatgtacttactagtttgcaaaagaatgacgttttggaagatctgagtcgactgagtgaaggatcgaaat

SEQ ID NO: 31374 - DNA, 2022 bp, Zea Mays
agacgaaaaaccgagcccacgcgagaagaaaaaaagtggctaaaaatggaggcgtccgcggaggcggcggccgccgccgccgctgcgcgaacgttgaggtgggctggccgcgcggggcacctgggcggcgtcccgcgcgccgtcgtgttcgccgcggtgggcgcgttcgccaaggcgtgcgcctcgctgctcaacaccaccacggtccacaacgccgacgcgctcctccgcctcgtctcggcgcgggctcccgggacgccgctcctcaccgtcagcaatcacatgtccacgttagatgacccgcttatgtggggattcaagggttttccaacttcggatgcaaagcttggaaggtgggtgctgacagcagaagatatatgcttcaagaatgtagtcatgtcctacatgtttcgacttggtgagccttaatattcctacttgttatatctgttccgttcctgtattagttttgtgagttctactggtactctgcatgctaaataacgaggggtgcaatttgggtatgtataaaattaccacttatatactcatgcgggttttatggatgaaagttgaacatttagacaatagtacttatgtgggtttgggtaaaaactgacacctgtatatgatcaacttatgcgggttttgtggatgaaaatcgaatttgtaggcaatgatctttatgtgacttctcaaaaatctgagatgatgtaacatcctctaactcatttactcaggtaacatttcatttgaagatatggattgttgccttttgatagaggactacaaggcattttaaggtgtatccagtgaagcatgcaaaataggaaaacgtctagcacaatcctattaaatccagcaaacacctgtctgttccgtacttatgaaatccagtttcacttcaactgccagcaacctttttagaaattcagtttcatggcactcaattcacccaccaagactagcgaattgcagagggttggcatagcttgtcttcttgccataatatcttcagtccctcatttgcagtattgtgtatcagataagattagctgatgcttgctaatctatgtgctgtggtactagtacaagaagcaaatggtatcaaatgtagcgcctcattatattttgttcaactgatattcagatgtccaggcccttcacattatttggttattcttattttttccatttctaaggtgacaaataactgtgcgcacagggaaatgcataccaatcacgagagggggtgggatttatcaagaacacatgaatgaagcccttgacgtgcttagaaatggaggctggctgcatacattccctgaaggaaaaatagcccaagaagatcagccgattagaagattgaagtggggaacggccagtcttattgtccgagcacctataactccaatagttttgccaattgttcactctggtttcgaaaaggtcatgccagaaaactcgttctttggacggcgaccaccggtgccactctgcagtaagaagatagacatcattgttggagagccaatagagtttgacttgccaagcttgaagcaagaagcatcaacggtaccccatgactcatcctctgaacggaaggggtggccggccattacaccagatgggctggacgaggccgcccagagatggctttaccagaagatgtcagacaaggtccagtctgtgatggagagactgcggaaaacagttaccaaccttaagcagcgttgatcttcatctatcaggcaataccttgttgaactgctgattaggattctttaaccagcttgagttggtggatacagaaatggacaagtggtcgtcacacaagttcgtcaaagtattggtaataatagaattagagctcagattgtttcattttttagtctttttttagttattgttttgaaaggtttcttcattatttacaatcaactgttcaggttgcctgccagttttactgaggcatgaataaaaaaaggcttttgatattcagttgcaaaatcaccatccatt

SEQ ID NO: 31375 - DNA, 112 bp, Zea Mays
gacgcgtcgcccgcgccgcctgcccccataaggtcaacctcctcatcctgcacatgagcctcctgctcaccctcctcaccctgcacatgagcatcctgctgaggagcctcct

SEQ ID NO: 31376 - DNA, 1980 bp, Zea Mays
tcgcggttctaccgctccgctcatgcccgcggccgaaccctcccccgcatcccacagccgccgacgctcaccttccatcctccccgcagcccgcagccgccaacgctcaccttccatccccgcggatcccacgctccctcgggcgctccttccgcgcccgcccacagatctcccatcgacgtcgatgctctgcgattaagcccagctaaactcgcgcggtttggctttggcgcagcgctggagctctcgagacgctcgcttggcgccgaagcggacgaggagcagttgtcggcgtccgctgccgtgtcctcagctccgccatctccttctccagctcgacgatcctctgcttcctgctcgtgaactccagcgcggcagcgtcgagctcggcgcacagccacccgttctcggcttccacccgctctgcggtgtccctgcacctctggagctcggtcttcttggccgcgagctcggcctccaggactgcgccaaagccaaactgctactgctacaactccgccgtgctctccatggaagcttctgcgcctagatcaacagcgttcggccgctggtgcccggcgctaagctccacgccgtcatcgagcgtggcacagtgattccgtcctcgacctccccttcctctgcaacatgtccaggaccgggaactagtagtgggaggatcaccgtccaccgtcgagcgtctgcaaggcaaatcagatcaaccaccacatcggagtgaaaagtctgcgccactctgcctcacacagccaaaaaatgtatcaggtgattaagaaccatcccagctcattgaagctttatgagcagaaactgctaggaacgagtgaagtcatgaaagaagatgtccagaggatccatgacaaggtgaaccgaatcttgaacgaagagtttgctaagagcaaagactacgttcccaacaagagggattggctctcagcttactggactggctttaagtcaccagagcaaatatcacgtgttcgcaacactggagtgaagcctaaaatactgaaacgtgtaggtcaggcaattactacactgcctgaaaacttcaaaccacatagagcagtgaagaagatttttgagctgcgtgcagctatgatagagagtgctcaaggaattgattgggctgttgccgaagccctggcctttgcaacacttatagtggaaggcaatcatgttaggctaagtggacaggatgtggaaagaggaactttcagccatcagcatgcagttctgcatgatcaggaaactggagcaaagataaagagactagttggagcttcattgttgatttttgcaaataagcaagacatgcaaggagctctaaaaccaactggaatcacgaaggtaagcgaacttcagtcatttattatatgcattagagacatgttttcctatctatgacatcatttttaacttgtactatgtttttccggtcctcatggttgccaagattttacttagttcgatgtgggagcaaaaggatatgccaaattgaatgtagtttcatcaattatgctcaattatggatgttcagaggcatccaatttcagtgtgtactgcaatacttgggtccacctgtacttggtttaagaagcgctccgcggacttccacggccgcgccgccgatctcgtccacggcctccggggcacggcgatgcccaggagacaggccctcaaggaagagcagtgcagagaagagaaaggtatctcgactattccaaagcacaagtatgcatccaaagcctgttccccaaaaggatcgaaaggaacttcaacctgaaccagcgagagtatcgatacaaagactgtttgaaatcttctagaaatgacatcgaatggaacttcaagctgaacaagcgaaagcatctatacaaagactgtctgaaatcttctagaaacgacatcgaaaggaacttcaagctgaacaagcgaaagcatctatacaaagactgtctg

SEQ ID NO: 31377 - DNA, 1456 bp, Zea Mays
tcctagataagatagatactactgttgactggttgtctttacatgacagaacaaactgcagcacaattcggaaagcgtaaacaatggattatgtgccccacatgccgccagcgaacagatattgagaacattgcttttgtagttgagaaaccttgggacaaacatgaaaagagcattgaagatttggctgaaagcactatttctgtccaaggttcatatggaacaaagtttgaagctgtcacaagaagaatcttgagaatcacttcaactgatggaacagctaaagttcttgttttctcaagttggaatgatgtactggacgtactagagcactcccttgctgctaacaacatttcatatgttcggatgaaaggaggaagaaaatcacaggcagcactctcccaattcaagggtcaggagagcaatataaatgtagataaagtgaacagggcagcctgcaaaatgcagcctgttcaagtacttctgatgcttatacagcatggagcaaacggtcttaatctactagaggcacagcatgttattctagtggagccattactaaatcctgctgctgaggcacaagctatcagcaggatccatagagttggacaagacaaaagcacatttgttcaccgttttatagtgaagaaaacaatagaagagagcatctacaaattgaacaggagcagagctgtctgctctactataaaccgtaaatccaaaaacttcaaagatgagcctgttttgacgctgaaggatgtggagtcgctattcccgatggcaggacctgatgaacccctagaacaggcagatcaaaattacggcgatagcttgaggagtttgcctccatctgttgccgctgggttagctgctgaaagaaggcgactaatggagcaataagttaatggagtttgcctccatctgttgccgctgggttagctgctgaaagaaggcgactaatcaagggacctccatccatcgttgtggcagttgtgctaattttacttgatcagaatttctcttcgcagcacagtaacgacagtaggagaatgatgctccttagttatgaagcacccccatcatgagaatcaggctatttacgttgtaactttaggattttttttttatgtacctgtaggccttttagactcttgtacataagcttctagttttagttcgtttatacggcccatcctgtagttttgatgtagcagctctcagctctgccactgctacaccaacttatggcatgtataagtgtactaatacatggtcatcagcatgatacattctttagatgcttggtcaattttttagatgcttggtggtggcagagccagtagtcattatggaagaaaattgtcggttgtcctatgctgtctgcagatgtgccggatggtcagtcaggaagatgcagcaaggctttctgatagcttctgcatccgggcccctgctg

SEQ ID NO: 31378 - DNA, 2558 bp, Zea Mays
ccctccgtgtcgtcaacggcaaagccaaacccatcaaacccgccgtccaaaccagctgaccacagcagcagctctccatcggacggcagagagcagccgttcgccacttggattcaaacgccccgtcactctaaccgctgctgaaactaccaaattacccctagcccgctccctcagcttcctgctcccccctctgtcatggccaagacgaagcaagggaagcgggatgtcgacgcctataccatcaagggcaccaacaaggtggtccgagtgggggactgcgtgctgatgcggccagcggacacggacaacccgccgtacgtggcgcgggtggagcggatggagtcggacgggcgcggcagcgtgagggtgcgggtgcgctggtactaccgccccgaggaggccaagggcggccgacgcccgttccacggtgccaaggagctcttcctctccgaccacttcgacacgcagagcgcccacaccattgagggcaagtgcatcgttcactccttcaagagctacaccaagctcgacaacgttggtccggaggacttctactgccgatttgactacaaggccgccaccggtgcattcacccccgaccgtgtcgccgtatattgcaagtgtgagatgccgtacaacccggatgacctcatggtgcagtgtgaaggatgcaaggactggtaaaatcctgtgaaaactccacacttttctcccattagtgcatgttttgagaggggtttatctagtaaaatcactgtgaaatggctccacattttgccctcaacaataaatctcttgaaatggtgctgatgtggtggttatatgaactgcctttcatcaagatgttatttttttctgctctcttgccctatgtctactttgttatgcagaatgaactaattaatttatcttgtgtttatttagtttccttttgactgcgaggcgaagtataattcatctggaatatctactttggtcaggattaggaccaaacaatgaatgatgaacatggggttccttagagccttatgctcctgtgtttgcttggtccttatgtaagatatatatggtattcactactgactagtattgcttacacagtctttgtagatatatttagtttcaagaactgtttaaacacatcatcaaggactggttttctgcaaaatctcgtagcatttatctgttttgttctgtttaattatacctgttgcacattggtttttcttgcttgacaagcagctagcttagttatatggacctgattgtggcacatgtgattctctctggagtactatcaaactaatatagaattggattagaatttagaacagtaggtgccatgcagtgtttttaggatttgcatgacctgacattttatttattttttctaagaagcttttaagatgtttgatctacatgaatatgattgcttacgagaacatttagacatcatgcagtatgctatctctggattttgtcacatgataaatgtatgtcatatgttctacataatgatcaaagggctgcatgatgtagttatgatggttgtccttttcgttggctttctgctgaaatgatttcttgagagctgatactcttttgccatttatatagaatatttgttattatttgtatccaatatcatcttattgttgctaaccattattacgggcctgtttggttttccacctaaagcgccacaatctgcctaaacttagtcgttggaattgagaactaaccttagacaaaaaaagttaggcaaattgtggcgccttaggcacgaagccaaacaggcctaaatcctctacatcctggtgccatggatatgagtcatatgacttgtacatataatcctgttttttctatattctatggaaaatgcttatttaacttgttaacaatgtaattttgtttctgttatttgtatgatgttattgttcttctttattaccatttttattagttatccaacttttaactcttgtaggttccatccgtcttgtatgggaatgaccattgagcaagcaaaaaagatagatcattacatgtgctcggattgtgctaaagaaaatggtgcaaagagaccctcaaattcatactcagtttcaccaaactcagattctaagattgaatcaaagaggcgcaagagataaatgctgcggcagaagcacccctggcaaaggagatgcggtatttatggtgtcagctcctcattactggtgcatatttgagatgttgatgtgtacactgcgagagaagagccaagccaattgtagggcaaaacctatttgacttatcattcttctgtgtattctgcctagacattagtgtgatgagtaggtgagttccccgttgcggcgtgtgcatgatcagctgctggaggcgggatgtcgggaaatgctagaattatgctgactcttgtcgatgtaagtgtatcgtgtgtgtgtgttaacatatgcactggctggaaacgttcccatgtgtgaatggaggatgctgatgatagcttgactgttgtttcatattcaaaatagacaataagaaaagaaaaa

SEQ ID NO: 31379 - DNA, 3044 bp, Zea Mays
ctctgctccgggcgcaccgtcaccggggtgaggctgtattgcgtcgacagcaacacctgctttcgctacgacgggagcaccagaggctaggatatattgcttcatcagtgacagggagccaagatgccggccggagggttctcggtctcggcgccgtccggcgtcgagttcgaggctaagatcacgccgatcgtcatcatctcctgcatcatggctgccacaggcggtttgatgttcggctacgacgtcggcatctcaggtggtgtgacgtcgatggacgacttcctgggcaagttcttcccggcggtgctgcggaagaaactggaggacaaggagagtaactactgcaagtacgataaccagccgctgcagctgttcacgtcgtcgctgtacctcgcggggctgacggccaccttcttcgcctcgtacacgacgcggcgcctcggccggcgcctcaccatgctggtcgccggcgtcttcttcatcgtgggggtgatcttcaacggcgccgcccagaacctcgccatgctcatcgtcggcaggatcttgctcggctgcggcgtcggcttcgccaaccagtccaagccaacgtatacgacatgcaccgcgcaattatgtcagagcaggcgagactgggacagtgttcatgtggtaagtgtttattcattcagcagaagcttttaattagggaaaataaacgagcttgatggaggcctacatgctgttacatagtattagtatatctgcatatggggcgttgtttagctagctataggtttcaacgcttcaactgctacgccggaaaatatttccaggatgtgtatgcacgggtgcaccaaccgctctcacactagttttgtttaatggccactacacatcaggagatgggtactggccattaatattttgagacttgtagagtagctttttgccttacatttcagactgttctttgagacttcagactataactttgaagtccaaaaaaaaaaccaattttctcgtttggctggacccaggttgatggttctctttccttggtagccagcccaaagccgaacaaaacacctagttcgttatgggcccaataagttttccctttgaaaaattgtcggcccactcaatgggtatcgatgaggctgcgtcccttcttgctgtttccttttgaaaaaaactagcgcgacattctggttctgcctcgcaaacaatctgatgacattcgtttgctgcaggccgttcccctgttcctgtctgagatcgcgccgacgaggatccgcggcgggctcaacatcctgttccagctcaacgtcaccatcggcatcctgttcgccaacctcgtcaactacggcacgtccaagatccacccgtgggggtggaggctgtcgctgtcgctggcaggcatcccggcggcgctgctcaccctgggcgcgctcttcgtgacggacacgcccaacagcctcatcgagcgcggccgcctggacgagggcaaggccgtgctcaagaggatccggggcaccgacaacgtggagccggagttcaacgagatcgtggaggcgagccgcgtggcgcaggaggtcaagcacccgttccgcaacctcctgcagcgccgcaaccgcccgcagctcgtcatcgccgtcctcctccagatcttccagcagttcacggggatcaacgccatcatgttctacgcgccggtgctgttcaacacgctggggttcaagagcgacgcgtcgctctactcggccgtcatcacgggcgccgtcaacgtcctctccacgctcgtctccgtctactccgtcgaccgcgtcggccgccggatgctgctgctggaggccggcgtgcagatgttcctgtcgcaggtggccatcgccatcgtgctgggcatcaaggtcaccgaccactccgacaacctgggccacggctgggccatcatggtcgtcgtcatggtctgcaccttcgtctcctccttcgcctggtcctgggggcccctgggctggctcatccccagcgagaccttcccgctggagaccaggtcggcggggcagagcgtcaccgtctgcgtcaacctgctcttcaccttcgtcatcgcgcaggccttcctctccatgctctgccacctcaagtacgccatcttcgtcttcttctccgcctgggtcctcgtcatgtcgctcttcgtcctcttcttcctgccggagaccaagaacgtgcccatcgaggagatgaccgagagggtgtggaagcagcactggttctggaagcgctacatggacgacgacaaccaccacatcgtcaacggcaagctcaccggcgcctccgtttaactactccgtctgctctgttcatgcatcagactcacttgatagtactacagcactactactgcaacaccgcaaccgcaatcccgatggcaattgctagtactgcaactgcgatggcaatgccgccttgttgttgtacaatagcccagtgtttcggccagagtccgtgctcatctttgatttgtagtatctttcaattttcaagcagagtttacacggattgtaatcacatccttgcctggtcatctaaaactacatgtgtactatttccggcgctataacgtgtggttgattcatcacagacagtcagtcgtactcgtaggctcgtaccatgttctgagcttcaggcaagcatatatatatagtttttagtgcccattgtgcgtccagtaaacatgtgatacttacttcaggaccaagagtgtcttaattaaccattcacggagtagctgcacagtcacctttttttgttcaggttttttctcgtgatccttttgagaatctagctgcggagagaatttagttatggagaccggagagaatcctagtattgtgcagagtaagtgcggcagggtttaggatgtataaaatgacggttttctattatcacaacgactcgaccgatttcatatttacattgattttggacgattttgactaaactggtacttatagaagcgaactgaaaagctgagcgtttcactgtctgcagcaacttctgttggc

SEQ ID NO: 31380 - DNA, 2365 bp, Zea Mays
ggaaacaggtaggtatacgagccaaacaaaccaccaccaaaaccctcctcccgtcctcgctcggtccctccccctcgctccggccgccacaccacgcgggcacgtcaatggcgcgcatcgtgtcacgagcgctcccgttcgcctcgcgctcgtccctccgcctcccgctcccaccgcccttccccggcgcggcgctggtccgttccgccgctgcgggttcgcccctgcccccagctgccgaggctgcactcgcggcctcgctgctctcctggcgcgggcacacggccacccccgagtcctcgatagcggcgccgccgccgttcgcagggtttctcgctggaatccgcaggttccgcaagggacggcgcggacaggcgtcggcgaagcggtcgcagcctcaggacgccccgccgcccccgcccccgcccccgcctccaccgaaggagagagagatcgaactcgtcgctcgcatcggcatcgaggaggacatgcctgacgacccagaagtgctgaacattgtagaaatccttaagttaaatgtcccaatggcaatgaagattgcacttgatggacttctggattccagttacagcacccgagatacctcaataagtgatgttgggaagtatgataaggttgaggtttctgtattgctatgcaatgataacttcatccaagatcttaacaaagaatggagagatgtggactgcgctactgatatactctcaatgtcccagtacattccagatcttgatgttcccatcctaatgttaggtgatatagtaatatctgttgaggcagctgaaaggcaagctggggagaaaggtgttacacttcttgatgaagtgcgggtcctagtggttcgtggcatattgcatcttcttggttttcaacacgagtcgagcaatgaggctgcagcagaattggagaaggaggagcagctcattttaaaaagtctaaggtggaaaggaaaaggtctagctaaaagtgttctggattcaagcaagcctcaaacagattcattggatggacaagtgacaaatgacctgaagaaagctggcagccttagattttacaaaccaaaattcaaatatattttttgtgatatggatggtacgctgctcaacagtaaaagtcaagtttcagcaaggaatgcagaagctctaagggaagctaggtcaagaggagtaaacatagttattgccactggaaaggcacgtcctgctgtaatcgacgctcttagtatggtggacttatctggaaggactggtattgtttcagaatcatcacctggtgtattccttcaggggctgttggtttatggtttggaagggagacggatttataaaagaaatttggaccaagaagtatgtagagaggcactctcatattctatagagaacaagataccatttgtagcatttagtcaggatcattgttattcgatgtttgaccaccctttggtcgattctctccattacatataccatgaacctaaggctaaaatagtgccatctattggtcagcttttagaaacagctgagatacagaaagtattgttccttgaaactcctgagaggatttcgtctgcactgagaccgtactgggcaaaggcgatagagggaagggcccatgttgttcaggcacagcctgatatgcttgaacttgtaccacctgcaacttcgaaaggcaatggtgtgaaggttctgttgaaccacctttccattagtccagatgaggtagaattaatctagtctccaactaatatatttgcattacactaataaaaacttgctaaccttagctgaggtagaacattgaagtagctgcagaaaaggttcagtaaaattaagataccaaaacattattctagaccaacaacatcagtgttacctctaaactctgtgacaaatgtgcaggataagaaatatggtggttcctaatttctgcaatccatattatttaccttttcttccaacatttctgaccatggaagtttgcattcaactcctggttattcaagtggttgttcatggtaaaagtttaagcatggagatgccagcgaagcagctgttatgatgcttctgatgttaatagtgtgtgcgtgtcatgctaattgatcttgaggaattataagtgtgtttggtttgaggaaagggaaaaacgaatgaatcttcctaatctatagctctgaacctagtctacatgtttggtctgaggatgcacccatgcagttggtcctggtcccatcactaactcatttgtcataggtatatgttagtaaaaaaggaatgatattatgatgatattatcctaccaaaactttggatgagttggttacttaaatggaacttatggctatatc

SEQ ID NO: 31381 - DNA, 4148 bp, Zea Mays
gtctgtgtctgtgtggggtcatttagcctttcttttcttgaaataaatattgttttagcctttcaaagggtgttcagcttgcgatcttcgcttggggcattgacctcacccaagtcttcgtcttccttctttggcagctgccagtttcatacaccactatttttatccagatccatccttggatttctcttcattccagatacatcttctctaaagcctaaaccccttgctctcttttcttccgatgtatagttggagagggcagtttcacctgcgaggctgaggtgagcaaccattgttggagagcaagcagccacatggccagcaccgctgccactccggaagcaggcagcaatcacagtgaagacggcaccacagtggagcttcccatcgtcgtcaccggcagcaccagccaagaatccattgatactccatccaccaggtacttgttagcccctagccatgtatccagctccagcttcaccgcagacattgagctcctgtggagactgcggaagtacctgctgcttcttggcatcttagctgttggtgttacatacaatgctggattgaccccacctggagggttctggtcgaagaacacacaagggcaatctggacatgaagcgggtgaccctgtcctccgggctctcttcttcccacggcacgagcctgatgggggcctatgctgctggaagctgcagggcagtgaagtcctccatctacatctgggttctggtgctctctgttttcacatatattatgatccacatcctagtgttcatgaaagttgttccaagatttgtgtccgagaaaagatttgttccaaaacggctgaaagatgtggcgcggtctgtggagcgctggatcctatcccggtgtggtgttcacaggagtgaaaagaacagctctcacgagaaagatctagaggaagctcgcaagttcactctggtgcttgtgactttcgctgcaactgtggcataccaagcagggttgagtccaccgggtggtttttgggctgaaaatgatgagaacaaaactccagctacatctatgcttcgctctggaaaccttcctcgatataatacttttgttgtttgcaactcgacttccttcgttgcgtctttggtcacaatcatactgcttctaagcccagaactgagtcggcatggcatcagatccagagcggtgaccgtgtgtgttgttgtcgacatattgggccttgttggagcatatgctgcaggaagctgtaggagtgtggtcacatctgtctctgctgttttagtggctgttctagtatggatctgctttgcagttttagctgggatctttgttaacagatctgtagcagagtggtttgggaagaagatcaagccagatattatgaggtgcatcgacagatttggccgggtcttttcgtcgaaccatggcagaaagagatcaagaaatccggagggagagaattctattgcaagtcatcagcaaactgaagagagcataaaaggtgaagcagaagcagaaactgctagagtgccagaataccagcttccataccatcagctagctccagatattgaagagggtgaatgccctggggagcagcagagtccaggcaaacaacaacctacaaacattgaggttgtgtccatctcagagcatgcatctgtaaatgagaagcaagcagaaaatagcagcagtgtcatgtgcaagctgggaagtcagtctacagacccaaattcagctgcaaacgaggctatgactgaaactgaaacagaaaacatacaagatgcaaatatggaggaacaacaatcttccttggtggatggtcttaaaactcccactactgtggctgatcaagaatccacaaccgtggagtgcttgtccgacattgcacccaataaccataatggagccaccaacagtttcaaggaagagaaagaagcttcggagcagcatttgcaagccaatgagattgagagtttcagaaccaataatgtggccagacctgttgaaaatggcaacgttggcatgtatgaagtaactcccagacaagacgacggtgatgtaaatgctggtgccaatccaactgatgaacatctgaagaagtcccggacatacctccttcttctagccattcttgcagtatccctggcgtatcaatcaggtttaaatccaccaggtggtttctggacacaaagaggtaccaacaattcacctaagagcacccatcatcgtccctatcatttaccgggtgatcccatccttgaggatactcgccatcgacgctatattgcattcttctatttaaacgccatcgcctttgtggcatcccttgtcatgatcatcatgctcctgaaccggaggatgagctacaagggcataaaacgatatgcgctgcagatggctatgatagttgatcttcttgctctaacagggtcttacattatggggagtagtagggggacgaagagctccatatacatatggctgttggtatgccttgtgctggtttatgttgctgttcatgttctgatagcaacacatgtaatccctgaagggtgcaagaaggtcgtggcacagaagattgagaatttctcctgcagatacatatggacaaaggcttcgtttcggaaccggggaattgatggtaatggtagtgattgtgaggctgggcaaagccagaggagtgatgccgatgacaagacctgggagcggaggcgcaatctactgttgatgcttgctgttctagctgcaacagtcacgtaccaagctggcatcaaccctccaggaggtgtatggtctgatgatagctcagccagtggtaaaccaggagacccaatccttcagcacaacaattccaagcgctatgatgttttctactactcaaactcactctcattcgtggcatctgtagttatcacaatactgcttgtgaacaaggaatcctgcgagcatggtatcaagtcctatgcgctaagagtgtgtttggtggtgggcttggtgagcctcttgattgcctactctgcaggaagctctaggaaagcaagagaatctatctatctcatcgtcattgctgttgcagttctgattgctcttgtgattcaagtgcttcttctctcctgtacgcaagacagtctcagaggaccaactggacagtttatagaacgtctgctccagctgctttttgggacggacaaggcctggcatggagacacttctaaacagaaagaaagctcaggtcgtcccgagaaaaaagttcggaagaggcacaagtatttgatgctgcttgcagttttagctgcctccatcacgtatcaagctggtctcaacccacccggtggtttctggtccgacgacaatgaaggccatgtggaaggcaatcctggcctgaaaccacctggtgccttgtggtctgataacaaaggtcatttggcaggcaatcctgttctccttgatattaatcctcggcgctacgaaatattcttctgcttcaactctatctcgttcatggcatctattgtcgtagtcatgttcctgttgaacaaatctgcccggaagaaggccgtgccacttgaagtactgcacttgatcatgatactggacctgctggccctcatgactgcttttgctgctggaagctgcagaaaattcaggacttcagtctatgtgtatggtctagtgctcggtgtcgtggtataccttgtgatcgcagttcttttgtcaagtggcattgcaaaatgtctgagacccatggatagaaatagggtttcctctcagagaagtcctattcgcgctcctacagcaagcacaaggatacttggagaccatgcttgatggttccattcctttggtaatagtactagtttaatagtagtgtatgtatttggcttttcagtgtacgttatgttgtgggagtttgaattgaactgaaattcgacgctttatgttgttcatttcttttagaatgtaaaatcagtgcaatcatgaatctacatgtgtatgacgaaggttccaatgtatgcgatggaatgaaaggaaaattggtgccatagtttgtctaaggttagttgtctaaattgaaaaactaactttagccaaaaaagttaggtaaattatagcaagttaggcaacaaatcaaacaacatatc

SEQ ID NO: 31382 - DNA, 1440 bp, Zea Mays
agttccgcggttttgagtaaacaagcgagcgaaaaaataagaagagagagaaaaagaaaaaggagaggcccgcgactgtagtgggattgtgggaagatgcctcgggatggcgcgcaggcggcgccgccaccggagcgcggcgagatggacgaggtggtagaggcggacccggatacggaggcggaggatcaggaggagaggtgggcgaggctgctgccggagctgctctccgacgtggtgcggcgcgtcgaggcgtccggcggcgagcggtggccggcgcggaaggacgtcgtctcctgcgcctgcgtgtgccgccggtggcgggaggccgccgtctccgtcgtgcgtccgccggcggagtccggcaagatcaccttcccctcctcgctcaagcaggtcgattgcatggcttcccttatatggcgtcatcagcggttttgatacgtaccggccattcagatatttaggatatagtttgagaagtttcctggccaattcagtgtcgtagtgttttttatttgacatctgtgtacctaaatcttacaccatttctcaaaacacagccagggccaagggagagaccaatgcagtgctttatcaagaggaataagaacaactctacattctacctctaccttggcttcacaagttcacctgtggataaagggaagtttctcatggctgctagaagatttaggcgtggtccccataccgagtacattatatctcttgatgcagaagacttatcacaagggagcaatgcatacatggggaaactgaggtttcatacaaatacaacttgctcaaatccagaggccccaggagaatgtattgcactctcgaatgcccttcagcccaagagacttgggaaaactcactcaagacaaagttcaggcgccccctgggccccacaactttacgaaataaagcaccccgctggcatgagcacctgcaatgctggtgcttaaacttccatgggcgggtaacagttgcatcagtcaagaatttccagcttgtggctgctgccgaccccagtgagcctactaccaacgtggatgatgaaacggttctgctgcagtttggtaaggtcgatagcgatatgttcacaatggattaccggcaaccactctccgcgtttcaagcatttgccatcagcctcagcagctttgggaccaagctagcctgtgaatagcgatgcagtttgatgctcttcgtgtggctatatggtttgtgttggtggttgcttgcttgtttcttgttgttacgatgtgatccgttcttcgttttagttgagtatttatgtactatttgtaccacaagagatgtaataaactattgtattgtcaaacggatttgttcaaggaaattatgtgtaatgaacttttgctctagttccatgcaaaagacaaaaaaaaatgctaagcaacagtaagaaaaata

SEQ ID NO: 31383 - DNA, 325 bp, Zea Mays
caaaattacccttcccacaaactgctatagaaaatcggcatcctctcccttagtctcataaacgaggaaaccacagtgtataaacataatgcatgataaggataaacatacataacattattaactcagctagcaaagaaacgatcaccataatgaccagaacagattaaaccacttgcacacattatttaaaagagaccaacatcattgacccgaagtccctaattaatgtcattactaagcagtggcaaagttatttaaaagtgtaggtgaacgtgctgctacttccctcctttcccaaacaagattcaagttcctgcatcaa

SEQ ID NO: 31384 - DNA, 4232 bp, Zea Mays
attcctcccacattccaccgcacccacacgtttctttaccctaaccccgacagccgccgccgtttcttcatcttcctcgcagcgccggcgctccatcttccgctccctccccgactcgcgatcggcacgcaggcgacgtcggggcagtctcggactcggcggcggcgtcagcggctccccctcccgccctcgccagtcgcttccggtcctccgcacaccaaccggcgactctgcgtgcgcgcctcctgcttccggtggaccgtcgacggcgcccgggccccggtggccggcgggcagcgagagccagcagcctggcagttttcctcattggaaaggaaggacaatcagagccaagagtttcttcataaacctgaataaaaggacatgcgattacggaatacagacagggcaccgcgtagctcaggtcgtcgcaataatgttctttcatggatctctgaagttaaagacacatctaatgtgggcgtaagaaagaaaagggggagaagagcacctccatctgctaaaagattgcgtgataaaagggtggataaggcgattgaaagtgatggtgctgttgacagtgacagcgatgatacagatggacaggttgacaagaatcagcctagtgcacacattgaggaacatgttgatgggagaactggtgatgacttagcaacagcaggccactcaggcaattcttccaatggtccatcctcagcttcagaagaacaggaccattcaacaaactctaaagacaagctccaaaaagctagctctcaaaacacaaagaaggtttttggaaactcaacaaacggcaagcaaggtgcatctaatttggaacaggaatgtgcaaatgaagatgggtctcatgtgctagttgctgctgtgtacaaggatattgataatgaaagaagctctcaaaagattagggatgatcaggtatcagatgcacaactggatacagcttcatctgatgacaaaagttcagaagaagtcgaagacgtgaaggtttgtgacatttgtggagatgttggtgaggaggagaagctcgctgtctgtagcagatgcaatgacggcgcagagcacacgtattgcatgcgggtaatgatggaagaggttccagatagtgagtggttgtgtgaagactgccaaactgctgtagaatctgaaaatgagaatagactacaaaagtctcaggtgaaggctggcacttcaaaagagctttccttagaaggggagattaacaaacctgccattgctgcaaagggaagaagttcatctgactgtgaattgaaggctgggaatatagaaaacaaagagtcaaataccacaaatgagaggaatggcacagtcaaaaccaggacggaagaagatgctgtgacgacatcctcaactagagatattttttctgaaactggtggcttgtacatgggggctgactctagaaagagaatggaaccatcacacgagacattcgtgtctgatgctgacaaaggaaagcaacctagccatcaagtatcaacttcattggtggttaatgctctgaagaatcaggcaccacagtctcgtggtcaactttccaaatccacttctttcaataactcaaaggtccccaaagtgaaacagctattgaatgaagttcctcagaagccaaaatttttgaaggaatcttggtcctctattatcaataaaaaggaaggaccaatcagcatgactactaagtcagcgaccttcaaaaagcctaagccttgtgagccaacaaacaaggcaaagtcttccgtcttgtcacctgtcgaggagccaagggtgccgaatcagttggcgagccacaatgtaacaaatggaaacagtgagctaaagaagcctcgtttagcaaaagtgccgggaagtatgatgctatctaatgctgaaagatccgcaggtgggattcttggttccggtgctcatcgagaagtgattcaaaattcagacccttcacatagggatgctaaaataaaggaccaaactggcttcagacagggtgcttctagcagcaatcggacaatccgttgccaaagatgtaatgaatatggccattctacacatttttgcgaagttgaaaaacttcgtttgtcttcaggaaaacctttgagtgagcgaaacttgaaggatgcatctgccaaaagaaataagacatccgaagttagtacattggcttctagtgaaaaaactccttccagagaaccagagcatgtcgtaaagtgtgctattaatcagaatctgataaatgggcctaatgatggtatacctgccccattcagccatgtaaagaagcactcattatcacctcgagctaatgtgtccatccctgggagcggagtagattgtagcaagcctaagttcaaaaataatgatccatctctatctggcacagcaggaatctttgttcataatggtcgcattatgccaaatgatcatagggatgaacctgctcaagggttttcagctggtgatgaaccaacgtcttcaactgtccctgagctgggctggatatggcaaggtggttttgagctgcagaggactggaagttcaccggagctgtgtgatggtttccaagcccatttatcatgttctgcttcacagttagtgctggacgcagttaagaaattcccttctaaagtccagcttgaggaagttcctcggaagaattcatggccaacacagtttcagaaaaacggtccaacttatgacaacataggtctttttttctttgctagagatgttcaaagctatgaaaatcactacagtaaattagttgagaatatgctgaagaatgatttagttctcagaggaagtgttggtactgttgagttgcttatattcccttccaatatcctatcaaagaacttccaaaggtggaatatgttgtactttctatggggtctattcagagttagcaaaaaagattcctctaacctcccatcttatctatccacaagtagagtagaacgaaattttaatgatgatctccaggccatggattggatgccatctacccattcattctcacagaacaggagtgatttagctgaaccggaccctgatttgttaaagtcaactaattttgaaccgagtttggaagccagtcgtgaggtgtgtttggatggagagaactctttgaatcaacttgtacgcagaagagctctagatgatcacctagattcagatgcaaaagcatgttcaacgattagcaatggtgccatgggttcctctgccatgtctatgcaaagaaaacatcagaaacctgattatccagaacatcaagataaaaagagggacacttttggtggtaatgttagtgaaagagatttcgatgtgaacacggtgccagttacttgttctgtctccttaactcaccttcaggaagaacctggtaagctgagcacagccatcgacctcatggatatagaccatggggttagcgcaggtgcactggatcgttcacatgcatcaggtggtgcaggtaaaagaagttttgagacggccgaagtagctgctgaagtacccgagcataagaaaactaagctggataataatgttgtgcctataagctctggtccacgcgagaatgcctgtacgaatgatggcaatagcgataaactgatgcctggaagctcaagcagtgatggcaagcgcgtgtttccacttgatctaaatgcagtgggggatgaggacatcgtaaatattccagccttcaggtgatgaagagttcgctgttccatgacaaaccaaccgtggtggtttggttcagaatgagagatgtgcattgtaaatcgcatgtgcagtttttgacctaatgttttcagacaacacttacagatgtgatgttcccctctttggcagtgaataattctgctccagaatatgcttacagatgtgatctcatctgccagattccttgtgatgtcatgctaatatcgtacaccacctggcttcgcttggcaggatacacgtccatcaagttactaattaggatgcgtgtatgcacgtggagacaccgttcaaacggacgtgtaaaacactgttttctactctgtaggtgacaatttatagatagccttaccatcttcagggatttgcccaaatggccgacgccgcgagaggtttgatctgcgacaatagacatgcttaattttcgtttttgttcattgtatcaagaagcacgaacaagacttatatcccatgaaagagaa

SEQ ID NO: 31385 - DNA, 1226 bp, Zea Mays
ctagctggtggctatggagacattgtcaagtgtcctaacactactagagagatttctaaagagatgaacgaagctttgaataacgggaagcgggctaggccgttgtacctagatgacgatgtattggaagatgaagcaggacaagatgatgatgtccaagttatgggaagcaggtcaatgtcagcatcatccaaggcttcctcatgtaccgtgccaagtcctggaacaactgccaaaagaaacaaagcaattttccaattgaagccccacccaattgcagctccaaagaagttgttgaacttgatctgtttctttttatactatttgttgagcaaaatgccgacgaagccatctgactgcatcccattttcgaattcaacaatgggaagagaactatgcatcgcaagtgttaggacaggagagatcacaaagttgattttggccacaacccacctcgagagcccatgccctgcacctcccaagtgggatcagatgtatagcaaagaacgtgtggctcaggcaaagcaatccctggaaattctgggaggcttccccaatgccatactctgtggggacatgaactgggacgacaagggagacggccctttccctctgcaggatgggtggactgatgcttgggttgagctgaaacctggagaggatggctggacctacgacaccaaggccaatggcatgctgtcaggcaaccgcaagctgcagaagcgattggaccggtttgtgtgcaagctagcagacttcaagatggacagcattgagatgatcgggaaggaggcaatacctggtgtctcctacttcaaggagaagaagattcggaaagagaaccaaaggattgaactgcctgtctttccaagtgaccactttgggcttgttttgaccatcacccagcaaaaggatgacaacgtctgaacaaccgttacactgtccacattttagtgattgcaggacatttcatgttcttttgcgatttaggaatatagagcggttccactgtccacattttagtgattgcctctggattttgtaaatttggtggaggcatcagtttgctaggacgtgcaaatggtggtattattaccagatggctacttgttgatacctgatgcttagtttcttatcaaactttgggttggctaaaaaacatgccctctcgatgtcttactattatggccacacggaaagccagtaaaaacacctctcattaagtc

SEQ ID NO: 31386 - DNA, 1998 bp, Zea Mays
tgtttgatcgatcgattgcaatttgcaaagcacggcgagcggaggccagatcaaaaagtagcacggcgcagcgagccagcgatataccacatgacacatgtccacacccctctgcgttcggtcaccaaacagtcagcgcagggcagggcagcctgaaagaaagcggcggcggcagcaggtcactggctcactgctctgtcctctcgtctccagagttcagaccaccgcatcgccatggcgccgccgcagacgatcccccggcgcggcctcttcattggcggggcctggagggagccgtgcctcgggcgccgcctgcccgtcgtcaacccggccaccgaggccaccatcgattaaagacaggaaatctgagctggctttgctggagacacttgattctggaaagcctctggatgaagcaagtggagacatggacgatgtcgctgcatgctttgagtactatgctgatctggcagaagctttagatgggaagcaacagtcaccgatctctctgcctatggaaaactttaagtcgtatgtacttaaagaacccattggggttgttggactgatcactccttggaattatcctctgttgatggcaacttggaaggtcgcacctgccttggctgctgggtgtacaactatattaaaaccttcagagttggcttctgtgagctgcttagagcttggtgcaatatgtatggaaataggcctaccaccaggtgtcttgaacataattactggtctgggccctgaagctggtgctccattatcctcacattcccatgtggataaggttgcttttactggaagtacagagactggtaagaggataatgatttcagctgcccaaatggttaagcctgtttcattagagcttggtgggaaaagtcctcttattgtctttgatgacattggtgacattgacaaagctgttgaatggaccatgtttgggatcttcgcgaatgctggtcaagtctgcagtgctacttctcgtttactgctgcatgagaaaattgcaaagaaattcttggatagattggttgcatgggcaaagaatataaaagtctcagatccactggaggaaggctgcagactgggttcagttatcagtgaaggacagtacgagaagataaagaaattcatctcgactgcaagaagtgaaggtgccacaattctgtatggaggtggccgaccacagcatctcagaagagggttctttcttgaacctacaattataacagatgttagtacgtcaatgcaaatttggcaagaggaagtctttggaccagttatctgtgttaaggagtttaggacagagagtgaagctgtggaacttgcaaatgatactcactatggtttagctggtgccgtgatctccaatgatcaggagaggtgcgagcgcatttcaaaggctcttcactctggtattatttggataaattgctcgcaaccatgcttcgtccaagctccttggggagggaacaagcggagcggttttggtcgggagctcggagaatggggtcttgataactacctgacagttaagcaagtcaccaagtattgctcggatgaaccgtggggatggtaccagcctccatctaagctgtgaaggggcattcactccagggaatgtaatgcatcattaactgacagcatcagtcctgttaatggacaggagctcgtgtacagtacagtgctcgtaaaaaaagctctttgatggtaaagttgcttgctgctatcactactccagaccagaattcaggactggagagtacgatgtcatgagttgtactacttgttagtctgcactcttatcattcgaagtttggcagtggtgtgtagttgcacttggaagattgcaataataataaagataattggataattgatccattttaatcatatttcttaaaaaaagctgaataagctctggagtttcttcttctttttgattaaaaaaaacaattttggaagcctttctaaaacgaaactttg

SEQ ID NO: 31387 - DNA, 1253 bp, Zea Mays
aattttccggtaacaccatggaccatggtgcgcggggtagttgcagctgttaggagcaccgagcacaataatttgtctgttcttcggcctccatccccgcaggatagagaaagagggagctctagacggggaggctcccaaatcgatattttttcgcatctgttcgttctccgacgcggcggcgaatctgagaacccctcgctgagtggtcggcggcgagtccgtgatggtcggcggccggcgggcgcggacatgcacaaccgctcctcctcctccgccgccgctgcgtcgtcgttgccgctctcccccgccgacggcttcctgcgcgggtaagctcgtagagaagacgcgtgaggtgacattgcacactgaagacatggaggattctatttgcgctgtgagatccatggctgattttggacttccacttgctgatgacatgatcaaggacataaatagatcactgcaaataatgtcaaagacccagccaaagagagggttgatccaaaaccccagttgggggttccagtcaaggaaaagctcaggaacttgggacgaactgggctctaccaatggaagtagcagcaggaactacctctcttcaatgttcaacacggcgaagcaaaaggcatcgggtctcaggtggccgcagcctaattttgcaacaaaagatgatactagcgagaactcggcgtcgtcttctgccctggaatcgccacaagctggtgggcaaggtgcatctacaccagatacagagaaggatgagctccccatttcaagtcggttgtcagagggtacggccgcaaaccgtagcctgcctgctaccggcgtctcggaaacagtggaggcttacaacaagttcaaagaagagcaggagctgaagcttcgtgagtggctaagagactctgaagaagccgtcaatgataaagactgagtgtgctaaagctgcttcggccctgtgcctctgttattagatatatggtacattctgaactaaaaagaaacatagcactctgttaatgaaacagaggttgattggtatagatgcacaagatgccgaaagactgtagtttgtgatgaaggggttggtccggacgattgtaacgtgacttatttatagatgccattgcatagtgtttgtctcaagcctcatgtgtaattgaatcacgatagataatagataaaagatgttgtctgtttctgttcttgtgatccaagtatacagctcccagcatataagcattggaaagttt

SEQ ID NO: 31388 - DNA, 151 bp, Zea Mays
tgtcatgggccgattggtcatttcatctttaagtcggtgcatctggagatacgctacgaagctccctgattggtagcttcggcattgtgtttttggccttccgaaggtgtttcttctcacaggaccttcggcgacaaagcatactcccaac

SEQ ID NO: 31389 - DNA, 171 bp, Zea Mays
aggtggttcaagaagagccacacaacgaggagtttgacttaatctaggtggcgtctcccagttgacttattggcgccaaggatggattttagtttgttttatatttatctttcattttgtaagacttctgctatataataagtactctgatgttattgtgacatttatctc

SEQ ID NO: 31390 - DNA, 2803 bp, Zea Mays
agggaattctaggatatgccagcccaaaagagacttatgagaaaggaaagtttattgtcaaaaattcaccaccccgaggatagatgcaggaagggtgtaaagcctatctcttggatgattcagctgcttcactgttgatgaggtgtcatacatgcagtaaaggtgtgctggactttttccctgagcttccaccttgcgtggtaaacatgcaggcgctcgtcacctccaccgaccccgacgcgccgcttggctcgggcgccgacagcatccccacccatgtcggcgaaggggccctcgagccaggccatggcgatgtggccgtaggcggtctcgttgagttgggcgcagtcccagttccggtggaggccacaacccgacgccgaaccccgacgctcagcttcgctgggaactactcgcaacacgccctcaccatctggaggccctccttcatgcagcagatccgcttcgacgcccacaccccgctccgggaggcctgggagatcgacgcgcacatgcagtccgcggtcaggggcccgggcgccttcaatgtctacggccgagcaggcgagcaccctgctccctggacggatccaccaggacctctcgatcgagctccagcagtaggcaccttccagatcgagctccagcagcaggcgcaggtgcgcagcgatcaatcagcgagcaggacgagcggcaggggagaagcactcgagtcgagagcagatcaggatgtttgtgaagatcgaccgcacgacgcccagacttccgctgtcgaggaggccatggccgcgggcgcgggagaccccgggcagctcgaccaactcttgctgctcgacccctacgccgaggacgacatcaccaactactgcgtcgagttccataatgctgtcgtcactaccatctactcctccatcatcatcaagccggagacgggcagcagtagcagctcttccttcgcgtgttcgaccaattgtcccagccaggcactgcacaacattggtaagcccagtctggtagccgtggtgactattgcaggcacaccttcatctactttgattgatgctcaagtggtgctcggtgaaatgcaaccaagggaacatagcactttgatgacagccaccattgagttgcgcttcattttatggtattttttcattctggacctggttgctttacaacaaagtccaccatggccacaacccgttaaatcactggtagtagtcggatacatcctgccaaagcctccttggttagcatttgatcgaggcaatttgttcagaattcattacacctgcagtactagaagtgcttccttacagtatacattgcaattgtcacctgatgctgggaatattcagaatcaatgtttggatttgtgtttagtaaatttaatcactgggtcagcactgaacgtcagggttcagcagctgcttgtttctgttggctcccctagcaatgctcttgtgctcaagattccaattcagggtgttgtggatgcacttcataggaaaacactccagggcacaggtctgaatgaagagcaaatgagacaggctagcgtcgcagacaatggtcatcgtcagctaaacaagatacttgttgacttggatcaagataacattactgctaagaattatgcaattgcattttacacagagaagcacattcagattccatgcttgggcggtgaacacgaagttactttcttccatgagtatagagattcagttgaacgggtgtttgttgatcatccctcgtatcacagacctggaaatttatatggagctaaagttgttcttcttgggttccaacattatgcggtcatgcttggtacaactgtgatcataccaactgcacttgttccacaaatgggaggaaaatatgaggacaaagttgtggttatccagacattgatgttcgttgtaggtatgaacaccctacgtcagagtttcttgggtaccaggttgcctgcagtgactggcgggtcatacacttttgttctgtataccatttctatcatccttggtggacgttctgctaatgaacctagttcacacattaaatttctgggcatcatgcgtgggacacatggtgcgttgattgtggcttcagctttacagattatagttgccttcagtggcctttggtgtaatgttgccaggtatctgagttcactttcagctactcctttggtggcactagttgtatttggactgtatgagttagaaattccaagagcagggaaaataaaggctttgtccgttgatgcagtaatagtgtttggatcacaaaggattcctcaggtcattcattcagttatgtggatcatgttcatcctttttagagtcatctggtgcttgcaattttcctgggatcctggtggaagtaattggtggaagtaatgttacacatcggcttgagggcaagccgcattttaagaaagggggaatgttagggactgccggcccaatagcccatggtgcagcccaactatctgatgtcttgtgctacaaaggagcaaggaaacatagcagcagggaattattcagagaacagactcttggttattatgcttcttcttccttagcgtcttcctcttgtacccagatccacatttcctgtgcttctagattcttctagtgtctttctctagtatctgatcacctgcttgctgtctatcctatattctgtctcaaatcatagtttgtgttggagtgaattgagtgtgagttcgtcctcgagattgagtgctgttaacaaaatagcccccgcccgacctccattaagccaactcttgttatgc

SEQ ID NO: 31391 - DNA, 1611 bp, Zea Mays
ctaactgtagccgcttcttctgcactacgaaggaaaaatgctatggaacttgagaaaaaagaacagaaggagaaggagctacgtgcccaaataattgctgaagcagaagaattcaagaaagctttttttgagaagaggatacagaactgtgcgtcgaatatggtcaacaacagagaaagggagaagatttttgtagccagccaggagaaattccatgccaacgcagacaagcagtactggaaatcgatctcggatctcatcccgcatgaaatagccaccattgagaagcggggaaagaaagacaaggacaagaagccatccgtcacagttattcagggccccaagcctggcaagcccaccgacctctcccggatgcgccatatcttagtgaagctgaagcacgctccaccgccacatatgttgcaacctccaccagcacctgctgctaaagagggcgcaaaggatggctccaaagaaggtggaaaggatggtggtgccaaagacggcgcggcagccccagcaaacgacgccaagcagcctgcagagagccaagaaaccagcaccgccaatggcccctcggaggccgagaaagagcagcctgcggcgtcggagtgaccggaaaggaaagcgtagcattacagaaacacaagaggcttgactgtcagtagatggaaacgtgtttttgtttctgatgatttcgcagacccgtttatcccgtactgatcttttgcagagatctgcatcaggatgtcttcgtatgagcacagaacattcataatttagtatcaccacagtagtcgtatctttgctgttttcacccctgtccagttgtgtcgtcactgagatgcctgtgatctcatacaagttgaggtctgaaactgttacgatgatatggtactgccctaataataatctgaagctgtgcaacaaacagcaatcttgcattgctctgggtctggcatggattcactaatctatatgtacaagatctagctgccgcatttgcaggaggaaaacacacttggcactacatcatatagtcgccgccggttgacaaaacgcaaggaaggaattagtcaaaattacatggcggttgcttcacctggggctcatctcggtcaccgtgggtggcaccaccgtgctgaacatgttggagtcctcctgggacgccaggttcttgaacctggagtcggtggaagtggtggccttggacaaggggctccgcctgctgtactcctggaggtaccccggcgccgtcagctcgctctcgttgatccggacgggcttggacagcatggtgacgacctggggcatcgtcggccggcgcgcggcggccgcctgtaggcagaagagggccaccatgatgtacctgatggcttcttcgtcagggcagtctacaagggctggatccaccagttccttgagcctcttcgcttcgtacagctcccatgccttctctaggagaatcttgtcatccatgagtatgctcctggagctactagtgccgctcactatctccaggacaaggacaccaaagctgtagatgtccgctttcttggtgagctggccatgccaggcgtactcaggcgcaaggtagcctctgcgaggaac

SEQ ID NO: 31392 - DNA, 1277 bp, Zea Mays
acgcgctcgtcccgtctccttccctcccttggtcagcctcagccaccgaccgttgcaccagctcgcatggcgctccacgccgtctcccccgcggcggtctcctccccgctacgcgccctctcgcgcagcctcccccagcgctcaggctgtggttgtttaccaaagcagtccgtcacgatttgctcctctacgaactttgcgagaaaacttcaggatggaccagtggactttgctgctaggcgactggttcttggacactcggacaagagttctgacgcatgccactattgaagaaattgaagcggagaaatccctcatcgaagaccaagctaaagaaaagatggagaaggcgatcgaaacagtccaaactaacttcaacactgtgaggacagggcgtgcaagcccggccatgcttgaccggatcgaggtcgagtactacggaactccagtgaacttgaagagcattgcacagataagcactccagatgcaacttctcttcttattcaaccatatgacaagtcaagcctcaagcttatcgagaaaactatagttgccgcaaatcttggtgtgacaccaagcaatgacggagaagtgatacgagtgactgtcccaccattgacatctgatcgcagaaaggaattagcaaagacagtagctaaattggctgaagatggcaaggttgctataaggaacataagaagagatgcaatcaaagcttacgataaactacagaaggaaaagaagctttctgaagacaatgtgaaagatttgtcagctgacctacaaaaagtcacggacgagtacatgaaaaatatcgattccatccagaagcagaaggaacaggaactgatgaaaatctagatcttcaacaagctgagctgactgtgtatgactgcttggcgccgcgccgccggggactgcgcacgttttgaggtcaggtcaggtgctttgctgcaaccttctggatgcacacatgctgaggcaatgctgttgtgggtcgtttctctttttttttttcgtatttcttttgtaatgctcgtaaataggctctcgctcgtcgccgtgttgtctgactgttgttacgttgtcaatacttgtcgccatctgaatcgaatgtctgaaatgttcctgcccgactctcgtacgcttgtttgtcagaactcagaactctgctgaggttgtcaaagctatttcgcaccagctagcttagctccacgtgctgggctcaagctcaagcagagagtacgtgggctttgatgggcctctcctttggttc

SEQ ID NO: 31393 - DNA, 1551 bp, Zea Mays
ccaattcgctggaggagaggaggaaccgtacgcgcctcattacgcccatccacgtgctcgcctctccccatcggcccatcgcataattttcctcggcggcgtcgccatctcaccggcggcgggcctgcggccggcaaccggaggcgatggcgagctcgtctgtggcggcggacatggagctggaccgccccaacctggaggactacctcccgcccgactcgctcccgcaggaggcgcccaggaatctccatctgcgcgatctgcttgacatctcgccggtgctaaccgaggcagcgggtgccatagtcgatgattcattcacgcgctgctttaagtcgaattctccagaaccatggaactggaacatatatttgttccctttatggtgcttcggtgtagtaattcgatatggattactcttcccactgaggtccttaacgcttgcaataggatggttagcattttttgctgcctttttccccgtgcatttcctattgaaaggtcaagacaagttgagaaataaaattgagaggaagttggttgaaatgatgtgcagtgtttttgttgcttcatggactggagtgatcaagtaccatggaccacgcccaagcacacgacctcatcaggatttattcagaagactatcttggaaagtgtgggttgcatctggtttaaccgtaatgatctccgggatcgtgaagttacggcacggaagttgcgtgatcatgttcaacatccagacaaaaaccctctcttgattttcccagaaggaacttgtgttaacaaccagtatacggtcatgttcaagaagggtgcctttgagcttgggtgtgctgtctgtccaatagctatcaaatacaataaaatatttgttgatgccttttggaacagtaagaagcaatcttttacgatgcacttggtccggttgatgacatcatgggctgttgtgtgtgatgtttggtacttggagcctcaatatctgagggagggagagactgcaattgcgtttgctgagagagtaagggacatgatagcagctagagctggtcttaagaaggtcccgtgggatggctatctgaaacacaaccgccctagtcccaaacacaccgaagagaagcaacgcatattcgccgaatctgtcttgaggagactagaggagaaatgaagagacatcaaacactacaagcgcatttggttagtggtttaccgttcagctaccttgtaattcggttggctccccgaaaaaaaaaagtccgggacacgtcaagtgcccagctcagttttgttgtaaatttattagaaatttgacagaattggtagtgtgaacttaccaagaaaggaagaatagccgcatgtgttgtggctgttcattctatgattggttaggaattgacacttgaaacacggtactctattcagaggctgtgtccgtatttatgaatcgacgatgtaatggttttaattcatgtgattattgattcaataatatgagtagattacatcctctgtaccttcttgagatttaaaacattggatttgaagaggttgcca

SEQ ID NO: 31394 - DNA, 3448 bp, Zea Mays
cgggccagcagcgagcgagcagtcgagcacgcggggcgcaccacaaggccacaaagcgcgccgcgcggcggcacccgccacctacctggtcgcccaacctactgcctatacgaggggagggggatagggagtagcagtagccagtaggcagcgtagcactgcggctcctactaccaagtaccaaccacacctccaacccccgccgtataccaatccgccggaggtctctattcagtccacttgcctttttccctcaccggtcactgcatcgagctatcggtttttgggaagtgcggtttcctcaatgtctatttgaatcacagcatactgaactgaatcaagtgataattgtgttctggtcatacactaagatatacctgaaacttctgcttcatatgttcacacatcataaatattccaacaaaggtcagatgaacagcgaaaggaatgtgaagatcatatcaggtcgtgatgggcaaaagaagggaaattcacagtatggccaaattgtacacatgccaaaggacatggtcacaacagtcaatggaaacgtagatgcaaaatttgaagatgaagttagagttgtgaagaatgataggttccaaaggcaacgagagtcttggggtggggaatgcaagaagggctcaaaaccatggcctggtcgaaaggcagctactgttgatgaacttgttaaacatatgtcaaatgttccttcatatttacagcgtaaagaaacttctgaccatcttcaagacaaggcactgaatgttggagttcttgagtgggggcttcttgctaactggtctcagcaagaaaagcataagctcactagaagctatggaccatctccacccaatactagcaggtctgtactattcccatctccatcacattcttctccaagccccagcagcagatctcttgagagtaatcaatctaccccaatgagtggccatcatcattcatccatcagagcacagcagaataggctcacagataaacaccatgagagggccagatgtccacctagcccaaattctgcagtactgagcttattgtcaggtcatggcacacatccctgtccagagaacggtcataattatgttgggttgggtctcagcaatgtttctttagcctcagactctctaggttcttcctctagaagttgtggaagacatgaaatggttggagatgaagagactagacggaagactgaagacgttgtccatcattgttctcgtaggctttttgcagacagcgataacattgggaaacatttcttcgcatcaaataccaatgactccatgtgtaatgatcctgaacagagtattggcttgaatggggaaaattttgagtcactaacgtctgatgctgtaatggacacagctagaaatgacagtaagtcgtctgactatttactggaggatattgagccatcccttgaatttcctcgaatcccatattcatgtccacttcccatcatagattcagcagccaaagagattggcatcactagcactgaggctggagatgcaaaagtgagtaaaaattctaaccggaaccaatctgccatgaatgtcactgagaatcctccccaatactcagcaaagtttagtgataagatgccttattgtcatctaggttctgggatgaatcgagggagctgcagctctagcctcaaggagtcaccacatattcgacaacccaatatagttcctcctgtcgataagacaggagacaggtcatcacccaacagcaaaggtaggcgaagcccattgaggaggatgttagatccaatattaaagccaagacattctagtccagtacgtccttcatttgttcctaagtgtcaacttccagtcaataccaccaagcagtctctggacttggggaaatcagtgccacataatgttcagcgaaggtcggttgatttggtagtcaattcgaattatctgatcgaagaaaatagaaatcagcctcctccccgtgtgctattgaacagtgcaagatacatacaaaaaggaaatgattcagcaacaacaaggcaagcacttctgcagctagcatggaagaacggcttgcctttattcatactctcttatggtgattctgacatcctggcagccactgttagaaggaagggcatccctgaaaaggatggtctggaaagcacatatgctgtattcactgttgaagaaccgaagaaaaaaagtggagcttggatcaagacagggggcaagaacaaaaaacatcaccttttatctagcatagttggggaaataaaggttgcgcgtcgaaaatcaagatgccaccatacaaccgatgttcatgtacacagggaatttgtgttggttggttccaaatttctaccatcgtctgaagaatcaggtgattcaaatgttagtggagagcttgcagcttttatcagcacacttcctcagcaagaagcagaaacctcgaagcaatcatcttcacagaataccaggcaaagaaattcaatgccaattggctgtggttgccccccactgggaaatttccatcctagcacgagaagtgctaattctgcttcagccaatgttgttgcagtacttcctgatggcttccatggcacaataacatctggacagccattgcctttgattgagaggtggaggtcaggaggagcttgtgactgtggcggatgggatgaaggttgtatgctaagcgtcctcactgatgcgtccgaagaaaatgatgccattcaggctaaccaggcaaaggatggcagccagagatttgagcttctagatcagggtcgatcacgagaagagaggcatgccttcagtatgacttccttcaaagaggggctttatacagtggaattcagatcatccattgcattacttcaggcttttgcaatgtgtatagtgatgctccatggaaggtacccaagaagaacgcaagttggctcgcaagcagagcaggagcatgatctccttgctggtcatgagctcaaggcaatggcagccagtcaaggaagaaggcctccgacaagctatgtgccccaccggccacctctttctcctgtaggccgagcctagcttatcacgatttagtgtatgttctttctgtgtctgtcctctttcttcagctgcgtagtgccggtgggattgatataccatggtccaatggtccatatgtaatacgcatgtccaaagtgacaatctctgcgcaagtctttagagatagctccctgtacatgctgtgatgttgttgatggtgtatgactgtaccagtaccgtgatgtggctgcaaggtccatctcagtgcttagttacccttttatatgtccgcttatctgttgcttctgtatatgctgaaatgcgcctgcaatctgttgcaacccttgtttaaattgtgcgttgcatcgcagcagcatttgtgcagctgctgaagttatgttttctgg

SEQ ID NO: 31395 - DNA, 1663 bp, Zea Mays
caattttctagggatttgatttttactattttcattgacgtacatttagccatttcgatggctaatgttagtactaccattttgatggctagtgctgtgccgtagcgcgatcgacctgtcgagttcattcaattccgggtttgctagttgagcaatctgcgtccgttggtgatgtggtgcaagtgtgtaacgtacgttacgtatctgcagaggcagcagagcagtcgcaccgtttcggaactgacggtgtgcgattcatttcttttacagtacttttccatattggagtggtgtattgttttggtcacgccactatcgcgcgtttcatatttttgttgttgcataaatgtcgtgcgctacccaccacagccaaccatctcatttaaagctgcgaaactgatacagctgttgaggataatgaagagccacagttggtaaatgtgtcttcctgctggttctgtatgcatctcgtggttagtttaccttgcataggacgacaccaagtgaatattactatgtgtagaattagtgagttacaaattgtcctgtttagaagcaacctagtttttaagaaaccagtttttattttttagttaacagagaccagcttcttagtttttaagaaactgagaatttaattcctttaaactgaggcataaacagtatgtttggaaccatcccaattcttataaaccagtttcttaaaaactgggtgtttccaaagtccaaacaggccctgagacacttggtccgtgtaagagaccatcctagattcatatgaaaccagtagcagcaacagtctattagttacaccggatgtggatgttctagtcccagtgaatttcttatcagctatggtgaagtgcaagtgtaaaatgatttgcttttttagacaccgtttaaagtttctcctcagtttgctttggatacttcgttttgaagttcctgtcatactatgtttggtcgttctcttgtgttctgtcagtttgtcatgcctgtgagattgtgcacggctgttcaagtacttaactctactaccatgcctggaaaagtaccctatcggaagtcgctttatgggagttgatgtttagaagaactacttagcatttctagtagagtaagggttgctgtaaggcttaggcctaggaatgcagaagagttggcggcagatgcagattttggtgattgtgttgaacttcagccagagctcaaaaggttaaggcttcgtaaaaataattgggagtcggaaacatacgaattcgatgaagtgcttacagacttctcttctcaaaagcgagtgtacgaagttgttgcgaaaccagttgtggagagtgttatggagggatataatggtacagttatggcatatggccagactggtactgggaaaacttttacactggaaagacttggtgaagaagacactgctgctaggggaatcatggttcgtgcaatggaggatattctagcagacataacacctgggactgattctgtctcagtatcatatcttcagttgtacatggagatgatacaagatctccttgatcctgtaaatgataatatagccattgtagaagacccaaggactggggatgtttcattgcctggagccacagtagttgaagttagagatcaaaaaagctttgtggatcttctaagg

SEQ ID NO: 31396 - DNA, 1863 bp, Zea Mays
cgaaaatgagctctctctggactgaactagtgagaatacttgagaaagagcgtataccagtctagcaccgaactaccaaaaccgaccgagccgcgaacttcacccctgccttctctcccttctccgtccaggccctggtgcccgagcgttctcgtgcggcaagtgggcgccgccgccggactacgccaggtgcccagttcctcgtcgggtccttcgtcgacgacgagcacccaccaaaaattcgagtattagactctacatgtcaagaaagtatggcgccaggaagcaaggcggagcggaaagcagcactagatgctggcgcatggatgttcaatgtcgtcacatctgttggtatcatcatggtcaacaaaggcttaatggcgactcatggctttagttttgctacaacactgactggacttcattttgcaatgacaaccttgatgacgttagtaatgaaatggctgggatatattcagccatcttatttaccattaccagaactagtaaagtttgccttttttgcaaacctgtcgatcgtcggaatgaacgttagtttgatgtggaactctgttggattctatcagatcgcgaagttgtgtatcattccagtcttatgcattctggaaatcatattcgacaaagttcgttactcaagagatacaaagctcagtatagtgcttgtcctcataggtgttgctgtgtgtactgtgactgatgttagcgtgaactctcaagggctattagctgcagtaatagctgtttggagcacagcactacaacaacatgctttctagaaattgccttccccagaccacaccttgtgtgggagctctcaacattagccaccaatgttttcagacggcctaatcgtttctgatcgccagaggatcaatcagcccgttcagatcgattaatcggacgatcagcccgattaatcacttctgagtccatgctaacaattctcagtttctcatcgccaagtggtcaagcccatcatgtagcaaacaacaagtatgttcaccatcttcaatggaagtactcgcttggctcattcaatctcttaggccatactgctccagcgcaggcagcatcattgttaatagtggggccttttgtggacttctggctgactaacaaaagagttgatgcttttaactacacatcaatagttacgttctttatcgtgttgtcgtgcataattgccgttgggacgaatctaagccaattcatatgcatcggaagattcacagccgtctcgttccaagtcctaggccacatgaagacagttctggtgttgaccttggggttccttttctttgggaaagaggggctcaacttccatgtcgcccttggcatgcttctggctgtgatcggcatgatctggtacgggaacgcgtcgtcgaaatctggaggcaaagagcggcaggtctaccccacaccgagcgagaagagtcagaagcatggggcgctgtcatcgcagtccgagctcgatcaaaaggtctaaacgagacacacaaaggcatccgatgcttgttgagcaccggtcgacctggctttatttttagtacttatttttgagggatgagatgtttctataggattgtaggtggggccatagcagaaagagggtgcctgggtaaaatgcccatgagtttacttttgcagtgagtatgtcaatctaagctggcagatacttgatttgtaatagtctttgtgtgtgtttcgctcttcatgtggcatgttcagtttgatctatagttgtatctttcactttcacactgaaattgaaaagtaaagcgcaaatttccttgtatatgtattacaagtaattaattaggtgctatatatcgcatctgtccg

SEQ ID NO: 31397 - DNA, 292 bp, Zea Mays
tggagcatcaacatcttcggcttgtacccttgcttgttcatgagagacaaaagtatcttcatttgcatgcctctcatctttttcatcatcttgtggtacatttgatgaagaaggcctgtcaatgttttgcacctcttcttcatcttcttttggtttgataactccaattggcatgttcttcattgcttccctaagtggttcatcacctacatcatcaagattttcaagtgctccttgggagccattagtctcatcaaattccacatcatatgtttcttctaccacgccagtg

SEQ ID NO: 31398 - DNA, 1196 bp, Zea Mays
cgctgcgccgcgtctgcgttctgtctgtcttcacttatccgaggttccgtgcagcagtggaaaagagcagattttagcagagcagcgagggtcggagaagcctccccaagcttcgaatcgctatgcagcccgtcaaggtgtacgccgaccggcggtcgcaaccctcccgagctgtcatcatcttctgcagggtgaaccagatcgatttcgaggaggtcacggtggatctgttcaagtctcagcacctcacacccgaattcaaaaaaataaacccaatgggacaggtacctgcaattgttgatggaagattcaaactatttgaaagtcatgcgattttgaggtatcttgcatcggttttccctggagtagctgaccactggtatccttctgacttgttcaccagagccaaaattgagtcaatcttggattggcatcactcaaatttgcggcgtggtgcagcaacccttgtaatgcacactgcattggctcccttccttggtcttacgacaagtcatgaggctgtgaaacaagcagagaagcttgtgatgcagtcactgggggtgatcgaatccgtatggctgaaaggcgatgccaagttcttgctaggtatcccccagccatcgattgcagatctgagccttgtctgtgagataatgcagttggagatccttggcgatgaggtccgtgaccgattcctgggagctcatgagaggatccttgtctggatggacaaggtgaagaaagccacgagccctcattttgaggaagcccacgagctccttttccaagtgaagaaggcacgcatggtgcaaggcagcagcagcaaggcttttgagtcgagcacaaagctcaaaacagcatcaaagctctgacgaccaaaggcagaataagcgacagacagatccatcttgtgatataatataataaacgggaactattattaattactgttggtattaattacacttattccagaaggccacaagtgcttcgttgcacttacttattccacaaggccacggtcgggaactacttactgttcgttccagcatgctatagtaaacaactctgcaacaacatcatccccaaaaaacaagcaaacaacaaaattggtatctagtctgtcttgaatctgtgtgaaatcctctccaggccgtccttgcactcttccattgccctcttcgacttgtcttgaa

SEQ ID NO: 31399 - DNA, 1744 bp, Zea Mays
taaaaaaaagattgtccttaaatataggcgccgaaacgaagccgacctaaccgccagacccaagccaacaagcaagaccgaccgcttctgcttgtgacccgaaacctttcttcgaacgcaaaaagaaccccacccgacgtaccgcgagccggctatggcgacggtggcgatggacatctcgaagcccacgccggcagcgtccggtgacgaggcagcggcggcggcgaaggggaggagcggcggcgggggcgaggggctgcggcagtactacctgcagcacatccatgacctgcagctccagatccggcagaagacccataacctcaaccgcctcgaggcccagcgcaacgacctcaactcccgagttagaatgctcagggaagagttgcagttgcttcaagagcctggctcatatgttggtgaggtggtgaaggtcatggggaaatcaaaggttctggtgaaggtacatcccgaaggcaaatatgtggtggatatagataagagcattgatatcactaagatcacaccttcaacaagagttgctcttcggaatgacagctatatgctccatctgatcctaccaagcaaagttgatccattggtcaatctcatgaaagttgagaaggttccggattctacctatgatatgattggaggccttgaccagcaaattaaagagatcaaagaggtcattgagcttccaatcaaacatccggaactgtttgagagccttggaattgcgcaaccaaagggtgtccttctttatggacctccgggcacaggaaagacattgttggcacgtgcggttgctcatcacactgactgcaccttcatcagggtgtctggttctgagttggttcagaagtatattggtgagggctcccggatggttagggaactctttgttatggccagggaacatgcaccatccattatatttatggatgaaattgactctatcggatctgctagaatggagtctggaactggcaacggtgacagtgaagttcagcgtactatgcttgaacttctaaaccagctcgatggttttgaagcatcaaacaaaattaaggttttgatggcaacgaacagaatagacattttggatcaagcccttctgaggcctggccgcatagacaggaagattgaatttccaaatcctaacgaggattcacgtttcgatatcttgaagatccattcaagaaaaatgaacttgatgcgtggcattgatctgaaaaagatcgcggaaaagatgaatggggcctcaggagctgagctcaaggccgtctgcacagaggctggaatgtttgctcttcgtgagagaagggtgcacgttacccaggaggacttcgagatggcagtggccaaggtgatgaagaaagacacggagaagaacatgtccctgcgcaagctctggaatggcagtgccttcatatccatatcttttaccaaagcagtggaatggtgtaacggcatgctctggacaatgttatctcaagttgcgccgcgcatgcttatgtttaaaattttccttataacggctgtagtgtgttgttgcaaagttgattggatttatcagatcagctagattacggtactaatacattgctagctcgcgatgtggacactgcataatggttacttgctcggattatccacattctcgtgtgtaacatgcattgcaatgtcgtggcccattcaatatctcatatttttaacgtgtttttttggttgaaaaaataaa

SEQ ID NO: 31400 - DNA, 2079 bp, Zea Mays
ttcatttcgcccttcccattcctctccactgcgctgccatcgtctcgcgccggccccccgtggggaactagaactgactccctcgatcccagcggcagcggcggaagcgaacggtgaccgcgacctcccctgaggctgcatatactcggatcgggtttcacatctccggttttggattggttggttgcccgcggcgatgggaggagagctgtggtggtatccataggggatcctcggttgcgtccttgtgcgatggcttcgacctccgttcctgagttaaccgcggacaagaaatgcgacaaagccatcgcggatacggcggcaccacttacttctcagggacactccgaagaaccgactgggaaagtcagcacactagtgcctgctttgccggttgtaattgcagcaggcgatggggctgcatccagtggggtgatagaaaacagaaatggcatggacaattctgctgatggttctttgaagcgggatgacagtgaaggtgctgagaagagctcgctgcgggggagcgtcaaggatagctcggtgtcggctaaatgcagtgacagggcgagcagcctgtcgaaagccagtgggagcgccaagatcagcggtcaacctgctgacatgatcgagagtggcaagagtagtctctatcgggccagtggtggaagtgatctgagtgatgagagcacctgcagtagcatatgcagcagtgtcagcaagcctcacaagtcaaacgactcaaagtgggaagcgattcaggttgtccgaaccaaagaaggttctgtaggtctaggtcatttcaggctgctcaagaggctcggttgtggtgatattggcagtgtgtacttatcagaacttagtggcactaaatgctattttgccatgaagatcatggacaaggcgtcattagcaacccgcaaaaagctgcttagagcgcagactgaaagggagatattgcaatgcctggatcatccttttcttccaacattgtacactcactttgagacggataagttctcatgcttggtgatggagttctgccctggaggtgacctacataccctaaggcaaaagcagcctggcaagtatttccctgaacaagctgccaagttttatgtagcagaggtgcttcttgctctggaatacctgcacatgcttggtatcatataccgtgacttaaagccagagaatgttcttgtgagggaagatggacatatcatgctgtcggatttcgatttatccctccgatgtgctgtgagccctactcttctcagatcttctaaccccagtggggataaccaaaagggcaacccagcttactgtgtgcagcctgtgtgcattgagcctgcctgtatgcagccttcttgtgtcacgacaaccacatgcttctctcctcgctttttctcttccaaatccaaggagaaaaaagataaaaaggcaaaggcagacttggcaaatcaggtcagaccacttcctgagcttgttgcagagccgacagatgcaaggtctatgtcttttgttggcacccatgagtacttggcacctgaaattataaagggcgaggggcatggaagtgctgtagactggtggacatttggcatattcttgtatgagcttctcttcggcaagacaccattcaaaggttctgggaatagggcgacattgttcaacgtagttggacaacccttaaggttcccagaatcacctgtagtgagttttgctgcaagggatcttattaggggattgctcatcaaggaacctcagcatcgattagcgtataagcgtggagccacagaaataaaacagcacccgttctttgaaggtgttaattgggcattaatcaggtgtgccactccacctgatatccccaagccagttgagatccctcgttctgtagcttcatcaagccagaaggctacatcagccgctgagaaaggctcagattatcttgaattggagtttttttagtggtcacgcatgatctcccatgtgcaagttgctgacgagaccaacaagacagccgggtttttagacagaagttgtgttattcggtactcaccatatttaagggaacac

SEQ ID NO: 31401 - DNA, 2958 bp, Zea Mays
caacagatacgacaccagacgagagggaacctcgagccaagaaagcgagagggggaagctgcggccgccggccgagcgagctcgccgtccccatccacccctctcactctcctcttcctcctctctgtctttcgctccgtccagccgccgcgtaatccgcggaaccagatgccctcatccgccctctgatcgaatcccgcgagaaaggccggttctctgtcctgccgtgccggcgatcttgatggcattggaggcggggagcagcggctgcggcgggaggggatggggcggcgggttccggagcctgatgcggcggaagcaggtggactccgaccggatccgcgccgagggccagccgcagctcgccaaggagctcaacgtgccggagctggtcgccatcggagttggttccacagttggagcaggagtatatgttcttgtgggaataattgctagggagcacgctggtccagcattgacaatttcatttctgatagctggaatagcagccacactttcagctttctgttatgctgagcttgctagtcgttgcccctctgctggaagtgcctaccattattcatacatctgtgttggagaaggtgttgcctggttgattggctgggctctagtgctggaatatactattggtggatctgctgttgcccgtggtatatctccaaacttagccttgttttttggaggacaggatagtctgccatggattttagcacgccatcagcttccatggtttggtatcattattgatccctgtgcagctgctcttgtttgtgttgtgactgttttactctgcatgggaattaaagagagttcatttgcacaaggagttgtaacagttctgaatgcttttgtaatgatatttgttattgtagctggtagttatattggcttccaaataggatgggtcggctacaaggattctgatgggtatttcccatatggagtaaatggaatgcttgctggatcagcaactgttttctttgcatacataggctttgatacagttgctagtacagctgaagaggttaggaatccacagagagatcttccattgggaatcggagtagcgttggctatttgttgtgcattgtatatggctgtttctgttgttattgttgggctggtaccatattttgccatggacccagatactcctatttcatctgcctttgcaaaacatggaatgcaatgggccatgtatgttgtgacaactggtgctgttcttgcactctgctcgaacttgatgggctcacttcttccacagcctagaatacttatggccatggcacgagatggcctgttgccatccttcttctctgatgttaacaagcaaactcaagtacctgttaagagcacaattgtgacaggcatctgtgcagctgctctggcttttacaatggatgtctcacagttagcaggaatggtaaggaaccagctatctgtgattgtttgtgttggtggagaagacacaggtttgggagattttctctattacttaggccacactaaccatgtctggttatagttacatatataggaccaagtggtctgttgcaactgaaagtagagataagattacaactactaaagtagagataaggtagaagataagatgctatatctagatgccataacataggcactaactactgctactactactacttatcctagagatggagctccaaagtaccaagaacacaagggttattcttatggtttgtctagtcatagccattttcacaacaatggactatggaagagagagttccttcaggactgtacatacacacaagcaatacaaatcataaggtggagtgaaataaaaaatatgttcttttggttgcaggtcagtgtaggcacactccttgcattcaccgtagttgctgtttcgatcttgatactcagatatgtccctccagatgaggtccctttgccaccctctctgcaagaatcattccgtttgaaccaggaatgcgatgaggaaagggacagggctcttcttggagttgggaactgtaccttgtctcagacaaaggatgtgattgtggtagtagaatcagttaaggaccctctcattgatataccgctgcataaaggcaagatggatgagacaaagcgccgaaagatagcctctttaagcataggatctgtgtgtataggggttctgatcctcacatcttcagcctctgccacatggttgccttttctcccgatatgtattggctgcatcattggagttgtgctccttctggctggcctcagtttgctctcctggatcgaccaagatgctggcaggcactcttttggtcattctggaggattcacatgcccttttgttccagtgctgccagttttgtgcatcctgataaatacgtatctgttgataaacctgggtggtgacacatggatgagagttggcatatggctgctgatgggtgttctcctgtacattttctacggacgaacccacagctccctaacagatgtcgtctacgttccagtagcgcaggctgatgagatgtacaggagttcatcaggatatgtatcatagaaaagaacagccgcagttacttcaaggtggttggtcattcagttgtagataattggttatcaaccaggaaagaggggaattggctgttatttctttcatgcttggccaacaagatctcgtggatgcaactttgcaagatatatatgatgttcacgagcctggtcaatttacacattgtttgttggagtgtgcgtagatgtggtgtatataaacccagctgggtggaatgatgtggtacataatttatgcaattcatgtaaaagccctttctacctttctactgaaatgggagagcatttaaagggcatattgaaacagtacatgaatggcaagagaagctacctttttttatatctttttacctcgaacaagtcataattgtg

SEQ ID NO: 31402 - DNA, 1813 bp, Zea Mays
ctggagttcggataggcggtgtgaacactgaggaatggctgaagaggatgtccagccccttgtgtgcgacaatggcactggaatggttaaggcaggtttcgctggtgacgacgcgccgagggcagtctttcccagcatcgtaggcaggccacgccacactggcgtgatggtgggcatgggccaaaaggatgcatacgtgggcgacgaagcccagtccaagagaggcattctgacgctcaagtacccaatcgagcacggcattgtgggcaactgggatgacatggagaagatctggcaccacaccttctacaacgagctccgtgtggcgcctgaggagcaccctatactgctgaccgaggctcctctgaaccccaaggccaacagggagaagatgacccagatcatgtttgagacgttcagctgcccggcaatgtatgtgtccatccaggccgttctttccctgtacgccagtggacgaacgactggtattgtgctcgactctggtgacggcgtgagccacactgtccccatctacgaagggtacacgcttcctcatgctattattcgattggaccttgccggtcgtgacctcaccgacaacctgatgaagatcctcaccgagaggggttactccttcaccacgacagccgagcgagagattgtcagggacatcaaggaaaaacttgcctacgttgcacttgattacgagcaggagctggagacggccaggaccagctccaccgtcgagaagagctacgagctgcccgatggccaggtcatcacaatcggcgcagaaaggtttaggtgccctgaggtgctattccagccatccttcattggcatggaatctcctggcatccatgaagccacgtacaactccatcatgaagtgcgacgtcgatatcagaaaggacctgtacggtaatgttgtcctcagtggtggctccactatgttccctggcatcggtgaccgcatgagcaaggagatcactgcgcttgcccccagcagcatgaaggtgaaggtggttgctccgccggagaggaagtacagcgtttggattggtggctccattctggcctctctcagtaccttccagcagatgtggatctccaaggaagagtatgatgaatctggtccaggcatcgtccacatgaagtgtttctgaattctggagctgtatatctgttatttacttatattttcagttagttgggatgctagattgtcccatggtttctctagcattcttggttctttctaaatcattgaagggctgttggccatgaagcattgtgaaagatggttaggtcgactgatgtactacatgaagaaacatgtgtaacttcagtagtacggatggtcaggtcagtgttttttttttcaagaccaccagatcagtgcgttcctgatatgcgcgatctgggtttctacacgacgcaagggtgccggctgtcgcgtgtcgcccatgcagtttgagtctttgagagttcagttggtttatgcacttctgtacgtggtcatggaatcattcgcatttgcgccccgccgtggcgtggttgttgatttatacttggatatgtttgttttattccttctcatgaaacagctgttgttgtctctaagtgctagtttgggagatataaacccggagaggattggaggggctaaattacccttcttattcaattttgagtaagaaggggaatttaactccttcaattccttccggttttatggctctcaaactagtcctaaaggggtaaattgtttatccttcaggacttgtttgggtaatcttggattggagtggatt

SEQ ID NO: 31403 - DNA, 1506 bp, Zea Mays
cctacggcgcaatgcaaggggagggggctgcgaaggggcagcgttgcagttagtctgacattttacgccgtcagacgactggcagactgggccgccgccgccctaaaccagctgaggctttcgttggtctcttcgccggcaacgagcaccaccaggagtgaagagttttgttcgccgtgcagtttaagatgtcagaagcacttcagaaagataaggaaattggtgaagaggaagaggaagaggagtatgtattgttagagttggacaattgtctttattcagacatatcgcctggtgctcagttcgtactctctggtttggatacattgacgcctaccttgatagtaggtgacaatctgaagatggtaagtcatgttctggtattatttttcatactatgtactgtacctttgccctttgggttgtggactgtagcaggccctgtactgctggaggtactttgtgcttagctgcacagggtggtagtaagtttctgcactttcgtgaacatactatctgatttacgaagtttcaaactttagatcaagtcgtacatatcttcgtttaattgtattgtcagtcttctggctcaaaatcagttactagtttgagttcacttcttggtgagtaacagagcacggagtacatatttgtcatgactgtagcttgtgccgttgaatgctgtaacaggacaagatcagttactagtttgagttcacttcttggtgagtaacagagcacggagtacatatttgtcatgactgtagcttgtgccgttgaatgctgtaacaggacaagatcagttactagtttgagttcacttcttggtgagtaacagagcacggagtacatatttgtcatgactgtagcttgtgccgttgaatgctgtaacaggacaagatggaaacaagatatatttggaggccataagttacttgttattccttaaagtaccaagcgtgcattttactgattatctattttgttgctaatgaatccctttgttctaacgattttcttctttacaaaatgatttttttttgaaattcccaattcatactagagtttctggctctaatctgcttaccagccgtgctaatccttatgccttctaatgacaggtcggggaatatgatgaaactattggcacctgctatctattttctgaaagtgaaactgaaccaaaacctgcaagtgatgagctggcaccttctaaagaaaacacagaaacaccgcttaacagcagtaaggaagcgcccttgaaggaggtgaaccatctggccagcgttcaaaagatcctcaaatttaagccaatcaatgtggagcactcgcagcatcgagcatatcagcacaaggacaaggaactttagaggaaaaaaaatacctgctgttttcttcagtcaatgcattcagtgtacagttttaggttcattgaaatgaggtgggctgtatacttgttgaatgttgagttcatctatatatatgagctactatatcgatctgctt

SEQ ID NO: 31404 - DNA, 3084 bp, Zea Mays
gctgtcaatcgcctccccactgcggcagatccgcaatccgctcctccaccaccgcgctcctcacccacgccagggacaagactgtctacctccacgcccgcctcaccaactccgcggccaccgccaccgccacgcccctcccccatggtcgtcgagtccgagtggtggaaccagcgacgcatgcgcgtcgagggcgacgtgaaataggtgctccaccgcgggcacaacgggcacagtggaggtggaacgagcaccatcgagttctggttccaccgaatccaccgctcgcacaccggatccatcgctcccacatgcccgcacaccggatccaccgctccctcccccgcgatggcctggttccaccgagacaactgcggggctagggtttggattcgtgggtggagcccaaggctagatccagcagggggagggaggtagaggaggggagggaactgctggtggtcggcagtgggcgaaggcgcgacaatccaggatatggattcctgagcgtcacccacccgcccatccacgtcgcgcggtgtagtcatcccctatccgcagccgcctcgctccctctcccacaacaaatccattctcctcctcccactcgacgaggatcgcgaggatgctggaggacgtcgtcgctgtcacgcttgacgttagggcctccgatgcttgacgttagggcctctcgcttgaagaggaacacaaacagagctcatgttttttattttgctctgcattatctactgcttctctgtgggggcgttatttacagtatgtggcctgtttgttgtgttgttcctgcggaagggcgggcgggccgaaggtgtttaagaaaatgttgttgtcaacatcaacctcctggaagggccagaacgcaggcagcgcctcaactcgtcaccccatcagcacggtgagccccttatctggattgttatcatggtacgcggtgcgctgcaagcctgcaagtgacatcaaattggattggtagtcagcgggtgtcatagtgtcagttcgatggaatggttctgcagtgcatgtgcttctgtaatttccgcaagaagcagtcaacttctccctgatatggcactaggacattgtagtgattcccgcacgtttgtggaactcgacaacctaccagagcgccagatgtttcattgagaagagaactcctccagtctggctttccactggtctagtctctcctttaaaccaaatttgataccactcattgaagtcaatagctgggatgtagacatgtgaaaccacacctgtggaactttcagcgtgtgatgactgggtcactggtggaataccgtgttttttgagctgctcgctttcagttcgcggtcatagtcctgtgttttttgccttcagtttcttgatgtagttattgcctaaaatttctatatcttgttcatcgtactggagatgctacttcatgtggagctggtatgtaggatgattatcacgagtacttcaagcgctcattttaggaagacatcgctgcgcaagtgcctcaaggagtggaatgtaccggtttttggttgatggtgtctggaggtgtgatgagacaaaaccctttgtacgtgatgaatatggactgatcagcaatgaagtgcttgtggaaaacaatgtactacccgttgtgcagccagagccttctatcagaggaactaatatggataagggtaccattttgaaaacaatgcccctggagccatcatctcagaacccaagcatgcaaatagcagttatccgccatgtggtctctggaatattattacacaataccatatatgacgttgttcccctttctagcaagggtcttgctctggttcctttttgggatgaccgtcagggaaccataacaggcatgctcactgcatcagattttgttttaatcttgagaaagttgcagagaaacattcaagttattggcaacgaagagcccatttctgcttggaaagaagcaaagctacagttctatggtgggcctgatggtgctgtcatgcagagaacgccattaatccatgcaacattgatctcagggccaagaaagaagctcaactcggcatgcttcctgtttgaagcaagggcaacaaacttaccccaccagatctctgtcgccaaagcagggctagtgaataagctgtgtttcctcccggattgtcactgcttttatatttgtgcatttattttgagggaaacattttgcccaaaaaaggcctgcagtgcacgttttaaacaagtcatttgaaccaactcttatgctgaaaactgtatgtgatactgcagaaggcaacacactagcttgataggaaagttggttggcaagcataggtggactctggtgccttcatatatctatatatatattttaagttgacgatcttcgtgatgctgaaactgatgaagacctccgatgaaaaaagagacatgctgcacatgcacgagggtacttgcagatcgatgtcggctctatggacgaacactcgaccaagtcagatgaggagtatgagggcctagccatgcgcgacgtgatggctactggtccgacgatgagcagcaagctgtgagttaaagatgaactcacctgccctggagagtaacatccataggagtgaggcaaaatggctggtaccaccacaacatggacccgttcctgaagatgtccaaggaggtggtagccgacaccataatgtcttgtgtcattgtgtcaccggtcggcaacacactgcgctggtaccggcgggtgttgtgtttcttaggcgtctgcttctgtgctttgagttgtgctatagagtggttgtgccaactactgattttaaaagaaaaaggtgagctgagaatcattgttgaaaacaaacatgtaattgttcgttctcatcagttgtgccaactaccaagcatttcattgatcagaatttatcgttgctcatgagaaccaaaagtaagacacttctcaataacattggatgcaaatttctgctagcttatcttcactatcttttctcgtatcaatataacacacatttatacataatttttgtgttattatatgttttcgttgcaacgcac

SEQ ID NO: 31405 - DNA, 1110 bp, Zea Mays
cagagaaatggctacatatctctcttagacttggctgctggggcggcgctatccatggcgaagtgggcgtcggccgcgagggctacgacgacgacagaccgacttgacgctctcaacagagctgccttgccatgagatacgaggcactgttgcttagagatgctaaatactgcaacgaccttcacttgcaagtgtcccgtcaggagtggttaacttttgcaatggattgtcttgataatggcttctacaccattgcctccaaggcacttggactctgctaattccattgaggagaaggacaagatcattgagataacaggactccagaacttggccaagtcattatctacacaacattgtgacacgcgcagcgatagatcatcagcgcgcggttctagacttcactggcatgagttcattgcgaccaaccagcctcttcgtgagtattgcgacgcttccagaggctgtcgagcgataaacagagaaaaggctatatatctctctcagacttggctgctggggcggcgctatccatggcgaagtgggcgtcggccgcgagggctacgacgatgacgatagaccgacttgacgctctcaacaggtttgggatgttactaggagtcaagtttttgttgagatgagggagcatgagcgacgtgtgtggtcggtggacttctcaattatggacccaacaaaattggtcagtgggagtgatgatggatctgtgaagctgcgggatatgaatcaggctgggagtattggcactattaaaacaagggcaaatgtgtgttttgtgcaatttcaacctgatactgctcgctccattgccatcggctctgcagaccacaaaatttactgctatgatctacgtcacatacgagctccttattgtacactagttgggcacacaaagactgtaagctatgttaagtatctggatgcatcgacaatagtatctgcatctactgacaactcattgaagctttgggacttatcgatgagtacaggaaggataattgacagtccagttcaaacatttaaggggcatacaaatacaaagtgtttgagatgactaaggatcgatatctgtcttaagatttgtcttttcct

SEQ ID NO: 31406 - DNA, 302 bp, Zea Mays
atttcatattaaaaagttatcgataacttttggatggaattatttttagaggcatcttaaggtgtttgcatccattaatcgatctttagagacaaacgattctagtaaacgtctctaagagattgacagatctatatctctggaaattgatgaacacatgattaaagaacatcatcgtaagcatcatcggtcgcatcggtggatctggtgaccgtacaacacgtccgggttgcagatattaatcgacaagctagattatctccagtctagatcttgccgaaacatgttagtagttcgtggat

SEQ ID NO: 31407 - DNA, 1710 bp, Zea Mays
cgtctaccgcaagtagggccaaggacgacaaagaagaaacgaaaccgaaacctctccaggaatccatcgcagccgccgtcatggccgccgccggtggccgaacccttggccggagcagcttctcccgcgccacatctaacctggtggcgtcctcatccggcgcttctggcgttaagattggcccgaacggtgcttctttcgtctcctcgggcattcccgacctcgacaggattttgggtggtggattccttcttggctcagttgtaatgatcatggaggacactgatgcgccacaccacctcttgcttcttcggtgcttcatgtctcagggtgttgtgcacaaacaacccctgctcttttcaggagctatgaaagagcctgtgttgttccttggtacactacctgctccagtttcatcttcaaaggaggatggacgacacagagcaatgggtcctgcagcaagtagtgatggacgagcaaatgatgagggtttgaggatagcttggcagtacaagaaatactttggggatgacaagacttcgcgagctgaacataaagacaataaacaggaattcagcaatgattttgatttgaggaagcccttggaaaggcatttacttaatggacagaatattgaatgtgtaagcactcaagatgctgacacactcagcagcctccaggattgttgttctgctttcgtatccaagcttccaagaaaagatggtgggagttcaactgctgggagaattgctatacaatcactctgtgcaccgcagtgcagatactttgaaaaggactgggacatggtctcatttatcagatcactgaaggccatggtgcgctcatctaactctgttgctgttgtaacatttccgagtacagttctgtcaaattcgttctgtaagagatggcagcacctggcggatacactgctgtccatcaaagcaattccagatgaggacaaagacttggcaaaactcctcacaggatatcaagatatggttggttttttgcatgtccacaaggtggcacaacctaacagtcaggtccctgtgatcttagaggcatccacgctctctctaaagctgcgaaagaggaggtccctggtcttagaacggttgaatcaggctccagtcgatgggtcaagtgggccttcgtctgctgcatcaagcagttgctcatcgcaaggttcacagcttgatttctaattggtatggctggatttccttgagaggagctcagaagtgctgtgtactagttactcgtggcagaatgcagcttttggaggtttaggttttagataggagtcagtttgatggttcactgttaaccatcctccctcatgtaaccccactttcaacagtattagaaccgtcgaaacttgtatatttttcgggtagttgtccaagtttgttgaactgccttgaacaggttacaaaagtgtggggttttcttgttttgtctgttccaaatgatcatgttttttgcgtagaacggaaatggttgagttgctgatgcaactgaagaattgttggtcttcacgaagatggagctctgtcagacaatgcagcaatcttgctatgttaatgtcaaagatgcagaaggcaattgtaacaacgggaagtagatttttgtaatactggcatcggcattcttgagcttcatggaaatggcagcgccaagcacacaattgcatttgtggcattataa

SEQ ID NO: 31408 - DNA, 737 bp, Zea Mays
ccgccggagatttcctccctctacaaccaaccgccggataggggaggggatgcatcccttcatttgagtagcagcaacacaacaaccatgagtcttgcttgtcttgtatgccatggcatgagcagctcctcacactctcttagaagctactcggtgtcaagttcagaggaggaaagccgatgtggagctgctgtggcctgcttagctcgaagagtaacaccagctggaacttctactagtgctgggacatcgaaagtgaccccctttccacccattgtgagtggtcaagttggcacggagggcactcctcgacttcaacgcagccgtgctgtgtccagggaccttgttagagattggaactttgacgaagtaattgtcgcaaattagggtaaccttcaacagttgtcagctgggctttgtgctctatttatcagggaggagattccttcatttgatatatatttcttttcatagtagacgtctggaagtccattactatatacttaatgacttagacgaggaaatgctcgagagggataatatctttcaggagcgatatctggattgttgcagttatatatgctcgcgtatctatgtagctaggataaatgtttaagtgtcttttcctattttcaaatatgtataagttgacatgtacctttatgtatattattatgaacgaatccaacttctgacctcgatctgatattgaaaacggaagtgatgttttggtgcat

SEQ ID NO: 31409 - DNA, 332 bp, Zea Mays
ttcctcactgcatgttggacaggtgcagggccaccttgccccatattcaggtgtttatagggtaggtttcagcgaggattacctccccgtcttgagctctaccctcagaccacaacaaagaatatgaagttcttgtgtccatactagagatagccctctctccccagccaccaactcggtcagcccttgtgcacagcgcgttatctccctgctagtggtgaccacggccacaacctccttcacctcatagtggccagaacatagtcgtgccaccacaaatcgtcgccgtgtttagtttcatcgtcgaccagccaacagctcctaaaggaaga

SEQ ID NO: 31410 - DNA, 1474 bp, Zea Mays
ccgataagctgcgtgcggcatgccatggcgtggtgcgtgggaccggaccgacaccgagaccagccgccaccgaatcccgccgctcttctggccgccgagttgtcaagcaacgcacgcaccacaagccgcccgcctcagttgaagccccgcggaaaggctggctgcgagtgcgagaccgaccaaacaaagaacacatatcaatcaccagctcacagtgggaggggacgcacgatcggcacccggccatcccctccctcctcttcctcgcacgtcctcttccattccagtaatgggctctgcttcatcaggccgtactgtcacaatttacctgcagatggtctccgggagcacttgctggacgtggacggcggcggagcggcggcggtgcccaagatacgggtgcgcgggctgcggcgccgcgcggacgcgaccggcgaggagatcctccgcggcgtccacctcgacgtgccgcgcggggccgtcatgggcgtcatcggccccagcggcagcggcaagtccacgctgctccgcgcgctcaaccgcctctgggagcccgcgcccggcgccgtgctcctcgacggcgccgacatctgcgccctcgacgtcctcgccctgcgccgcaaggtcggcatgctcttccagctccccgccatgttcgacggaaccgtggctgacaacgtacgatacgggccgcagttgcgcggcaagaagctaaccgaggccgaagtgaagagcctgctgcacctggccgacctggaccctgctctgtgctccaagccggcgtccgagctgtcggtcgggcaggcacagcgcgtcgccctggcccggaccctcgccaacgaccccgaggtgctcctgctggacgagccgaccagcgcgctggaccccatctcgacgcagaacatcgaggaggccatcgtgcggctgaagaagacgagggggctcaccacggtgatcgtctcccacagcgtgaagcagatccagcgcatcgccgacctggtgtgcctcgtcgtcgccggcgaggtcgtggaggtgctcgcgccgtccgacctgtccgacgccaagcacccgatggccaggcgtttcttggagctcagcggctgaaagcccgcctgctcgctgctgcttcgttggatttcgaaactcttctacctaatcggatgctttcgagctgttctggatggaaaggatcggacgtgtggttatctttccaatcgcctatcatgttctctacttttgttctcgtgtatacatacaatctgttaaagtagcttctcacagctagaaagtgtttgcaatacaaacaagttcttggcggattagctttgttttttttcctgggcaactgttagtaattattgctaatctccaaactagtgttcatctcccaacggtacaaaacaacaatccaaaagtcttgtctttcagctttttcaattaatattaaacaaagtgcaaaggtcgattacatggg

SEQ ID NO: 31411 - DNA, 870 bp, Zea Mays
ctgaagcagataagccgtacgccgtccccttgcacagcaaacatccatggcgactgcccgcttgccctctcgctccttcctgtccccggctcagcaatcctatccacggcttcccgcctccgtccgcctctgcctctctcatcacgagcaacctcccaccggccccaagcggcaccgacgcgccgccacttcgcatcctgccttttctgcagccgcgcggggtcgtgccaagaagattcccatcgcggacaccgatgagcccgccgccggagtccgcgtcaccgatcgcggcatctcttaccgcctcgatggcgcgccatttgagtttcagtatagctacactgaggccccacgcgcacgccccgtagcgctccgtgaggccccgttcatgccgttcgggcccgaggccacgccacgcccctggacgggaaggaagccgctgccaaagagccgcaaggagcttccggagtttgactcgttcgtgctgccagcaccggggaagaagggggtgaagcccgtgcagtcaccgggtccgttcctcgccggtatggagccgagataccaatcggtgtccagggaggacatactcggggagcccctaaccaaggaagaggtctccgaactcgtgaaagggagcctcaaatccaaacggcaactcaatatgggcagggatggtttgacacacaatatgttggagaacattcattcacattggaagaggaaaagagtttgcaagataaagtgcaaaggtgtctgtacaatagatatggataatatctgccatcagctagaggtcctcggaagccgtgcaagggagatgacgctagtcgaatcggtcgccaattgggagccatccacctgtccgcgtgc

SEQ ID NO: 31412 - DNA, 1670 bp, Zea Mays
tatgaataatcaagtacttattaaaaaagacgattgtgcttacattttcaggacggatcatactctagaggtccagttgatatagcaattggtgaatatgatgaatctaaatacttcctttcaccaacatataagtttgagcaatgccttgttaaaggttgccacaaaagattgcggattgtgcatacaattgagtttaacgaaggaggagctaacatacaaattgtaagggttgctgtgtatgaagaaaaatgggccagcccagcaaatatccatgttgaagatgatacacttgttgaccttaaaccattctctcaaagaagccggaccaaaccgtcagaactgacaggctcctggaaagtatacgaagtcagtgcaacgccaattttcagtgataaagtgcaagaactagagggcggttctccattggtctacttgtgcatggagacggtgaagaagagaaacctgccagagagttcagttttctttggggaggaggagatgctcgacgtgcaggatgtcaccgtgctttggttacctggtggcgtcactgcctatgttgacatcagcgaagacggcatactctgtatcggagttgggtggtactccgaagaaggtatcaacctggtgatggagagagactatggaaccgatgggaggctcagggaggttcggtcgaaaactgaagtaaagcgcaggaagagtgcttgaataggttgcagaaccggatagaggtgcagtatgatggttcaaatctggagcatcagaaagcactggaagccctttggcgttcttcttttcctggaactgaacttctagggttagtatcagaccagtggaaggagatgggatggcaagggaaagatccatctacagatttcaggggcggtggttttatatctttggagaatttactgtatttctctaggaactatccaaaatccttccaggagctccttcgtaagcagaatggtgatagagcattgtgggaatatccctttgctgtagctggtgtaaatattacattcatgctgattcagatgcttgaccttcaagcagctaagccaacgtcgttggttggagcggttttcctaaatctactcttagaaaatgatcgagcgttcgacattctttactgcataaccttcaaactgatggatcagaaatggcttgaaatgcacgccagttacatggatttcaatacggttattaaatcaacacggcgccagctcgagagggagctgttgctagaagatatccagagaatcgaggacatgccatcgtacaggtttctcgcctgctagcaattgaacctcctggtcgtaccgaacattgccacaagatagtgcagctccatacactcgaagaagaagctgagaggttggaaccacgtacaccgagcgaagggtgaatctaggttcatggactgtggatgtgttgttgctttgaattgcgctgtcgtgtttacctactccgagtccgacaacagcctcgacgccgagtgccttttcgtttcaacgatgtgctatatcttggggccacggaacggcagatcctagctttctttgtaaacaagaggatgtggaaagttggctgcgtatgctttgtggccatgtgcatggataatcttgctgctcgcctgaaagaaaaaaaggccgatcttaagactg

SEQ ID NO: 31413 - DNA, 1580 bp, Zea Mays
ccgagcagcggagggggcggcaaaacatttcttgtttgtttattgcgccgaaaaaactaacagacccagaaaaggacagaaagaggctgcacagtaggcgcgtatatttggcagcaggagcggcctcgtcgtgccccgtatcactcctcagttgcttcgacgtatttctctctctatctatacgattccgaagaaggtagagagagaaactcgaaggggagaggacagaagagggagatacaggttaatttttaggtaccagatcatctgatttctcagaagcaaaatgttgtttggagctcagtgacaccatcttgtaatgcctgtgattttacgggaaatggaggatcattctgtccatcccatgtctaagtctaaccatggattcatcatcggagtctgatcggtctcaccaagaagcatcagcagcaagtgaaagcagtccaaatgaacacacatcaactcaatcagacaatgatgaagatcatgggaaagataatcaggacacaatgaagccagtattgtccttggggaaggaaggctctgcctttttggccccaaaattacattacagcccatcttttgcttgtattccttatacttctgatgcttattatagtgcggttggggtcttgacaggatatcctccacatgccattgtccatccccagcaaaatgatacaacgaacactccgggtatgttacctgtggaacctgcagaagaaccaatatatgttaatgcaaaacaataccatgcaatccttaggaggaggcaaacacgtgctaaattggaggcccagaacaagatggtgaaaaatcggaagccatatcttcatgagtcccgacatcgtcatgccatgaaacgggctcgtggatcaggaggacggttcctcaacacaaagcagctccaggagcagaaccagcagtatcaggcatcgagtggttcattgtgctcaaagatcattgccaacagcataatctcccaaagtggccccacctgcacgccctcttctggcactgcaggtgcttcaacagccggccaggaccgcagctgcttgccctcagttggcttccgccccacgacaaacttcagtgaccaaggtcgaggaggcttgaagctggccgtgatcggcatgcagcagcgtgtttccaccataaggtgaagagaagtgggcacaacaccattcccaggcacactgcctgtggcaactcatccttggctcttggaactttgaatatgcaatcgacatgtagcttgagatcctcagaataaaccaaaccttcagttatatgcaagccttttttgaggttgctgttgctgtacctgagaactgtggttaggttatgagtttgttcctcaaaactgacccatacatgacatgctaccttgtgctgagtttctgagacaaagccatcgaaacatgatcttgtggttcagtactttgctgccattagtgtctgataaactagctccccagtttgcagtttctctgaattccagcatgtctagcctcagccaacgttttgcatttgatgtgacgatgacataccatacacatttgtgcattcatctatgttct

SEQ ID NO: 31414 - DNA, 1700 bp, Zea Mays
tgaacattaaaatattattattaactcatttctattttattattatggaaaaactagaagtgataacgaattacaaatgtaccttcggcttgaaagaagacaaaagtacaagcgtgacgcaaaagcaaatgccaagtccgtgtgaacagtacgggagcattgttcatctatttataggcacgggacgcagcccatgtaaaattacacccatgccctttacatttgctaataactctatagaaatacatcgaggtctaaatagtcttttcatctttaagtcggtttccttttctgctatcatgccgaagctcccctgcgcatagcttcggctctgctccatccttcgtatcccttgtgcttcttcacactgtggttttgacccaagtccgaaggatctaagtccgaagttacctgctcatgtattatactccagaaacattgttaaatcatgtttttgaggaccttcggaagccgaaggcccccaatagggtgattaaatgataatatcttctatgttataaatcatgtgagaaaaatattacggagaaacaactaattcaactttaatataggttatcacttgattagacatcatgatttagtcaaattctaattgtagataggttaactttaatgagcaagcttaatctactaaacaaagattaaataatatctaactataagaatatgtgctatgataaaactaatgttgttgttgcgtagacaatgttattacgaagctaacgcaattgaaacggattaaatcagagttaaatgtagaagttatgaattttgtaagtttattgacttaattttatatcaaaaatcctttttgggatccattagaaaccagaccgggtcacgtgttctattactcgagagaacatggactaatctgcaaggaataggacccatctgtaatgattttccctcatgcgtggatggcgggttaattcaccgagttcccaggggttcttttgtaaagagtacgcgtcgaaggggtatgggttcatccgagccgtaggatcttcaatcaagcgccccaattagatcaccaatcccgccaacgcctgagccattggatcgacccacaatggccaggatccaccctagccgaagggttatgctctttcaatctgggttgtctacttatcgatcaatgaccgggattttaaacatcgacaacctaatcttaaccctccaacccgcgagccacggtcctgattaacccagccgaatcgttatgtggcacttcatcccatccgtccattccagatcgacggctcctacactttcttctacctctgaccgaccggcagccatggcgttcgccagcccacgatggcgctatgcaggcgggatgccccgggtgaaccaatgccccatcacccgccgcactcaatgccacacaaaggagcttggtgaaagaaataggtattcttatcttaccggtgacccatgggtagacgacgccggctgcagagaacaggaacacacggccatcctcaacgtcgtcgaggcatcaagagtatcccaccccaggcatgcccggcaggagcgcgacccccgtcgagtgccccgacaaagcaccacgtgcgccagagactcccatggccattgcccagggccggagattagtcgcgggcgagctcctacaaaccgccctgtctgccattacgggccacggcgtttgaccgagc

SEQ ID NO: 31415 - DNA, 944 bp, Zea Mays
cgcttgttggctctgcgattgctttgctatgctaaatacccttccaagttggaatgtcaaaggtagattttcgcaagatgttgaagtctagcttaactggacttgacaagacaatcaatgcaatgtatagaaaactacagaagaatatgactgccgaggaattgctgccttcgctatgggaaaaatgcaagaaagagtttcttgataaatacgcaacattcctcaagttgatttcgaaaatatatcctgacgagaaggtgatatctgtgaacgaaatgagagatactctagcttcactgtagctatttcgttagaaggttcgcatgtccgttggtttgcttgcgcatataagttgacctgattcagcatcatcttaggttcttgatcctcactgaaccaactatctgatatgtgatcccttaccaattatctgattcatggtctgttgtggaacctttaagggcttgttcaatccatgtggattgggtgggattgagtgacaatctcacccaatccacgtgggataggaataaccaaacaatgcctaaataaattctggatgacatggatgttaaacaatttgtttatttctgtttttactagcaataatgtgcattagtcaagcttaaatatggtccattaccttcatggattggtggtgatggcacgagagggccttaattccattaccttcctcggtgtctggactatgtggaaacgtaggaattgttgtgtttttgataggatgtggctggacatgaactagagctttggaggttggctggtgcttggagtctctctctcctcatcggttctataccgggttgcggaatctttagttggtagttgccctgttgttttagttatgaatccttttgttattgtgtatgcttgcttcttgtaacggtcataatagaccgaaacttccttctacttaatttaat

SEQ ID NO: 31416 - DNA, 433 bp, Zea Mays
agatgtatcgagttttgcgccttcgatacgtcgtttacgtattcagtttttcacacaacggcggcgatgtcgtcggcctcctcctccgccgccgccgccaacgccggtgaaggaagcgggggtgcggaggagggcgtggagatcacttacgtgagctatggcggggagcagcatctgccgctggtgatgtcgctggtggacgaggagctcagcgagccctattccatcttcacctaccgctacttcgtctacctctggccgcagctcaccttcctggcgttcgatgccagggatggcaagtgcgtggggacagtcgtgtgcaagatgggggagcataggggtgcattcaggggctacatcgccatgctcgtcgtcctcaagccctaccgagggaggggaatagagttgggctgcatctctcgagtgggttgag

SEQ ID NO: 31417 - DNA, 1779 bp, Zea Mays
ggaacgagatcctctgacgtggggaggagccactgacgcgtgggccccgcgtgtgacagggcccacgtgcagtggcccaactgctctctgcagtacgtcagaggccgaaggtcgaggagctgaagaggcactacgggttgcggttcgtgacgtcgtctctggagaagaaggcggaggccggcatcataagcgccaagctggacgcggactccacgcggccgcgcaccgcgccggcgtacgaggtggcttccggcccacagccgcgccggcccatccggtcgtcgcacctggcctacgaggtggcggcgtcggccgcgtcctacgtccacgcgcgcgcgcgcggcctgctctcgttcggcgcgccgacgcggcagcagcagcaggcagcgggtcagggcaggctgtacaactcgggcgtggccgcgtacatggccgcgtcgacggtgacggcggtggtggccgccgaggacgaggcgcggcaggaggcggcccgcgacctgcggtcgccgctgtcgtcgccgtgcgagtggttcgtgtgcgacgaggcggacgcgcggacgcggtgcctcgtcatccagggctccgactcgctggcgtcgtggcaggccaacctcctgttcgagcccaccgagttcgagggcaccggcgtgctggtgcaccggggcatctacgaggcggccaagggcatctacgagcaggtcatgccggagatcgaggcgcacctgcgggcgcacgcggggcgcgcgccgccgcggctgcggctcacgggccactcgctcggcggcagcctcgcggtgctggtcagcctcatgctgctggcgcgcggcgtggtgacgcccgacgcgctgcacccggtggtcacgttcggggcgccgtccgtgttctgcggcgggaaccgcgtcctggaggccctgggcgtcggcgaggcgcacgtccggtccgtggccatgcaccgcgacatcgtgcccagggccttctcgtgccgctacccgggccacgccatcgcgctgctcaagcgcctcaacggcgtgctccgcacccacccgtgcctcaacacgcacaaggcgctgtacacgcccatgggctccacgtacatcctgcagcccgacagcagcgtgtcgccgcggcacccgtttctccccgagggcgcggcgctgttccggctcgactcggacgacgccggcctccgtggcggcgcggagcgcccgccgagggctctggtggccagcgcgctgcgcgcgttcctcaactcgccgcacccgctcgagacactgagcgacctgtctgcctacggcgcggggggcgccatactccgggaccacgagtccagcaactacttcagggcgctcagcgcgctggccagggcgccgccgcggcgccggaagcaaccggaggtcgtgtggcagctgcccggcgtcgagcggctgcagcagtattggtggccggggatcgccagcaccgtcatccccgcaccgttggccgtcagcaaaaaggagctggtgtccgaggcatagaatttgtacgcttcgttcctttggtgtgctcgcttgagcagtgtacattctttgattctggttccgcacgaggtacataaaaatgcacaacttgttcttttggcgtttaggttcgtgtaaaaattgtaatcatgcatagcataggagcgtgtctggtttggtgtcctggtggccagcaaagatccgcggctgcttaataagacaatgagctttgtcttgggttttatgcgaaggagctcacgagttcaacatgtaaacttgtttc

SEQ ID NO: 31418 - DNA, 1055 bp, Zea Mays
ggggctgcagggctgagaggtagcttatacgttggtacacctggcaaggttaacattgcacagagttgtaaaggatcgggatgtaaacagcgatgtaactgcatattacctcgcaaaagcaaaacagttcagcaatgattcaatcaggattacagaaggacaattaaattcttcaagaaaagatcagaataaaattaacaacacatcaactgcagatacagataagagtgcagcaataattctttttcaagcacttcatgtttttggactcattgatattgcagcgaagcagttgctagggcaaggggagcaagactataattctgttcaagatgctctgcagaagtgtgtttcactttacaaagagcctcatacacgaaggttggtgaaaaatgctgccaagcaggactacatgatatgcctgacgagcctgatcgatatggttcagagcttgtttcccattccacacataccggggttgcaggagttgctttgcgaggccgaacaaattttaggagagctagaagaagagagtactaggaagaagcaatgatacgtaggaaccaacacccatatgggtggaagcatttgttaattgcaagttgtgagccatatattttttcagttggtcgagatcgcccacctatatgggtggaagcatttgtttgacgaggtgctgaatcgagtgacgggttaaagagtttaatgcttgtttgcgcagtggtgttatgacgtggtcttcaacatagagtcctagtttctcggtggtggtggtccacaagatagatcatgttgctgaaatcttggatgctttctaaatcaaaatccttgacattggcgaccaaaaaaaaagatccctatcaatggcggatggccaaactgaaccaaggattggttttggcatagaagctcttcctaaaagttgtgctggctgtttgcgtaattcttttagatattgtggtcttagactatctctagcaacttactcatctttatctctatatttaaactccacattataaacaatgcactttacaatacaaaacaatattttg

SEQ ID NO: 31419 - DNA, 2996 bp, Zea Mays
cagagctgaacacaaacacccacatcgatccaacccaagccacgcctcggcgacaggccgacagcccacgagcgagatccaacccaagttccgacgccgcgggcgagaccgatcagatccacctcagccgtctcggatggcgtcagcatcgacggcggtgcggatgctccccgacggcggcgctgacgacgaggagcggtggctcgccgagggcatcgccggcgtccagcaaaacgccttctacatgcaccgcgccctcgattccaacaacctcaaggacgcactcaagtactcggcgcagatgctctccgaactgcgcacctcgcgactatcgccgcacaagtactacgagctgtacatgagggcgtttgatgagatgaagaagctggagatgttcttcagggaggagactcgccggggcagctgctctgtggttgatatgtacgagcttgtgcagcatgctgggaatgtcttaccgagactctatctcctgtgcacggtgggatctgtgtacatcaaatcgaaagaggctcctgctaaagatgttcttaaagatctcgttgaaatgtgccgaggcattcagcatccccttcgtggcctttttctgagaagttatctttctcaaataagcagagacaagttgcctgatattggttccgagtatgaaggggatgctgaaactattaacgacgcagttgaatttgttcttcagaatttcatagaaatgaacaaactctgggttcggatgcaacatctggggcctgcccgagaaaaggaaaagcgtgggaaggaaagaaatgaactgcgtgatctggtaggcaaaaaccttcatgttctaagccagattgagggtgttgaccttgatatgtacaaagaaactgttcttccaaggatattagagcaggtggttaattgtaaggatgaccttgcacagttctacctgatggactgcataatccaagtctttccagatgaataccatttacaaacattggaaacattattgaatgcatttccccagcttcagccaagtgttgatatcaaaacagtactctctcaacttatggacagattgtctaactatgctgcctcaagtcctgaaagttcttgcaagttgaagcttttgctaagttcagtaatgctattggaaaggtgatagaagcccaacctgacatgccagttgttggagccgtaactctatatgtatcgcttctgacttttactctccgtgtacatcctgaccggcttgattatgttgaccaagtgctcggtgcatgtgtcaagaaactttcaggcaaagcaaaacttgaagatagcagggcaacgaagcaaattgttgcacttcttagtgctcccctagaaaaatatagcaatattgttactgcattagaactttcaaactatcctcgggtcatggattatcttgataatgctacaaccaaagtgatggctgtggtaataattcaaagcataatgaaaaacacaacctgcatatctacttctgacaagattgaggcactattcgatttaattaaggggctgataaaggatatggatggggctcaagatgatgaacttgatgaagaagattttaaggaggaacagaactctgtagcacgtctcattcacatgttgcacaatgatgagcctgaagagatgttgaagatcttatgtactgtacagaagcatatacttcagggaggccccaaacgtttaactttcactgtgccttctttagtattctccgctcttaagctggtcaggagattacaaagccaagatggagatgtcactggggaggatgttcctgcaactccaaagaaaatattccagatattgcatcagactatcgacgcactttcttgtgttccttccccagagttagctctgagactatatttgcattgtgcagagttgcttatgagttctttactcaagcgttcatattatatgaagaagaaattgcggattcaaaggctcaaatcactgcaattcacctgataattgggacccttcagcggatgaatatatttggggtggaaaatagagacactctcactcacaagacaacagggtactcagcaaaacttctcaagaagcctgatcaatgccgagcagtttatgcgtgttcacatcttttctgggctgatgaccaagatgggataatggatggtgaaagggttctgctttgtttgaaacgtgccttgagaatcgcaaatgctgctcaacagatggctagtgctacaaggggaagcagtggatccgtaactctatttattgagattttgaacaagtacttgtacttctttgagaaaggaattccgcagatcacaaataccgtgattcaagatttgattgaattgattagaacggagaagcaaagtgataactctgtagctgatccatctacagaggcattcttttctagcactttgcggtacattgaatttcagaagcagaaaggtgggagcataggcgaaaaatatgaacagataaagacgagttcatgagtcagaactagcgcggcgccacgactggtttcgattttgttgagaattgggtcgtttgtttggcatggttcagtgaaatagaaaccataagttttagctcgctccatgtaaaagatgtttatacgagctgttaattctcaaatctcacggtctgagcgggtctgttcgcccattggcaacactttcaggtttagtcaggtggcaataagctgtgtcctttggggagcacaggtctgtacaggattacttgtgttcgtgatcagttctactgctacctgaatttcatcgttgtatatttccgccccttatgcgaagcttatggattttagatctctgtaacattcggagtacatgccttcatttctgagttctgactggacattgatgattgtttcagagtggccagtgcaggacttgaacattttggatgcccgttcgttgacattttaatgttacccattactctgctgtgtggcatgacctcgc

SEQ ID NO: 31420 - DNA, 1329 bp, Zea Mays
attgattggttggtcctgtaccaaccatattagatctaaattggttggtaccgattgctacattataccgatcatttttagtcatgtgtcacgttttgattgatccaccttattttgaagaccaaaaaaatataaatataaaaaaattggaatctaatctataaatagaggggatgtttggattcatttacatccctcactctccaattagctcctaccacttactgtttcactccttttactccaaaccgctaccaccatgtcttccttaggctccaacgttgaagtcaattgcactacaacatttgactccatgaattgtcttagaatgttgtattcataaatgaaattgtttcagatagaattgaattgattctagattatttcatttcagctatctttgctattgaaaggcatggtggtggcacctcctgataaatttcgtgtgtgtttgatctgctatgatttagtttatggaggattttagattcttgctacattttgctttgttatgacttaactattggaccacaggagaaactttagttaacgagagaattaatggaggaacatttactagaagttagaatttccagctctcgaacaacatagttccaggtgcaacatgttcagtgttctacaccagattaactccattgcattttttttaaagttaagcaacctatacagagacaccctaataatatgttgaatgataagatcatggcatcgtgctatgtgtttctacaattggctgctctgctttcatttgtacaatcagagagaacggtaacccaagattacagtgtcctggtctgctgaagaacaaccgagatggaaagagctaaaatcctaatttggcatccatgcctcctgaaaatcttaagacgggcatagtaagtaagtcctgagaatgtgatttacagttttagcaatgtcttgcttgatctcctgagtggaaagcacgttcaaccaaatcatgtgtcctggtgtaccaatggtgagcatcacgtagacacgattggccatcgccacgacacggacaggagaacgtgcttgtgctgctcgcgctctgtaaggaactaaatgatttcactatatgtggttctttgaagtttcggttaatagaccttatgctaattcactacttcaaaagcaaaaatatggagatgatgattaaatacataggtagtcatttgtaacttatttttgctattgatatagttgtggcacattcatgtatgagagtttgtgaaaatattccatctgaactgccagatcctacatcttcatttcttaacagacagacaagttctttagaacctggtg

SEQ ID NO: 31421 - DNA, 1557 bp, Zea Mays
ttttctttttttgattgattcgatttctccacacgtgctacacctacacgacgcagaattgcagccgaatccatcggagcccacggccgcacgcccgcagcccggccagcggccaccgcatcgcctcgtatgctccgcgcttgcacacgcgtcggcggcgcgggcgcgggcggctgcggccgacgagaacgcctcatggcctccctcatccccttcctccctccctcaccttactccactcacctcccgcgccagccccagtcccagccgccgacagccgctacccagcccgccgcagcggcgcgcccatcccggttccgcctcctgttcgcgcgcgccgcggcgcagcggcagcgcgactccgagccggcgccggcggccgaggagaggcggtcgctggccgtcagaacgggggagctgttcctggggctggcggcgctgctgctgcgcgggaccggggccgagcgtagcggtggggccgcggtggaggagatggaggcgagggacggggtagtgtgggagcagcgcccccaggacgtggacgcggagcggcggcgacgggagctcactagcccaggagacaactccgttagctggctcatcagctggtgccataatctgtgcagtgatcgcatctgggaacacaatgcaagatgctctgcaggtgaccaaagttctagctgacaactgccgaagtaaaggcacggcgtttcgccttggggctgtactcaaggatgtccttgttgagtttctcccagatgatcttcacattagatgcaatggaagaattcgtgttgctattactcagctatcctggaggcctagggccttgctggtggaccaatttgactccaaagaagatgtcattaatgcagtaattacatcctcctttattcctggatacttagcacccaggccagctaccttcttccgtaataggctcggcattgatgggggccttacattgtttatgccgcccacttctgctgcagaaacagtccgaatatgtgcttttccagccagccgtttgggattgcaagatattgggatcagtcccgattgcaatccagagaacagggctagcccaagacagctgtttaactgggctctggaacctgctgctgatgaaactctagacaaattatacgagcttgggtacctggacgcagctgtatgggctgagcagaattatgctgagcttatcgccaagaatgatcaatcccttgtcgctgattgaattgagttcagtttgcccagaagtaattttggtatccaaagctgagttcatgagaatccatgcctgtaatatattgtaaagatagcaccgtcattgtcgaaggtggcattgttctgcattggatttgggtgtttatgccagcattttcgtagctgtgacaatagtgtagaacaggttgctagcatggccataaaaactgatcagcataatcaaatgtatagattatagatgatgaggtttgacctgagcctaaaacagggggataatggtcctatttgtttcagttttttttttagtttctggccgttagaagttgctgc

SEQ ID NO: 31422 - DNA, 246 bp, Zea Mays
ctttacgccgatagaactcgtgtgggatccagctatcctgagggaacttcggagggaaccagctactagatggtccgatagtctttcgccctatacccagtcagacgaacgatttgcacgtcagtatcgcttcgagcatccaccagagtttcctctggcttcgccccgctcaggcatagttcaccatctttcgggtcccgacaggcgtgctacaactcgaacccttcacagaagatcagggtcggc

SEQ ID NO: 31423 - DNA, 154 bp, Zea Mays
cggacacgacgggcaatacggcggaggtggcggcgcggagagacgggcatgcgccggcccggcgttgatggtacctcgctcccttgagtgcgggcaaagggaaagggaaggcagtaattccgcagctggagctggaagcctggaagtgggcaag

SEQ ID NO: 31424 - DNA, 1770 bp, Zea Mays
cccaccactgctctctgaatttctgctccctagctagctagctctccagtctccactgctgaaaggcgtccgtcgtcgtcgagatgaggcccgcccgcccgccgacgatggagatgcaaccaccaccgacggccatgcaaggccggagaagcccgcgaccgctggaggagtcgatcgagagctggcttcccatcagctccagcaggaacgccaagtggtggtactccgctttccacaatgtcacggccatggtcggcgccggcgtgctcagcctcccctacgccatgtcccagctcggctgggaggtcggcgtcacggtgctggttctgttgtgggccatcacgctctacacgctgtggcagatggtggagatgcacgagtgcgtcccggggaagcggttcgaccggtaccacgagctcgggcagcacgcgttcggcgagcgcctgggcctctggatcgtcgtgccgcagcagctggtggtggaggtgggcgtcaacatcgtctacatggtcaccggcggcacgtcgctgaagaagttccacgacacggtctgcggcgacagctgcacggacatcaagctcacctatttcatcatgatcttcgcctcctgccacttcgtcctctcccagctccccagcttccactccatctccggcgtctccctcgccgccgccgtcatgtcgctttgctactcgacgatcgcgtgggtcgcctcggcgcacaaggggaggtcgccggacgtgcactacggcctgcgcgcgacgacggcgccggggaaggtgttcggcttcttcggcgcgctgggggacgtggcgttcgcgtacgcggggcacaacgtggtgctggagatccaggccaccatcccgtccacgccggagaggccgtccaagaagcccatgtggaagggcgccatcgtcgcctacgccatcgtcgccgcgtgctacttccctgcctcgctcgtcggctactgggccttcggcaaccaggtcaacgacaacgtcctcgtcagcctcagcaaacccaagtggctcatcgccctcgccaacatgatggtcgttgttcatgtcattggaagctaccagatatttgcgatgccagtgtttgacatgatagaggcagtactggtgatgaagtttcggttccgtccaagcctgatgctccgcctcatttcccggagtgcatatgtcgggtttacaatgttcatagccatcaccttccctttctttggtgcattgctcagcttctttggtggatttgcctttgcaccaacgacatattttcttccttgcatcatgtggctcagaatatacaagcccaaaacttttagtgtttcatggtttaccaattgggagtgatgttgatggtactatcaccgattggtggacttcgacagatcatctttaatgctaagacatacaacttctaccagtaaatataattcattcaacacaaaaccaaggtttatgccatagttaaaatgtgctcgacatgtctcaagttttgaatggggcttattgtttttcttcgacatggcagaaaattcatatcgtgtgatgtatttagtatataatgttacagttatccaagttttcatcgtgcaataagatggcatgtgtcatattcaaagcttgttgctactcaagacaatctgtgatgtgtcatggtcccgttaataatggcttaacctagaagtttgcttttgatttatcatgtgcatatatattgtttgtctatattatatataggttgcttatttgcatgttattagga

SEQ ID NO: 31425 - DNA, 2685 bp, Zea Mays
cgagtcaactgaatggctcttcccgttatcttagaaaaacctgctcaaaggtgtcaagcgtatgacttgagcaggcctcaattatgtacttgtgtcaagaagtgttgtagtctgaagaattcgctggcggtggtgcagcttggcttcctctgcttctttttgacgatcaactgtcagggaacgtaacgtaactacatggtcacaattttgatgctggagcaaggcactcatggaccggacagacacatctggatttgttaccggtggatcagacggtacttcactgctgctgatattctttcacttcgtctactcgactgtgcacctataagagatcagtagacctctgatctcactgtccagaactacactctcctcatcgttgttcgtccaccgccttcgctgaacttttcaagtactttgtctagatgagtaccggttctgcgggtgtcttcctgcaccgtggaaaccaggctctcatggatgattctgcagtgccaattggcttctcaatgacgagctacacgacaggtaaccagtttcagagtcggataacatttggtatagaccaactgggttcagcagtgaacaatagcagcagccatggccgcagaggtttccagaggtggattcatgcgcctgctcaagatgatgggtgcagactagtcctcgggctgggtccgacgccggacccagacgttaactctcctgatcagcagcctgccggtgccggagcagacaagtcgagaccaccacctgtaactttgtttggccagagcttctccttcgctgatccggggacgctgagccttgggattcatcagggccgtagtacgggagcaaataaacacttgggcgccggaaccatcatctctttttccactgtggacgagggctccacgtctgccaggagtagctccggcggctacatgccatcgctgctctttgctcgtcggccaaactgttcgacagctgaagaggaacagggtttgctagatgacacagacacagacaacagtaacgatggtactgaaccttcggcatccatgacggaggcttcatttggtggcgtgagctctgatgctgtgaccctggtaagcaactctggacagcaggctcaacgccggcaccccaagaagtgcaggttcaaagggtgctccaagggcgcgcgaggcgcgacgggcctgtgcatcgctcacggcggcgggcagaggtgccagaagcccgggtgccacaagggcgccgagagccgcacggcctactgcaaggcccacggcggggggcgccggtgcctgcagctcggctgcaccaagagcgcggaagggaagacggaccactgcatcgcccatggcggcggccagcggtgcggctaccctgactgccctaaagccgcgcgtggcaagtccgggcggtgcatcaagcacggcggcgggaagaggtgctcggtcgagggctgcatcaggagcgccgagggaagggtcgggctgtgcatctctcacggcggcgggcggcggtgccagttcccggactgccgcaggggagcgcagggcagcaccctgtactgcaagtcgcacggcggcgggaagcgctgcgtcttcgaggggtgcggcaagggcgccgaaggcagcacgccgctgtgcaaggcgcacggcggcgggaagcggtgcgtgtatgagggcggcggcgtgtgccccaagagcgtccacggcggcacagacttctgcgtggctcacggcggcgggaagcggtgcgcggtgcctgggtgcagcaagagcgcgcgcggccgcacggaccgctgcgtgaagcacggcggtggcaagcggtgcagggtggacgggtgcggcaagagcgcgcaagggagcaccgattgctgcaaggctcacggtggcgggaagaggtgcaacttcggcgacggccaatgcgagaagttcgcgcgcggccggagcgggctctgcgcggcgcacgacactctggtggcctcacagcagcgccgcggtggcggcatgatcgggccgggcctcttccacggcatcgttcgctctgccagcgttgcaaacatgaacagcgactactcgtcgtcgggcgtgagcacggtgtccgactgcgacggctcgcctgaggcggcgacgaggaggcaggagctgatccctccccaggtgctggtcccccggtccatgaaatctttgacggcggcaaccgtgcagccaccgaagaggagcagagaaggaagggtagtcaccgtccccgaggggagggtgcacggtggtggcctcctgtcgttgcttggcgggagcttcatgaacgtcgacaagctctgaagcagtcagcgcttggggctcgatttgacgatttctacctctacaacgctttttcttaccttagaaaaaagtgagaaaatgccactttttctattagagctgtcagattattgtctgtgcataaaaatattttctcgtctacagatcgaacttgtatggtgaaatttagggtaattttgtttcccttgtgccatcaagggtgaacacatgaatttgtcatgtcttatgtgttgaatcgttcgtagcatttccgaaagttttttttggatgcgaaagctttactgctgtacttgttgtgaataagattaatgtgtaacaatcaaacttattgctacactgtgctgaattaccataagattgttcccgg

SEQ ID NO: 31426 - DNA, 2521 bp, Zea Mays
cggaatctcatctcatccagtcccttcggccactccgccggcaggtcaagacaaaaatctcatcactgtgtactgtagttcagcggcagcaaagctcgctctgatttcgagctcgccaatggccgatgggccagtgaccgcgacctcctccatggcggtcccctccgcgcgccgtaaccgggcgctcctaccgacagtctccgtggctcgcgagccggcgcgcgcgtgggcagcggctggcgcggagggaagggcgcggagagggaaggaggctgaggtggaggacgagaaggaagcggggaggcggcggaaggaggaggtgaaccggaagatcgcgtcccggaaagcgctgtccgtcatcctccggcgcgaggccaccaaagcggttctcgacaagcgtaagcccggcaagggcacgcgccgcctcctccccggcaccgtcctcgaggccctgcacgaccgcgtcgcggccctcagatgggactccgccctcaaggtgttcgagctaatgcgggaccaggtgtggtacaagcctcacataggcatatacatcaagctcataaccatgctcggcaagtgcaagcagccggagaaggcgcaccagctcttccaggcgatgattgacgagggttgcgcgcccaacctccagtcctacaccgccctagtctccacgtatagcaggagcggccgcttccgtgaagcattcgacctgcttgaccggatgaaggacactccaggtttgctgagatggaatcaactcttctgaagatgttgtcacaaaattgcaagcctgatgtgtggacaatgaattctactctcagagcttttggcagtagtggtcagattgagacaatggaaagctgctacgagaagttccaggcctctggtattgtcccaaacattaagacctacaatatcttactcgattcctatggcaaagccaaaatgtatgagaagatgggagctgtgatggaatacatgcagaagtactactattcttggacaatagtcacatacaatgtagtgattgatgcatttggaagggccggagacctcgagcagatggaatatatatttaggctaatgaaatctgagcgtataaagcccaattgtgttacactctgttcagtggttagagcatatggaagagctggggaagttaagaaaataaagacagcgttgagaatcattgagaattctgacataacattggatattgtgttcttcaactgtttggtggatgcatatgggagggtggggtgcttggcagagatgtgggatattcttgatttgatgaaggagcatagatgcaaaccagacaaggtaacctgcactaccatgatcaaatggtttctcatcaaaggaatcgacgatcatcgtgttcagtacctacgtgatcttaaagatgggcgagcaaaagatgatacataggagtgaaaacaagaaaaactcttggagcagtgactttcgtatatatttttttaaaggaacgaatggatctttcggagcctcggtttacaattacatacatgcatcgatctcactgacttactactgaatcaaacattactcagataccatgagtcacactgctcactgacttatgtgctgcaagagctatatagggacatcttaaaaaaaagctactaatggttgataaggttgaagcaaattttggtgagtggccaataatgaacaatactggaatataaagatgatactgggaaaagggacacgttttagacgcagaagagacaagacatgctggtgaaattgatcagattctgctatctgttctgacttgatgtatcgacacagctgaacatgacttgtactgttgactagtgcaaaggctttacagcctgtttggtatcgacaccccctcactctttactttttgtatgatttgtggaatggaataagttgttccatcactatctgtaacgcataaaattctattttgggatctgtaagagtttctctaaaaagattaagatgactcttaatatggattcctcacttttgaagttactaggtgagtgtccgtgcgcaggggtggatattggggctgggccacctgtgccatggcccaggtcatagcctaaaaatatagtagagattttagcccaaatgaaaccctaacatctagttctccagcggctgccgcctgctgctgctgcgtgcgtgcctgcctccctccctggcccctgcggtcctgctggctgctcgggcgtcctgtggctcctgcgaggctgcgacctgctggctgctggcagaccgtcgtcctctgtctcctctcctccgcggccacgggtgcacggagccgggcagctggccgcgaggacaaaggaggccggactgccggagtccggacagccagacggccagagcgtggagcgcgactgcacgagggatctgggcgggcgatttgtccagcactccagcctctagtcaatcctagttactgtaactctgtaagcacttcttattttctcagttttttttgttactaatgaataac

SEQ ID NO: 31427 - DNA, 137 bp, Zea Mays
aattttgaccaaactttaaaagcaatgctcagctttccattctctttggtaagccttacacttcacatgagctcccacctttggtaagttcatgcacattattccccacaacttgttgagctatgaacgtatgtgag

SEQ ID NO: 31428 - DNA, 1685 bp, Zea Mays
cagcaggtctcgggcgtggttgcgaaaaatgaggcggctgaaaacaaagcgtattctctcctcccgcattcacttgttgcaaccatcgccttctccctcgccgcgagagtgctcaacctggtgtcctggataaggcaacgggataggaagcgataattggcggagagtgaaggttcccgtcctaggccgaagtcctcgttgttgccggaagaagtaccgcatgacttcgccgggtagcggcggatcgacgactgcaagttatgtagccaattcgcccccctacttgtagatctgggtttttgtaaagtttatccggaagctacttgtagatctgggtttttgtaaagtttatccggaagatttgtatggattggggtagatccgaagtacatatccatcccacgcttggggttttagggtatgacactcgcacctttggattgtagtagatgttcgtccgtatgcaaccattttgttgttgtcgtcggctgtttcgactagaaaaatacaaaccctaggatattacactacgatttagtttcatatctttcgcttcaaatgcggcaaagtgtagttaacatctttttgaatcactgctagatgtcctacactccaaaagacgccctggaatgggctgttcgggagatggaggaccacacctgtcaaattaggtagcttgtcggcagtgctacaagcacaccaatgccaaccgagcatctgaaatgtgttaacctcaagatttttaagctcgcggactggcttgacaaggtttcaatcctatgcttcgaggttgtcgagaaggatggaagcaaccacctcgatgacaacaccacagaggaagaacttgaagcagctcgtgagatagaacttgaaaggctccccactcccgaaactcttaaaaaccttgaggacttttgtgaggaatgggtatgtacgaagtaacctatactccaagattggaactgtcaacagatcaagcatggaacaactaggaagggttctagaatcctaacgaggcaatgcaaggcatacaagaccttgttcaggatgagctgccgccaatgagttctaaaaagaaaacagttcacaagaggctcaaaaatttcactgcaactgaggatgaatgtcttgtatcaacgtacttaaatgttagcacagacccaattgtgggtgtgaaccaaccaataaaaggctactaacagaggatcgctaactactgcgaagaacacaagaaaactccagtttctccgaccatatcctccctacagcattggtgggcagacattcaaagggacacttcaaggttttgtggattctttgcccaagttgaaaggcgcaaacagagtggtgtgaacgaatctgacaaggttggtttatggtttggttactctatacaactggcagtgcattcaagttcatgcattgctggttgatgctaaaggacgaaatgaagtggacaactcaattggtcgggcgtcaactaattctgagtccaacaaggcaacaagtgagaagccatgcactgagaaccattaacaacataactcacttcgggtccattccctgtggagaggtcgtcgaacacgggagagatataacaccctaaatctaggaaaaataaaggatgctttaaatatgtgattatggcaagatttgtttatttaaattcatatttgagaacataa

SEQ ID NO: 31429 - DNA, 3971 bp, Zea Mays
gttttggcttctgggagagacccacgacgctccattcccccacgaaatgagactccgcgcgcaaaagccccgtttctcgccgcgcgcgagaaaaccctaccttttcccgccacccgcgcgcatttagtcgagcacatagtccgcaccccacatcaccaccgccaccatcagaacctctacgcaccgggtatcgaacgcatctacgatggagggcgacgacttcacgccggagggcggcaagctccccgagttcaagctagatgcgagacaagcgcagggtttcatctccttcttcaagaagctgccgcaggatccccgggccgttcgtctcttcgatcgcagggattattacactgcccatggcgagaatgctacgtttatcgcaaggacatactaccacacaatgtctgccttacgtcaactaggtagcagctctgatggaatcttaagtgccagcgtgagcaaggctatgtttgagaccattgcccgcaacattttgttggaaaggactgactgtacattggaactctatgagggaagtgggtcaaattggaggttaacaaagtccggaacacctggaaatattggtagttttgaagacattctgtttgcaaacaatgacatggaagattcaccagtgattgttgctttgtttccagcgtgccgggaaagtcagctgtatgtagggcttagttttttggatatgaccaataggaagcttgggttggctgagtttcccgaagatagccgattcactaatgttgaatcagctcttgttgcattaggttgcaaggagtgtcttctcccagcagattgtgaaaaatccattgacctaaacccccttcaagacgtcattagtaactgtaatgttctgttgactgagaaaaagaaggctgacttcaaatccagggatctcgcacaagatcttggtagaataatcaggggttctgttgagcctgtacgtgatctactatctcagtttgactatgctcttggtccccttggagctcttttatcttatgccgagttgctagcagatgacactaactatggaaattacacaattgagaagtacaatttgaactgctacatgcgacttgattctgctgcagttcgagcattaaacattgcagaagggaaaactgatgtaaacaagaacttcagtttgtttggtttgatgaacagaacttgtactgttgggatgggaaaaagattgctgaacagatggctgaaacaacctctattagatgttaatgaaattaataaccgactagacatggttcaggcttttgtagaagacccagaacttcgtcagggactccggcaacaacttaaaaggatatcagatattgatcgtctaacacatagtctccgaaagaaatcagctaatctgcagcctgttgttaagctttatcagtcctgtagcagaatcccatacatcaagggcattcttcagcaatataatggccaattttcaacattgataaggtcaaagtttcttgaaccgttagaagaatggatggcaaagaatcgatttggtcggttttcttctcttgttgagacagctattgatcttgctcagctggagaatggagagtacagaatatctcctctatattcttctgacttgggtgtactaaaggatgagctttctgtggttgaaaaccacataaacaatctgcacgtggatacagctagtgatctggatctttctgttgataagcaactgaagctagaaaaaggatcccttggacatgtgttcagaatgtcaaagaaagaggaacagaaagtcaggaagaaactcactggcagctacttaatcatagaaactcgtaaagatggtgtaaagttcacaaattctaagctgaaaaatctaagtgatcaataccaggcattgtttggtgagtacacaagttgtcagaaaaaggtggttggtgatgtagtgagggtttcaggcacattctcagaggtatttgaaaattttgctgcagttctgtcggagttggatgttttacaaagttttgctgatttggcaactagttgcccagttccttatgttaggccagacatcactgcgtcggatgaaggagatattgttctactgggtagcagacatccttgtctagaggcacaagatggtgttaactttatacccaatgattgcactctggtgagagggaaaagttggtttcagatcatcactggaccaaacatgggaggaaaatccacatttataagacagatagtcatatggggtgactcattgagtagttgtattcatacatatttgatccaagaacttcacacaagtagatgggttgcccagaaattaaattgttcacgattgcaaaagggctttgctatgacccaaaatgttgctggtacaaaaaagtcagctgtatgagcatgtatatgtgattccttgatatactctttgaaaagttgatgtaaacgaggtctgttatcccaagattccagtaaagagtttgaaagttctgcaactccttgatcaatgtgtttggagaaactgaaacaaagtttgattcaattggagtgcatatggacatgctaaacatattgtgggaagttcctcgagctgcatcttctaattcttggacgatggctactgaatttaatatatattttcaaacattttatttgaaacaactaataatacctttttctgcttacattccttcatctatcagcttgtctcaattaattttcatatgagaatcaggttggtgtaaatgtattgatggcacaagttggttcctttgtaccttgtgatcaagcaagcattagtgtgagggattgtatttttgctcgtgttggcgctggtgattgccaacttcatggtgtatcaacttttatgcaagaaatgcttgaaacagcatccatcctaaaaggcgcctctgataagtctcttataattattgatgagctggggcgtggaacttccacatatgatggatttggtcttgcatgggctatctgtgagcatcttatggaagtgactcgagcgcctaccttgtttgcaacccatttccatgaactaactgcattagcacatagaaatgatgatgagcaccaacacatttcagacatcggagttgcaaattatcacgtgggtgctcacatagacccattaagtaggaagttaactatgctttacaaggttgaacctggtgcatgcgaccaaagttttggtattcatgttgcagaatttgctaattttccagaagctgttgttgcccttgcgaaaagcaaagcagcagagttagaagacttttctactacacctaccttttccgatgatttgaaagacgaggttggatcaaagcgcaagagggtatttagcccagatgacatcaccagaggagctgcacgggctcggcttttccttgaggaattcgccgcattgcctatggatgagatggatgggagcaagatcttggagatggccaccaagatgaaagctgacttgcagaaagatgcagctgacaatccttggctccagcagttcttctgaagctaattaatccccgcgtgtatggaggcaagaccatgagagaacctcgctgatgctaggatctcctgatccattttgttaatacgcatcagcagatgtactctagtctttaggcttagccgacagtgcaacagggaaaaccatgtgcatatttaacgcggcggtagtgctgctactcctgcataccgttcgggtgcagctactctgctctgccgttctgccccgtctgtgattgcacgccgtcctttacagccgtgaagtctgctgtgccagtctcgtcgaagcttgaagtttctgcacgtctattggctattgctgtgctgcttgtctagcaaaattctttcagtgcaagtagggattgatagtttgtagagattgttgggattttgtcgaggatggcctcacaacgacctttaatcagcttttcaacccagccata

SEQ ID NO: 31430 - DNA, 1900 bp, Zea Mays
caccgacccagcacagcagtccgagaggcgagcgaccgaaccagcctgctctctcgctcgagaagcctcctccgctccgccgtccgcccctcgcctcaccagtccgcattccggcgcacacgcccattaaaataccgcgtccaatctccgccctgcgctcgtccctcatgcccgcctcgcggctcacagtgcgcgtgtgccaccatgctcggcgcggcgctccgcctccgcgtccgcgtgctccgccgccgccgctcccaccgcgggcgccgtcgaggcaggcggtctctcggtcgggtcggggatgacgacgacgacgagggaggccgggagccggtgctgctagtgtccgggatgggcggctccgtgctgcacgcgcgccgccggtccaactccaagttcgacctccgggtctgggtgcgcatcctcttcgccaacctcgacttcaagaagtacctctggtcgctctacaacgccgataccgggtatgtggagccgctggacgacgatgtggagattgtcgtgccggaggacgaccacggcctgtttgccatcgacattcttgatccttcctggtttgtagaacttctccatctgtctatggtgtatcacttccatggtatgattgatatgctcataaactgtggatatgagaaagggaccacactatttggatatggttatgattttcgccaaagcaacagacaaagcgatggctggtttgagagcaaaacttgagacagcttataagacctctggagggaaaaaagttaatttaatctcacattctatgggtggattgctagtacgctgcttcatgtctatgaatcatgatgtattcactaagtatgtcaacaaatggatttgcattgcttgtccattccaaggtgcccccggatgcatcaatgattctctacttactggattgcaatttgtttatggttttgagagcttctttttcgtatctagatgggcaatgcaccaattgcttgtcgaatgcccatcaatctatgaaatgttaccgaatccagaattcaagtggaaggaaaaaccaattattcaggtttggcgtaagaaccctgaaaaggatggaactgtggagcttgttcaatatgaagcaactgattgtgtgtccttgttcgaagaagctttaaggaataatgagctcacgtataacggaaagaaagtagcactaccattcaatatgtcagtcttcaaatgggccaccaagactcgccaaatcctagacaatgctgaattaccagatactgtgagcttttacaatatatacgggacatcttatgaaactccatacgatgtatgctatggctcagaaagctctccgattggagatttgtcagaagtgtgtcacacagtgccgtcatacacttatgtggatggagattgcacggttcccatagaatcggcacgggctgatgggttctctgcgaaagaaagagttggcgtcaaggccgaccaccgtggcctgctgtccgatgagaacgtattcaagcttctcaagaaatggctcggtgtgagcgagaagaagtcagagtggcgttgcgtgtctaaatcctactccaaagtgggtaattgggttgccctgtagttcttcaggaagactgttattttggcctttcctcctgaagagaagatgaaacaaaattctggtgattgtattgtatgtctgcacgatgtaaatccctgcgagctgcacggaacaagggattagtgccccttgtacgatgtatcattgccagacatttcttttgaagcctagggtcatatattcattgccccttccaactttggagcatagtaaatgaataatatgaaatcgatcataatttcagaagtgttctgtatttggattagaatgttaatttgcccataacggtgg

SEQ ID NO: 31431 - DNA, 2423 bp, Zea Mays
ttttgaggagtttctctgctagtacaatccaattgactgtacattgatctctaatatttgttgccaatatctttcatagaaacattgaaaaattcctcaagtacagtgtcggttcattggacatgttccatgtgcacattcagtaatcatgaaagcatggtgtactgtgagatgtgtggtgttttccgtgagacctttgtcaaatctgccaaggatggtctgttaaaagatacagccgttgcagtgtcaagtgagcctaggacatctgctgcgtcaaaaaacgattctgccaaggcgccagtgaagactcgtgctgtaaattctgatggtgattctatgagaaagcatgctagcatgtcttatgataaagccaattccacgcagttaccatctgctggtagctcactaggtgctgaaaaaaagaagaaaacccctgtactttctgaagaagtacctgtggagaggatagctctgttggcttccgatggttttcagtcaaagggtaaccagaatagcggggctagcagttcttcgcagaatgacaatgtgatccagaaactctcttctgacgtaggccagctaaatgtaaacaagaacaatgtgaatgttacgaaatcttgtttgcctgatgagtataagcctgagaagtggatgttagctgatctggagtcaagggcgttgagccaactgaaccttgcaatagtcggtcatgttgattccggcaagtcgacactatctgggagattactgcatctcttaggaaggatatcaaaaaaatatatgcacaagaatgaaaaggagtcgaaagaaaaggtatgttgatcctctttcatataagccactctatttcttcatgtgtgttttatattccatttttaggggaaggggtcatttgcttttgcatgggccatggatgagagcagtgaagaaagggaacggggtgtgacaatgactgtggctgtggcttatttggagaccaagaaattccgtgtggttttgcttgactcacctggtcacaaagattttgtgccaaatatgatatctggtgcaacacaagctgatgcagctattcttgtcgttgatgcttcaactggttcttttgaagctggcatggatggcgaaggaggaaaaagtgttggccagactaaagagcatgctcagcttgttagaagctttggtgttgaacagcttgttgtcgcagtcaacaagatggatgctgttgattatgcaaaagaaaggtttgatttcatcaagctacaacttggtagtttcctgcggtcatgcaacttcaaggactcagctattacctggattcctcttagtgctgtagaaaaccaaaatttgatcaaagctccttcagatgctcgtttgacctcctggacaattggcagcttatggaaaattggaaactggagccatccaaattggttctaaggtgttagttctaccttctgggcaagaggcgactgtgaaagccattgagcgggactctaattcatgcaccgtagcgagagctggtgataatgtggcaatttgtttacagggtattgatggaaaacaactaatacctggcggggttctttgtcaccctggtttccctgtgcctgtagctaaccacttggagctgaaggttctagtcctggacatcactactcctattcttgttggctctcaggtggagtttcacatacatcatgtgaaggaggctgcaagagtaacaaaaattgttgcattacttgacaagactggcaaaccaagtaaatcggcacctcgatttcttaaatccaagcagaattctgttatacaggtcacactagatggagctgtctgtgttcaggaattctccaagagccgagctcttgggagggcatacttgaggtcggctgggcgcaccattgctgttggcgttgttaatcggataattggccaagatcagaactagaagacctactacactcttctgaaatctgaaccaaatccttgtcgttgccttgtcgttgctacggttatactctacgtagtagacactggcaacatgatgttgggaaattttgtttagcagctgcttatagccattccattgtattgagttatatgtgtaagatagtagtcacagctgagttgtgttctaacccccggcttttgcaaaaatgctatggaatccttcgaagttatatatgctgactacttgtgattcgtgaccgctgattcgttatcgttcattactatatgtagtggacccaagtaaaacgatgttggcaaattttgtttagcatttgcatatcttcattctcattgtacttagatgtgtgtaagatggtcacagactcagctgagttttgatttctaatccttgacttttttttggagaagtgctatggaattccctcgaaatgctgaagttttgtgatttgagagttgag

SEQ ID NO: 31432 - DNA, 1550 bp, Zea Mays
cccccagctcccaccgccggcccaccacccccactccaccgcagccaaagcggactcgcgcgactgtgcctcccgcccacacacgcacgcacgtcgcacgggcgtgtgggcatgcagatcctacgcctgctcgcggcgcggcgtttccgccgccgccgccgccgcccggtgtccacgatcactgcgacggcgaccgcgccagtcacccctcgcggcggtgccgccggaggctgcatgtacgggtacggcgaggaggaggatgagggcccgttcttcgacctggacctgacctgctgctccgcgcccgcgtccagcgcgggcagccaggcggccgagtcgggctccgagtccgaggacacctcgtcctgcggcgccgccgccgacggcggcgccgccgcgcgcagcgacctggacttcgtcatatcgctgcaccgtagccgcccgtcgtcgccctcgtacgaggagcgcctcttctgccgcggcgccgcgccggcgcggcccccgccgctcatgttctgcgcgtccgagccgagcgacgccgcgtcgcgctcgcgcgcccgcgacagcagcggcggcggccggctgcggctccggacgctcagcttcgggtccgccaaggctgccttctccggcgggcgcgccagcttctcccggagcaccagcggcgcgcgctcggcgaggctcttcgccgcgtacgaccaggacctgccggacgagggaagggcgctcaggccgccctccggcgacgtcatccgccgctacctgagcaagatctcgagccggctgcggcgcgtgggcgtgggcgttggcgtgtctcatcccgctgccgctacggacctccggctgaggaagagccgctcggcctccgccgcgcaggcgtcctcgacggcccagtcgccgccgccccgacgcgacgactcgctagccgagaagcaggacggcatcgccagcgccatcgcgcactgcaaggagtccctccaccgaggtccgtgtcggaggcggtggacacgtcgctggcgcgatcgcggagcgacccagggccgtaatctgtaaagcttcgtcgtggacgaggacgctgggttttctcatccggcgccacgccatgctcgccactccgctccgggacggcggcggcggccgaagcttcgcgctgaatctcctcgcgaaggacgcgacgaaaagacgacgaacttgccgccgcaagtacgggttgctaaaggctcgtgacgaacatgcagcgggcggagcgcctttagcccgccgtaggcttgtttatgtgtgcgaaggagctcttttcgtggttttaggcgtgggaaaagagctccttttaggatcctttagccactaccttccctccctccccccatgtacaagcgtggatctgtgtcgcttcattaccttttcttcttttttttttcccgttcagttttctctctttttttcggttcgacgctttgtacgagagacttgcaacaggacgtgtaattagtacgtactagtagctaggtgctcatccttatgcaaacttaacatgttgggttcgttgtgtc

SEQ ID NO: 31433 - DNA, 1584 bp, Zea Mays
atgaatgatgccattcgtacctatctctcgatggttataagggatacctcttattttggaaaaataaaatggcttagcctgatccggagacattggtttgataggttttgtcatgtttgggctgctttcgatttatttgtagggtctgtttcgtgggtgtcgtccgcgccggagcagtttgcactctgaagcgggttacaaccttacagggagaaaggacatagtttagcaggtccatctcacccaattccccagccatccggccttgtttcagcagacaccgaacattgtggaggagctcaaacttgcaagggacatttatgagcatgctgttgttttgagtatgaaatttgaggaccaagatgcgtttgaacgcaatttctgccagctgaagccttattacgtggatacatggttagttctttgtcacccaatttgtcgattttattttcctttattattttgatttctatttttttaggctgaattcatgtgatgcttcaggtaataaaaagtttaaagctgattgcgaaaggcatatttttcttatgcacaagcattattaaattggttgtggctgcatttgtaaattgagatactaaactagtggaagcaaaggacttatttgagttgtttaactagtctaagtgaaaactaaacccaacgtttctgtcagacccatcagattatcaagtacttttaagtattaactaaaagaatagcccgcacattgttgtgggactttcttagaaataaatttggtatatgcatatcgttactgtatgttctctggatactatgtatgtatatttatgatattgactcgcatgttattttattgcaacagatctggtaaaaaaggcaagctaatggaagaaaagccaatagaatattagagatcacattatagaaagataggatgatgaaacaaataacatatgttgataacttgtacattgatagattaaagattaaaagtattgtgcataatagggatgacgcggatatttttttataatcatcaaaggatggcattgacagtttgcatgaaagggtagcaagttagtagggcatttagtggggaagatgtggacaccttgcatgaagagagagatatagaacatctagtggggattagctttatagagtatatagataaattcataagcttccactattgctcgacgtcccggtgccccccccccacctctgttcattatccttggtcttcacctccacctgtacctacatctccatctaccgaacatcagacccctccaactaccttaccgacgcatgaacaagatggcgagttagacttagtagaaaccctcttcactagtggaggtatcgaccatcactcttcactgtaacccgatggtgatcagcgaccgtgagcttccatgttattgcgttatgatacttgagacttttattatgactatgtatgagatattgtctcttattagtactggatgatgagatgtgtcttattatgactatggatgagacttttgtgatgtaattgatgagactatggatgagacttttgtgatgtaattgatgagactatggatttaaata

SEQ ID NO: 31434 - DNA, 1076 bp, Zea Mays
ctttctcctctctctctcttacctgcgggcccaccccacaggcgtctcttctgcctcccctctctatcttcccacgccgtcgccaggaaaccagggtgcgcgcgccgcgcagcatgcacccctggccgtccagctcgacagcagccaagccgccacgcccaggcacgcaccgaccggcgcccaggccgatgccctgcccctgcgcgcccgcacaaccgaccgcctgacccgcgacaccgacgcgccaggagcagctgatgccgctttgtttaggtaattgagtttgttctttttaaagaccacttgcatcgctccatgcaatatctttctgcaaaatcagattctattatgctacatctgaagtagaagatgaactctcttgatgaagtagaggtgaggccacccttgtcgatttgaaagcattgctttggcccaaatttttattttgctatatggatgcacgtgttgatgtatatataagcaaatgtatcattttttgtgttctgcctctaaccattctgaacatgtaattttggattcttaatttatgtattggtgctacctggttatgttatcaattgctattatgagaggatatattgatgcttgacaattcaaatatttgttgctaacttgaagattgttattttacttctcattgcagtctattctagaaagtgtgagccatggaacaaagctggttgaaaaaagaactacatgcatttaccccgtttttgtttggtttcatcttattctttctttcagacgctttattgtaggtggttcggagttctgtgtatcacaagagacatctaggttgacctcactcttcttagtgttcatgcccactatgcaggacaacaccgcaacactgatggagttggacgatttcatcaggctggactgtatctggatgggatggactctactcgtaagtagagagagtgcttgtcttgtgtaatacccaaaagtgtaaacagtgaaaatagagatgagctcaatattttgtgacctatatttatcatctcatgtgaacacttcatttaaaagtaaataatcaataaaggacatatcac

SEQ ID NO: 31435 - DNA, 1175 bp, Zea Mays
ttgtcttcccgaaatttcttatacctttgcatgcaagaaagcaagaaatgtgttagatggactcttcgagtaacaagtattcatggcctccgagcaccattgccatttcttcagtctgtcaaggtttcctttccagaaagacctgatctgaagtctgtagtgcttaaagagcaaccattctctttgcagagggaaacatcgatgaacaaaccatttttcatgctgttgacattaaatttcagtgatggttgcagctgtttgagctcctcaattggatggcctgttgattttcagaagcgaaaagacagcttcgtcagagatagagctctagtcctacgggagttgtactctgctgcacagcgcgagtcttgcattgggcaacaagaaattctggaaagagagaacctaccaagagctgagacgtctattcatggaatcgtgacaaacatcgttaggtatgacactgaagatgaaaagttggctccacccaagaatgatttgatgaatcacagccgcagcaaccctgcaaaacggcacgtggaaggcactgattgccactcgtcattgccaaagaaactgaagtactttttgaaagacaagaagctgaactgctaaaagtgtaaaaccgtagaaggtagatagagaatgctgtaggtttgtttattttggttattagacgagttatacgtagcatagatgcatgggaagttcgcatgctaaggttgaactcttctgctgcataggaaagttggctgacttcttatattatgcgagcctagcttaggtacctcctgtggggagaagcgattgcaatacatggtagcatgttgtagagctcctcaccccagttagtcagtgactgatgatggtatcctcttaccagtcctctggtggtatcatcttttgttcacggaggtcgatgaagtactgcctccgataaaaaaaagacgcttttgacattattgctccccaaattcttattttgacggctatactttgcccagcgagtaatatctaataaatatacgttttaacgcaattacatttttttttgtccaagaaaaatatttttggaagctgttgaaggtcaagtgtcaaaattttggatagacgttgacgtagtaggttgagagcaggtacttgcgtgcttcccctgtgaagttttgtttcataat

SEQ ID NO: 31436 - DNA, 1619 bp, Zea Mays
atcaacaaacaaacaaacaacgcgcaattccctagttctctcgtgaccgccttccctcctctcctgcgtcccaactgggcaattccccaaacctaactaacctttgccaccgcgggagccaccatgggtggccagatgccggacgccgacgggaaggcccgctcggcggactcctcgtcctcttacgggtacccgccgtcggcgccgccgcagcaccagtacggcacctttggtcccccatccggagcctccggggagtttccgcagccggcggtcgggttcccccagccggcggcgccgcctgggatgcagcactacccgcagcctcctccggcgtcgtatgccgtctacccacccccgcagcaaccctactcggccgccgcgccgtactacgcccaaggctaccagatcgctcaaggtacggaagcgccttacgaggcgctgcatcccggttcattttttttcataggatcgatcaacgggaggcgttcttttgaccgaggagtcttgtgtggctgattcatcgtgtagatcttttcaatcgcctaacccctttgcttatttgcattacattgtaagctcaaaatttaggtgttgtcctgcccagctgtcttcctgtttatctcctgtgtatctgaatctgcagttcctgctgcatccctttttttttccccatcacttctaagttgcaggccaacggcgttggtgttgctcatcccaaattagacacttgagatcggtagttcatggagttcgagggaaactgaatttctctttgaacttcgaagtgttctgaaatgttaaagtaaatgagcaggaaatttgatttgtaggaacaaccaaatatatgcagggcagttcattttcagcgaaggattgcataaataattcaactctccaaataaatccgtaaaatgaataattcagtatataatttatatttatgttcgaaatggtggaagatatgaagtcaacaactacactggaactttgactgaacttgggtaattatttgtttgcattttggtgctttgtaggttatattcctgttgttgaaggaaggcctgttagaatccgtcctcttccatgttgtggccttggcatggggtggtttctgtttataattgggttcttctttgctgccattccatggtatcttggagcttttgtgctgatttgtgtccgagtacgtgattacagggagaaaccaggatatgttgcttgcactattgctgcctcgcttgctgcaattgctgtgctgcttggcgccacaaaaggagcggaggtgtggtgagcattatgccttcaattaccagcagtccggttaatgtaaatgtccgttgctcggctactttgttacctgtgttgtacatgtgttgtgcgtacaaaggatagggtgtaacgaaaatgatgtatgctcctatttgtagttggacatatacatttgacaaacggagtagcatgaatgcacaccctcattaatcatttgatgtaaaatttactggaatgccaccatgttatggtagtctggtcgacaatatatccatgagtaccgttgagaccttttcgtacttttgacatgggatgatgggaacacatgtcactagtgtcaatagcag

SEQ ID NO: 31437 - DNA, 4455 bp, Zea Mays
cggaattccatgttagcaaactgcgttgtcgagagggcttcaggcttctgcttcaccgtgctcctcccagcccagcgccgacgccgagctccccttccttgaaccgccggccgtgccaacccgcgactcgctggagtaggcggtacgattaattcgaccagacgcggccgcggatcctaaacgatactaaggttattttggctgtgcatatcacgttgtagagttctgggtttttgctctgaagaacaaaatggacaatgctcagagtgacaaccgaactgataccaagcaagatgatgatgcgcgccaaagcaaacaggatgatgaggaggcccgccttgaagaatataaaaagatcattgatcaaaagatttccctccgccggagcaaccaaaaccctgaaaggcctgatgcaaactacctgagaaccctggactctagtattaagcgcaatacaaccgttataaagaagttgaagacaataaatgatgaacagaaggatgtgataatggatgagttaaaaagtgtgaatttgagtaaatttgtcagcgaagcagtttcttacatttgtgaggccaaacttcgctccgctgatatacaagctgctgttcaggtttgctcgctccttcatcaaagatacaaggacttctctccttgtcttatagaaggtctactgaagatcttctttcctggaaaatctggagatgatttggatgcagataaaaattcgagagccatgaagaagagaagcacattgaaacttttgattgaactatattttgttggaattgtcgaagatgctagcatatttgtaaatattataaaagatcttacatcagcagaacatttgaaggaccgtgaaggaactcaaacaaacctatctcttctatctacctttgctcgtcaagggaagttttttgtagggctacaacctcatggtcaagaagcttatgacgagttctttaaggacctaaatgttactgctgagcagaagaagttctttaagaaagccttgaactcttactatgatgctgtagctgaactactacaatcagaacatgcgtctcttcgtctaatggaggcggagaatgcaaaagttttaagtgccaaaggtgaactaagtgatgagaacacatcctcatatgagaaactcaggaagtcttttgatcagttactacgtggtgtttcctcgttggctgaatctcttgacatgcaacctccagtgatgccagatgatggaaatacaacaagagttactacaggaaccgatgcgttgccttcttctggaaaagaatcatctgcattggaacctatctgggatgatgaagataccaaagctttttatgaatctttacctgatctcagagcatttgtgccagctgtattactgggagaggttgaaccaaaatcaaatgagcaacatgttaagggccgtgagctatctggtgagtccacttcagaacaagagactgaactacatgacaatgttccaacttctgccactgaacgtcaactagaagttaaagtagatgatctagtgaaagagagtgaagacagagataaagagaaggggaaggatggagaaaaggaaaaatccaaggagaaggatctggataagaaaaatgaaagagagaaggagaaaggaagagtcttggatggcgcaagtctggataacctcctgcagaggctgccaggatgtgtcagtcgtgatctcattgatcaattgacggttgagttttgctacctaaattctaaagcaaatcgaaagaaacttgtgcgtgccttattcaatgttaataggacttcactggaactgttgccatactattctcgtttggttgcaacactctcaacctgtatgaaagatgttccaagtatgcttctgtctatgcttgaagaggagttcaactttttaataaataagaaggaccagatcaacatagaaacaaaaataaaaaatatacggtttatcggggagttgtgcaagttcaaaatggctcctccagctcttgtttttagctgtttgaaggcctgccttgatgatttcagtcatcataatattgatgtggcttgcaaccttcttgagacttgtggtcgttttttgtatcgctcacctgaaactaccattcgcatggctaacatgctggagatactgatgagattgaaaaatgtcaagaatttggattcacgccacagtacacttgtagaaaacgcctactacctttgtaaaccgcccgaaagatctgcgcggatatcgaaagttcggccaccgttgcatcaatacataagaaagttgcttttctcagatcttgacaaatcaagtgttgaacatgttttgcgccaactacgcaaattaccttgggcagagtgtcaacaataccttctgaagtgctttctaaaggttcacaaaggaaagtacagccaagttcatctgattgctcttctcactgctagtctcagccgctatcacgatgactttgctgtctcagtggtagatgaggttttagaagagataagggttggattggagttgaatgactatgggatgcaacaaaggaggcttgcccacatgcggttccttggagagctatacagctacaagcatatagattcatcagttgtttttgatacactgtaccttatcattgtgtttggtcatggaactccggaacaagatgtgctggatccaccagaagattgtttcagaatcaggttgatcattacacttctacagacctgtggtcactatttcagtaaggggtcttcaaaaaggaagctcgacaaattcttgctacactttcaaagatacattattagtaaagggcccttaccactcgacatagagtttgacattcaggatttatttggtgagctacgaccaaccatgtctaggtattcgtcaattgaggaacttgttgccgcgttagttgagtttgaagaaaatgaacgttcagccccagtagaaaaggttgaaaatgaaagacactccgacaatgaatctcagaaaagacactcgcgagatgctggtccatctgtgaatggtgaaagcgctgcaaatggaaccgaggaaaatggcaaggctcatgaagtagcagatagtgagagctattcagatactggcagcattgatggacgggaagaagaggaggatatattatctgaggataaatcaaatgatggctcagataacgaaggcgacgatgaagatgatggcattcctgttgtttctgatgaagatgaaaatgttgaggttagacagaaagtcatgaatgttgatcctaaggagcaagaagacttcgatcgagagctcaaagcccttcttcaggagagcttggagtctcgtaaatcagaggcccgttcaaggctccctttgaatatgatggtgccgatgaacgtcctcgagggttcaaaagactcaagggccacagaatctgagagtggagaagaaacagtagacgaagagggtgggaatgctgggggtagcagcaaggtgcgtgtgaaggtgctaatgaagaaaggacacaagcaacagacaagacaaatgttaattccggccgatagttcaattgtgcaaagcacgaagcagcaggaagctgctgagcttgaggagaagcagagcatcaagcggaggatccttgagtacaatgagagggaggaagaattgaatggagcatcccaaatggggaactggggccaaggagctaccagtaccagcagtatcagatcaggtggccggggcagctgggatggttcagcacggggaggtggtcgacaacggcaccacataacgggttctggtggtttctaccacagttatggcaggagaagataagttcgcctgtgtgagctatttcgccctgagccttttggcaggtagaaagcatcctagtctgacaaattgcctctagcaaatgagattagcgtttaacacagcttgatggacaattgcctctagcaccctagtctgaaaataagacaattctaccactggtcatgggagatagcaatgccttgagaaggagctgcaaatctgatggtcctaatggcttgagttgctacggtgtttggtaaagctggttgtgatggctgtacccggatacatgcgcatactgtttcgacgccatgtagggggtatctggtcaaagttcgctgtctgatgcctgttctaatttagtggagtattactggcaatgtggtacaagcatcttgtcttgaaaatcgaaaactgcacggtatgtgtgcgccattttttgtctgatgaggtgtgttccatgcgtgtatttcatatgtagctacaccaatcgcgtgtccaccgaacgatgctaacttgctatgccgatggagcatgctttctacccgcatcgcaacccgcaaatccttgtccagtcgtttgtcttccatccaggaatgataccgagttctcatgtcacgcttgacgcttctttccgtcctgct

SEQ ID NO: 31438 - DNA, 1229 bp, Zea Mays
aaaaaaacgaacagttccttactacaatagcaagtactagcgatctagcgtgcatcgccagcccgtcccactatcgcctctcctctcattctctcgtgctctccacccgtttcccgcaaaaccctagctctgcgacatgcaccgcggcggcgatcgctccggcggcccctcgagcggcggagaccgctctggagcccggttccagcggggtccctcccgctggtctggcagcagcggcggcggattagggggtagcccgcccaatcgctactcctcccgcggcgcggcagatggaggtggtggagggggcggtggcagtggcggtggcgggaggttccacccttaccgtggttcttccgactattctagcggcggtggagggtacagaggcggtagtggcgttggtaacgacttcggcgaccagaggcaacgttacggcggcggcaacagaggcggaggccgtggggatttccaagatcatgatagtagaagtaactatgtcaaactttttgtcggatctgttccgaggacagcgactgaagaagacgttcgtcctttatttgaggaacatggagatgttcttgaagttgctctaattaaggataggaagaccggtgaacaacaaggtttctgagaggttataggagcaacaaggttgcatcttctctcagttagattggcggttgttgattttcatttcctgcgcttccattctgtccgtctcctgtggattcagtagaagactagaatggacgcgactaactgcccgctgattactggaacctaactagccacaacttcactgctacacaaggcagcaaatttggtaccaacagctgtgtttagatgatattgaccttctggatgtcctgtagttctagaacaatgagcttgtagtttcacctttgcatctgtgtgccttgattttgttgcaagaacttatataatcttataatgaattaatacaaaattctcatcctctgcctttcatggtttaagatttattatccatgtaatcatgaattgcatatgatgtgggattccttaatgtaagcgattgaatccctcgatatgagttattggatgatgcggtatagctgcatattgctgtcacgattgatggcaggtggtgtgtggtgttgatgaccttctactgtttggaaattgtatgttgcgcaccgtcaatctagattcatctgatttgatggataccaatgttttcatgggtg

SEQ ID NO: 31439 - DNA, 1827 bp, Zea Mays
gccgagtgctctccacgcccgaacgcacgcacgcccgcgcacccgcggcaagacagaccagctgcgagaaagctagctcaggaacctcaggtggagcacgaacgacagatggaatcggccagggctgcggcggaccaggcggcgggtctggacgtggacaagctgacatacgagatcttctccatcctcgagagcaagttcctgttcggctacgacgaccccaagctcttctcgccggcctccgcgggggcctcgccgtcgccgggagcggcggcggcggccgccgcgtcgtccaaggtctgcatactgtcgatcgacggcggcggcggcggcgggcgggccgccgacgggctgctggccggcgccgcgctggtgcggctggaggcgtcgctgcggcggcgcacgggggacgacggcgccaggctggccgacttcttcgacgtggccgcggggtccggcgccggcggcgtgctggcggccatgctcgtcgcgcggggcgccgacggccgcccgcgcttctccgcggacgacgcgctcgcgttcctcctgcgcagcctccgccgcggctcgggcggcctgggcctgggcctgggcctgcgcgcgctgttcaagtccctccgccgcccgggcggcggcgccgcggcggcgttccgcggggtgttcggcgacctgacgctgcgggacacggtgcggccggttctggtgccgtgctacgacctgggcacggccgcgcccttcctcttctcgcgcgccgacgccgtggagacgcgcgcgtacgacttccgcctccgcgacgtgtgcgccgccacgtgcgcgggggactcggtggaggcgcgctcctgcgacgggtccacgcgcatcgccgcggtcggcggcggcgtggcgctcgccaaccccacggcggccgccatcacgcacgtgctcaacaaccggcgcgacttcccgctcgccgccggcgtcgacgacctgctcgtcgtctccatcggcagcggcgaggccgaccagcggggcgccgcctcctccgcgtcccagatcgtcaggatcgccgccgagggcgtcgccgacacggtggaccaggccgtggccatggcgttcgggcataacaggacaaccaactacatccgcatacagggacgccgcgaggggcgagccgtggcgccgccgcggaggcggaggagatgctggcgcagaggaacgtggagtcggtgctgttccgcgggaaggtggtggcggagcagaccaacgcggagaagctggagcggctggcgcacgagctggtcaaggagcgcgaccggcgcagggccagcgccagcgcgagccccgccgcggcggcgcctgcgctcgtcaagcaccaccggccgtcggcggcgccgtcgtactcgagcctcgtcagccacaccctcgcgagcatcatgtaggccgagagccgacccacagccggccgccagcagccaacggaatgggcccaactgtgagagaccaggtgtctagcctgctactgcgccatgtgcattcttcagttttgtatacgtactaaaaccgcagggcatgttgtgtagtgtagcgtaatccggcgtatcctcagctcggctgtatgtttgtatgtatctcgagaaagaaaaacggcttgtgagtttgagcagcagagctctgagcctctttgctctggacaaaccaaccaacaaaccaaccaaccctggatctggagaactatacatatacaggccaccaagtagctggtatcctatataatcaggagaggagtgactgtctctgttgtctttaacttgaaggcaggtaaacattgcaatgatagctgatgcgaag

SEQ ID NO: 31440 - DNA, 2486 bp, Zea Mays
cctcgctcgctcgccacttcccaatcaaaccgaggccgtcatccttatctgaatcgcgtgctttccagccctctgcccgctgtgccccacccccacgcccggcgacccgcaggccgcacccacccacccacccgcacccagcgccatgtccaccgcggccaccgcgtgcgccacgcgggcggcggcgcgtccgcccctcaacacggctccggcacgccgcgcgccgccttctgccgtgcgcccgccatcggccacccccgcccgccgcgccgccggctgttgcttctgcgccgccgcctcctcggcgtcgtcgccctccacctgggattggacccgatggagccgccacttcgacgaggtcgaccaggcggagagctacgcatccctcctccagttccagctagaggaggcggtggagaacgaggatttcgcggaggccgccaaactcaagagggacatcatagaggccaccggaaacgacgctgtagcccacgtcatggccgagctcaagaatgctatagaggaacagcggtaccaggacgcgtcaaggttgacaaggcttgctgggaccagcttggtaggttggtgggtgggatatgctaaggacactgatgattccatcgggagaattgtacgaataagccctggtgtcgggagatatgtggcgaagagctacaacccaaggcaattggtcactgcatcttcaggaactccattatttgaaattttccttgtcaaagaagatgatgagacatatacaatgaaggtggtacacatgcgaccaacaaaaggaacttcaggtgcaccatccatatcatcaacaataacagaaagcccagcaaaggtagagaatgaaaattcatcagaaagtagtgctatatctgacagtgttacagaggaggcaaatacagatactacggtaagaggaaatgaggatgctgaagagaaagcacaagatgttggtagcagcaaggatagtagtgtcgaaggattaaaaagtgttttgaatttttttaagtctcggattcctgaattcaaagttcaggtgataaatgttgatgtggctgaggaaactgaattagctgcaaattcgtctgaagaattagtgcaagatgatgtgaaaagtactccagaaagctcattggaagagccagccactgaggaactcgagcaggaggaagatgttccggaagaaaatacggatgaagaaagtaaaagcacggaagtgaagctttttattagtggagtggttcacaataaagaagatgctggagcaaaatcatatgttcgagttccagctgaaataaataacatggaaaaggactcctttgaactgtacattcctggagaaggttctgatcgtgatttggctgaaacaaaggctgcaaaacagaaagttgcagatatggctgctaaattagcctcagagcttatgccgtctgatgttgccaaggcattatggggtacagccaagagttcttcaaagataaataaagaagttcaggagcttttaaggcttacgttaagcaaggcccgagtcaagctgaccgaaaataccatttttaaacgaatcattatggacactaacagcacagatccatttaatggtctctatgtgggagcatttagtccatatggaccagaaattgtgcagcttcgtcggaagttcggccactggaacagtactgatgacgttgagtttttcgagtatgtcgaagcagtaaagttgactggtgatctgagtgttcctgctggccagataacgttccgtgctaagattgggaagggcaagcgacttgagaatcgaggagcatatccagaggaatttggtgtggtaatttcgtcctgccgatctgattgtttgaaagatgctaagatattgccagttacaaaggtcagggtagaatagctcagcctggattcaaaaatcctcgatgggtggatggtgagctgttggtactcaatggcaagagtacaattccacaccttggaggcgcagagctcggtttcctgtatagtgtacctgagcagagttttctggttctcttcgatcggcttaatcttcccgagtgatgagactcctaaagggagcagactcctcacatgtagattgcatgaacgcgcagaggccggccacagctccaagtgaccgaaacagagtgtgagggaaagtcgacaccattgctggtctaaactaacggaggagtcttaatactaataatatatatgttatagcatggtagtttgctctccaatgccacagttgtagctgtattgggtatgggcatgacagttttgcgagttttacccgtcatcgttgatttcagtaattaccgaattgaataaaaatcgttctggtgtatcgtgatgttacaattataataatataaaacaaggcaaataaagtctcatgatttatgatcgtttttctcttgtaatatggtcgagatacttttattcctgtcctattagattttgatattgac

SEQ ID NO: 31441 - DNA, 2124 bp, Zea Mays
accgagcaaaggcacttcaccgagtctcttggacttctctaaaatccggtccatgcgcggtaactttaagttgggtccacctccacacgaatcagcacgatagtgcgtagtggcaggctgccaagctcaatcaaggattctggactcagcatgccagtctcctctcgcggccctgttgtttgccggaaatccgctcggggaccccgcgcgcactagccatttttgcgctctacctccgcaccaaccatccgcggttagttcacttcccacactcccccacgccactgtttcagtgttcccctcaccacccgagccccaccaccagtccaccaccaccaccggcccgtgccccagccacaacaaggcgaaatcaggggtggtcacgccgagcgactacgcgaagacgcagtcggcgggggcgaagatctcccaacccacattgcgcgcgcgtctacgcccgaggatcgatggttggcggcggggggcgccgcgcggcgctggggcgctggtgcctggtgatcctggccgtggcctccgcgctaggggtctctggccccgccttctactggcgctacaagaagggcttctcctcctcctccccctcgtccaccgcggcggcggtggcttcttccccgtcgtgccctccctgcagctgcgactgcccggcgcccctttccctcaagtccatcgccccaggtgatctgtcctgttcagaccctctttccagatcttcctacagttctcgcctgatcagtgtcggtacgcatgtctacccataattcgttaggtaaaacaaaaaataataatctgtattttggtcgggactagggtcatcagatgaacgccatagcatatggtacagctgacgcatgcatatgggtagcaaataagctagttttagttgctgtgtctaatcgtctatgatgaaaactcccagttgcagctatgtccacattactgacaggaatttgtgtttattgcagggcttgccaacttctcaataacagattgtgggaaaaacaaccctgagcttgccaaagagatggagaagcaatttgtcgatcttcttaatgaggaactcaagctgcagcaggttgtagctgaggagcatagtcaccacatgaacgccactcttgtcgaagcaaaaagacaagctactcaataccagcgagaagccgaaaagtgtaatgcagctacagagacctgcgaggaagctcgggagcagtctgaagtagcaatttcaaaggagaagaaactcacagcaatgtgggaacagcgagctcggcaactgggttggcatgattctcgagccacgagcatgtgacagctttagttctgaattttcaggtgaaattatttctggtagctgcatgggttatgccttgcagccaaaccaaccggcgacgtttgtctatgtaatatcagtttccacgacaacattgttaattttgagtctcaacattatagttccagcttccttacaaatgtgactagcttgctgccgcctagatatctgaattttgtcatagtactgttgaaagccattttattaaggacatgtttgtttttctcctagattatataacctgaattatgacgaaagagtaagagggtaaaatatcactttgaaagcacaaataagctgaactaaactactcaatgccagcttatttatagttctaaagtgatatttttacccttctacccttacaccataatccaacttatataatctagaagggaaacaacagatctaagtgctgatttggtgacaaaagaatcactggggatggaagagggttaaaggagaaataaactaattttcctctcaatcccatctaattctcccgtgatctctggtcactaaaacagccctaagtgttgtggttgtggtttaatgccgaattgttggagaaacttaattcaaatctggatacaggatgtacagagtcttgatctatagcatcaatctggcggtacagcttacttgttgggtgacggaagtaccttcggaatataattgttgtatgtgttgacatattgatatattcttgtgggtcgaaggcctatttgttattatataatccagcttaaataagttaaaagataaacaaataacatata

SEQ ID NO: 31442 - DNA, 1791 bp, Zea Mays
gtcaggtcagtatgcatccaaacagcacaagagaaaacaactgatattggtgtgaggacactgtggaattctaaaactcatcagtttctttgaccaccacaatttacagcaaagaatttcttctggatgagagtacgagacagaagacaagttgccaaacattttctagtacggattgcacagccaagcgcaacatcgccaagctgcttgcgaattccataatataccgctacctcagcagtgaggaactgcttgaggatgttcttggtggcaaggacgccctcagagccttcaaggaatctgatgagaagggttatcttgaagtcgagaccgaagggttaaagcagctcacgtccatgggtagccttgtactgtgctgtggagatggcgccgttatgaactcaaccaatctagggctgctgaggcatggtgtctccatttggattgatgttcctcttgaaatggcagcaaatgacatgttgaagagcacgggaacacaagctactacagatccagactctttttctcaggcgatgagcaagctccgtcagcggtatgatgaactgaaagagcgctatggggtttctgatattactgtttcagtacaaagtaaagatagatcctcaaaccgcctgtccttcccgttgagttataattagtgctcatttgggttgagttatagttagtgctcatttggagccacctgactaaattttagtcccgttagatcaaatgtttgaatactagttagaatttttaaatatagtataattacaaaattaattacacagataaagactaaagataaggactaaacggtaagatgagtcaattaggcctgattagactattattcgtccatgtgatgctacaataaacatttgctaatcatggagtcattaggcttaatgaatttgtctcgtcgtttagtcttcatctatggaattagttttatagttagaccatatttaatacttgtaattggcattcaaacattcaatatgacacagactttagttaggggaacaaacacccctttagtaaatggtgaatataatcgggtgaactttttctgagatgcctcaacacctttcagatgtggcttctcagcgggggtacagtagcattgacttggtgacgcttgaggacatggtccttgaaatcgtgaggcaaatcgagaagctgatccgtgcaaaggagatgatggaagctgcagggaagccattctaaacaagatacacatacacaatagttctgctccggcatacctattttctggccagttaccagacctccgatgcttcgctgttcaagaaaccgattgcagttgcctacggctcaaagcacaagcgcgtgaaatctaaggaactgaatctggttgttccactcgaatatgcttatattgtattgcaagatcacttgccaattgatagtgcaaaaaatgcattttgtagtttggattctctagtattgactttaatccatatgtattgaagtagattggagtgtaacttaaactaatttacacactaatttaccttaacatatgtggattaggattaatactagagtgtccaaacaaagccttacgtgttaatctgccatggttgaattttgcaatggcagtttttcctatgcatggcctggccgccgaattagtagaatttagtgcaagaaggaaaaaaaaaatccgggaacacttttacaatcaacatgttgcaatgctaaacgaaggcttttacaccgagagattgacttgatcaatttacacggggagagaggtttcacgtg

SEQ ID NO: 31443 - DNA, 2527 bp, Zea Mays
aacgaacccaagcgacagacgggcagcgtggggaggccgccgccgttgcggtatataaacggacgctcgccgttgggggaccaaccgaagcagcgacagagctcttccctcccacacgctcggcgctctgtccgccagaaatctcgtcgctggtcagtgctctcacttttgctttgccgcgtaatcccgcacctcatttttatctccacgcccagccgcctgctttcggcgactccgaggtttctccgtccggttccgtcgtcgtcacagctacctttgctccggcccggtagaagagaatcgtgccatttgtcatgtcaggaggatcttcaccatcatcaaggcgaaacagctttaattctttgtctaaggacctagaccttccttcagagcaaggttgtctctccattgttgtacttggggcttctggtgaccttgctaagaagaaaacattcccagccctctaccacctctttgagcagggattcatacaatctggagaagtccatatatttggttatgctagatcaaatctttctgatgatgggttaagagaacgcattcgtgggtatctcaaaggagccccagaagatctttcagaatttttgcaactaataaaatatgtcagtggttcctatgatactggagaaggatttgagaaactgaacagggcaatatcagagtatgaggtgtcaaagagttcaggaagctatcgcaggctcttttatttggcattgcctccatctgtctacccttcagtgtgcaaaatgatcagaacatattgcatgaatccatcttctcaccctggatggaccagagtcattgttgagaagccctttggaaaggacttggattccgctgaagaattaagtgcccaacttggggagctattcgaggaacaccaactatacaggatagaccattacctgggaaaagagttggtccaaaacttgcttgttcttcgttttgccaaccgattattcttgcctctttggaaccgcgacaatattgataatatacaggtaagatcttttgtatttggtagctagcagttgggaacttcattttgctggtataagctctatgcacataaattgcagtccctttatcattcaagaatgtactctttagttctatacttctattcataagttgtttgacttggtccgttggtgattatagtagggagctattgtattctattgtaacaattgactacagtttgaaatgagtcaaactgaacctaagataactgaaagtacagtatcaatgacatggcatgctaattactacactgcagattgtattcagggaagactttggtactgaagggcgtggaggatattttgaccaatatggaatcattcgtgatatcattcagaatcatttactgcaggttttctgtttggttgcaatggaaaagcctgtctcccttaagcctgagcacatcagagatgagaaagtcaaggttctgcaatctgtgaaccctattaagcctgaagaggtagtccttgggcaatacgatggctacaaggatgaccctacagtgccagatgactcgaataccccaacttttgcatctgttgttcttcgggtacacaatgaaagatgggaaggtgttcctttcattcttaaagctggtaaagcattgagttcaaagaaagcagaagttcgggtgcaattcaaggatgtccctggtgacatttttagaagcaagaagcaaggaagaaatgagtttgttatacgcctccaaccatcagaagccatgtacatgaaactaactgttaagaagcctgggttagaaatggctactgaacaaagtgaacttgatctgtcatatgggatgcggtaccaaaatgtcaaaattcctgaggcatatgaacgccttatcttggatacaataagaggtgatcagcagcactttgttcgcagagatgagctacaggctgcttggaagatcttcactcctttgctgcatgacattgacgacggcaagctgaaggccctcccgtatgaacctggcagccggggacccaaggaagccgacgaattgagcgcgagagttggatacgtgcagacccacggttacatatgggtaccgccgacccttgcatagaagagaatacgaattgtttgtacctaggaagatccgagtgtcctacaataaagctgtgcgtatatgctcattttcgctatatcgcctgccgttgtaataatgttgtgctggatatgaaataaaattgcgtgttccattcagtatatgcaatggccagcgatggaatgttgttttaccctgcaataccgatgaactatatagaaaaaacatgacgggagatcatgtcatgctcatgcctcattttgaaggataaaaccaaatgataattatacgtgtatgatgatcaaccaatggccataagccagggcaagcaaaagaaacgaggagagaaaacaagagatgcaacagtttctctttcctattttcaagaggtgttttcttgttttaggctagtttggcaactctattttt

SEQ ID NO: 31444 - DNA, 1982 bp, Zea Mays
tggtatggatccaaatttccctttatgatttccctgcgagcacaaagctagcgaagataccaaacaatggggagcacgagcgccacaggcaccacgtcgtcttcctcatcggctgcccacgggggcggtgccgcacacgtactgctcctgccgtacccgggcgcgcagggccatacaaacccgctgctccagttcggccgctgcctcgcctaccacggcctccgccccacgctcgtcacctcgcggtacgtgctctccaccaccccgcctcccggggagcccttcagggtggccgccatctccgatggcttcgacgacggcggggcggccgcgtgccccgacctcgacgtgtactggcgccagctcgaggccgtcggctcggagacgctggcggagctgatccgctccgaggccgccgatgggcggcctgtgcgcgtgctggtttacgacccgcacctgccgtgggcgcgacgggtggcacaggcggccgggctggcggcagcggcgttcctatcgcagccatgcgccgtcgacgtcgtctacggggaggtgtgggcaggacggctgccactgccggtggtggacgggaaagagctgtttgcacgcgggctgctgggtgtcgagcttggtcccgacgacgttccgccgttcgcagcaaagccagactggtgccctgtgttccttcgggcatcactgcggcaatttgaggggctggaggacgccgacgacgtgctcgtcaactcattccacgagatcgaacccaaggtgaggtcaccgttaccacggccggcacctgtttgttgttttgcccaaatgaacttcggtgttgcatacacatcgtcatcgttcgtccacaatcacgtttattcactaaataatatatggttggtgtgtctgttgtgataatttgattccacttcaccatcataagcttttctttttgacgcatttgcaatgttaattatttgagcatgaggcagattatatggccctaacatggcatgcaaagacaataggcccaaccttgccatcattttatcttgatgatgaccgtttgccgttgaacaagacttacggtttcaacctcttcaacagcagcgagtcatgtctggcttggcttgacaaacagcttccgtgttctgttgttcttgtatcctatggtactgtctctgattatgatgaaacacagttagaggagcttggcaatggattgtacaattctggcaaaccattcatttgggttgtgaggtcaaacgaagaacacaagttgtccgatgaacttcgtgacaagtgcaaggaacgtggccttattgtttcttggtgcccccaactggaagttctagcacataaagctacaggttgtttcttcacacattgcggatggaactcgacactggaagcaattgttaatggtgtgccaatggtggcaataccacactgggcagaccagccgaccatatcaaaatatatggagagcatgtggggcttgggtgtccgggtgcgcaaggatgagaaaggcttggtaacgagggacgaggtggaaaggtgcatcaaggatgtcatggatggtgatagtaaggataagtataggaagagtgccactatgtggatgcaaaaggccaagtccgccatgcagaatggagggagctcggacaagaatattacagaattcgtcgcgaagtattctttaagttaattttcaaagatttcgtaaaaaagttatttttcaaaggtataatgatagtgttataattacttcctaccttcgtggattgtatgccttcctgcatgtgatatattttgtctcgggattgtgtgtattacgttttgacttgatgctgtacatgctacagcagcaacctccacgtctaaaaatatatacattgttacgcagctatcctttgtaactttatagtcacattattttgtaaaatgaacattatcatgtgcctagtatatgttatgttatattaaaatgggtt

SEQ ID NO: 31445 - DNA, 1228 bp, Zea Mays
acgcagggcccatgcacggttttgagacgagagcagctcagcagcatagcgccagccgccggattcctgcgcagcacgcacggacgccatcgaggaaccctaaccagagcacagcacacggagcgacggcggcgcgccaccggcgactggcggctggtgccccctctcggtccccactccccagcacggcgacggcctgctgcatcagatggtaaattatttttcagactcagagtgcaaaaaagttggttcgtccagggaagaggaatagaggttatgcttttgtgtgagcgtgttgctcttcagcggcggcggcggtgctggcattcttgctacctcagctctgccaggaaataaatcgcagcagcgcggaatttgtgtggagattcatgtttacgaatgcgcagcgccaggtcgagcgcaccggccgttctggcactccgcgagaccagtaccttcaggatctcgtgacccagttccagaacgccacggatgaagaatctaaggagaagatagttgctaacctggcaaattttgcttatgacccttttaattatgccttcatgcgccagctgaatgttctggagttattcttggactgcattacagagcctaatgaaaggcttatcgagttcggcattggtggaatatgtaactcctgtgttgatcctgcaaatgctttaatcattactcagtgtggtggaatcccattggttatacaatgcttatcgagcccagtgcggaatactgtgacttatgcgcttggggctttgtattacctttgtaacccttcgacaaagaaggagatcctgaaaccagatgtagttagtactataagagagtatgcttcagctggaactgtgaataacaactttagcaatctggctaatgctttcttggagaaacatgttgatccatgatatgacaattttacagggtagactaaagcttacacatttcgtgtacctgtggtgttttcatattctggatatgaactaaagaaactagagcttagatctcatgctttcattgttttgggcacgatgctttgcctggaattgagcaagggctcctttttagatgagagttatgcacagtttttcagttgggaagctaatttgtcatagttcagttttttcccagttatctgttggacgatttgaacattgtaaggccctgtttggaaacaaagtttttgaaaaccacagtttttaaaatactacagtat

SEQ ID NO: 31446 - DNA, 1658 bp, Zea Mays
cctcagttcctcaaccagcggccgaccgtcgaccgagaagcccgagcagcggtccgatcaggtgagcagcggcgcggctgctgcctgcccgcgcctgcctccgcggctccgccggccgtcgaccgagcagccgagcagaggcgcggcggctgcctgcccgcgctcgcctccgcggctccgctggccgtcgttcgccgacccgaacgccgagtcgcgcgagcgtgccggcgtgccccgcctctcgtcggctcgcgactgcgccagcgcggtcgcgccgccccaccccccggtgaccggcgtccggatccatccgtctggcaacccaaccggccaagggccaaccccgtccccggaccccgactccccgagggccaaccggccaaggcacaaccgctgaaccgcacaatgcagtgagagaccgaggtatttagtcgcctactcgcctaggcctattatttccctctcaaactcaaattcttcctggaatccaccaaagccctgcctcccctctactgattctgaaagtggagttccatctgcgcgtcggttgatttattctatttgctgagttggactacattacctccatgtcgagactgcgagctctgtggcaggcttcctttaacgccacaaagagagctcttgtatggagttcagatgatctaattccgccaagtgaaagatgtatcttcaatttcaactcaaaagatgagctgaaaaggtggcatttgtactcagattcagagtatggaggtttgtcttctgcatccttagaaataactgatggcgcttcagttggagatactccattaactggtgtgttttctggtaacctttctttggatatgtctgaagagtcaacatggaggatcaggcgctatggattctgtgggatgcgatcaaagaagtttgatgggttcattgaccttgatgcatatgatacaatagcaatgaagatcaaaggggatggaagatgctacatatctacaatatacacggagaattgggtgaattcacccgggcaacaagaagacaactcgtggcaggcttttgtgtacatacctcctcaagacagatgggaagtcttgaagatccctcttgatcgctatttacccacatggagaggaaatgtgatccaggcaaagttggaaatgaaccctgctcggatcgtggggatgtctctctctgtaaacgcagaaggcggtgttcctggcgccaagactgggcctggtgattttaggcttgatgttgcttggatcaaagcgttgagagctttgtgaactccacaagtcatagttttatttcacatcggccctttccttctttatcaccctgccccagtggcgccgctgaactcatcacccgaccacaaccacaggagtaaccatagcacagattgccaactcctttatgcacttaataatggattttgttttgcttctgaggtttatgaataagtggtagaaaaatggagcatttagttaaggtgccccctttggacagatgttgctttttctctctctctagtatctgatcggccgataaaacgagtgcattccacccggacgataatgcgagagtaggattcagtttaattctttgactgttaagagtactactgtttgatcgtttgaattatacacgttcatttgagtaat

SEQ ID NO: 31447 - DNA, 3693 bp, Zea Mays
catctcgctcgctgtagttgggaagagggctttccctctttctctctcctcgtcatccccagcgacgaaaagcgtctcatcgcctttctctctcctctctccggaccggagcctactctctccactagagagcgcgggacctagcacgagtagagggagaagttgagggggaggtcgtcgccgccgccgccgccgccgccgccgccgccgccgccgcgaggtcaccgtcgtcgccgccgccgctgcgatggctcgcctgttccgcgagtctcgccgcgactcgtcccactcctcctcgtccaacggcttcctccctccggcggcggcttccagcccctcttccgcctccgcgatcccctcgccattcccggacctcggggtcgccctctccgccgcagacctccgggaggccgcctacgaggtgctggtcgcggcctcccgcaccacgggcgggaagcccctcacctatatcccccagtcctcgtcggtggccacggggccgccggtgtccccggcctcctccgcgtcctcggcctcatccgcctcgctccagcgctccctcacctctgccgccgccagcaagatgaagaaggcgctcgggctccggtcctccgcctcctccaagggtgtcggcagccccgggagtggcgggaaggcggcgcccccgcggaggcccgccacggttggggagctcatgcgggtgcagatgcgcatctccgagcccgccgacgccaggatccgcagggggctcctccgcatcgccgccagccagcttggcagacgcgcagaatctatggtcttgcccttggaattcttgcagcaattcaaggcatcagatttccctgatcctcaagagtatgaggcgtggcggagtaggaatctgaagcttcttgaggctggtctacttgttcatccactcattccattgaacaaatcagacagttctggtcaacggttgcggcaaattatacggggtgcatatgataggccacttgaaactgggaaaaactctgagtcaatgcagggcctacgtacttctgtcatgtcccttgctggaagatctcatgatggaacttctgatggatgccactgggcagatggcttccccttgaatctccatctgtaccaagttttggtagaagcttgctttgataatgacgagggcactgtggtcgatgagatcgatgaggtgatggagcttttgaagaaaacctgggttattcttggaattaatgagttactccacaatctttgctttacttgggcattgttcaaccattttgttatgtctggtcaagtagatattgagctgctttctgcggcagagaaccagttagctgaagtagctaaggatgccaagagcacaaaagatccaaattactgtaaagtattgagttcaacattaagctcaataatgggctggacagagaaaagacttctggcatatcatgaaaccttcaatacatgtaatattgagtctatgcaaggcattgtctccattggagtgtcagctgcaagaatccttgttgaagatatatctcaggaataccgccgtagaagaaaagaagagactgatgtagctcgaagcagggtagagacatacataaggtcttcactaaggacagcttttgctcaaagaatggaagaagcagattcaaaacggtcatcaagaaaccctactccagttctttctatccttgcgaaggacattggtgacctagctacaaaggagaaaaatatctacagtccaatactgaagacatggcatccactcgcttcaggtgttgccgttgcaacccttcattcttgttatggaaatgagctgaagcagtttgtagctgggcttacagagctgacccctgatacagttcaagtacttaaatcggcagataaattagagaaggaccttgttaatatcgctgtagaagattctgtggatagtgatgatggaggcaagtcacttatcagagagatgccgccatatgaagctgaaaatgcaattgctaatctggtgaaagtgtggataaaagatagagtagacagactcaagggatgggttgaccggaatttgaagcaagaggtgccaacagggataattttgctccctcttctgtggagatgcttcgggttattggtgaaacattggatgcatttttccaattgcctataccaatgcatccagctcttcttcctgatctgacagctgggctcgacagaagcctacaactttatgttgctaaagcaaaatctggctgtggaacacggaattcttttatgccccaactacctccactcacacgatgcgaggttggctccaagttattattcaagaaaaaagagaagccacaaaatctgcaggttcgagtatcacaaaatggagcagcaaatggaaatgatcccttgggccttcctcaactctgtgttcgcctgaatacacttcagtacatccgtggtgagcttgagaacatagagaagaagataaaaacaagcttgcgaaatgtcgagtcagctcaggcagatgtcactgatggattggacatcaagttcgagctttgtcaggcagcctgtctagagggcattcagcagatttgtgagacaactgcatataaggtgatgttctatgacttgggccatgttctctgggacaccctttatgttggtgatactgcatcaaacagggtggaggtactgttgagggaacttgaccctgtccttgagacgatatctggtatggtgcacaacaaagtgcggaaccgtgctattactgcactgatgaaagcaacttttgatggtttcttgctggtgcttcttgctggtgggcctttgcgtgctttcacccgccaagactctcagataatagaagatgacttcagggccctcagagatctgtatttagcagacggggatggtttgccagaggaattagttgacaaagcatcctcccaggtcaagaatgtcctacccctcttccgagcagactctgaaagtctcattgagcgattcagacgcatgatggttgaatctaatcggtctgcgtccaagaacaggttaccattgcctccaacaacggggcattggagtccaaatgagcctaacacagttctgcgagttctgtgctaccggagtgatgagacagctacaaagttcctcaagaaaacttacaacctaccgaagaagatatgacttgtgggatagatcacaaaccacatgtacattttcctgtcagtataaaaaggtttctctatgcctgtcacaatctctggctgaggaccgaggaaatacccactaaactttccacagcaaaggcgcctcctcaagtgattgtcaacaagaaggtttattctgtggtgctggagagatgtgactgggtgttttcggtggttcgtatcatggataggtttacttacagcttgatttgttcattatattatatatgtttgcctaatctagttcttttgctgaccttgcgctcatgtaatttgattcattctagtttgcgacagctatacccagcgtgtgaataagttgtgtactcgcgtgatactgtctggtgcctttgatgtgacaatatgaggagcatttgtatatttttactgcatcgtgcactccccactactttggtagttttctgtcatatccttgattccttgttgggttgaacgttctttggttatgcaactatttcaatttgca

SEQ ID NO: 31448 - DNA, 4177 bp, Zea Mays
acgaaatcacgaccatgtacatctgatatgttcctacccttgttcgccaccgtattcgccggctgtctccgcccatctcgcctgagaactaaggcggccgccagtcgcagccctcggtggtcggcacctcctcagcccgtttcccctaacgctcacactctacgccgccgcgtcgtcggcctcgccctccctctcgacgaactaagccatccccggccgagcttccgacgcattcccgggccacttccctcccttccggccttcctactccctccacgcaccgcaactgtgacactccgctccgacgcgggcgccgcaggccgttgacgacacccgaacccaaccggcaacgcgcccgaaaggggcagggactccttttgcttgtccttcgcccctcttctcgctttctgcggagggaaaaactttcccagtcaattaaaaaaaaaatcgacggacggctttacgcacgcgattcgctgctcgcccccaaatttctcctctgcttctggttcctttgacgcatctgatcatttccccctcctctacgcgggtcgaatcgcgagagtgtggcggcggctgtggtggttgactggtgcttagggttggagctccaggaggatggcgagccacggcatcggggcggccgctggatctgacgccccgcacgctgaggtcgtcactatgggacagacaaatccatctccttatcctcctgtatcttccagtcatcattcatggtcctctgcaactgggtcagtttcatggaacaatacagtggacaaacttagccaagatacagtttattatgatccacaaagggatgtatcggtttcaggagggaatcaaaatgtaggaagcagtgcgcctcatgttgcccaggcgagtatggggataacagacgcagctcattcccatgtaccttactctagttcagatcaacatggctataaccctgtagaatatgccaattattattatagctacccacaagcggcaaatgattcttctgtccagcaaggagcaaaccaacatccaggtgcagcttatcagcctcttacttcatttcaaaattcagggtcttacattgatcctacaagtaacacatattacaatgctggggatcatcagactgtgccaggatatggaagcagcagctactattttcagaacaacacatggaatggtggaagcacagggaataattttgctcaatcataccagaactactcaccatctgatacaaatgcacaacagagctctacttcagtgcctgccaattctttaccgtatcagcagcagtataaccagtggccgtactattacaatcaatctgtgccaagtgcttctagcaatccagttgctgggaacagtactacagataacttagctgttaacaccccttctagctactcctatcctaatagccagccacctccaccaggaacaacatcatggaaaagtaattcaagtgcttctgttgcgcctcctatgcaggtaccaggtgttttggaacatcaaaatcaatatggcaaccaggcggaaggtcattataaccagggaccaggtgtccaatggtctcaaaaccattacgcctaccagacacagccataccctcagaagattaattccaattattcgcaactaagcaaccctgaagatcaactgaggactgtagattctaacggtccaagcacaaatctttcgtctaaccatgtttctgaaaattttaaaccaaacttgctggattctgtgacaatgaacacttccagcgaaagcaaaatacaagttcctataaatcctcgaattgcccaaggtttctctatggtgataccaaagaatgagaagaaaagttctggacttgatttatcaaggaaacctgcctatgttagtgtgtccatgccggcgaacgatgctaaagcaagtcaagttggtcctgatgctagatcgatacccttttcactccgtaactatgctatgaggaacctcaatcgttgcaagaatgatacccagagggcagcctgccgaagcataatggaggagatcacaaaaaaagcttttgctgagggaacccttcttactaagaactgggacactgaaccactatttcctttgcctgaaagtgttgtgggcatggctggagcaagtgatttaagtcccttcttgtcagtatctaccccaaggaaacgtgtgaaaagtagatgggagcctgttgtggatgaaaatgttaccaataaggtggaacaaatagcaaaaggattgatcagcagtaatgtccacagtactttggaccctaaaaatagaattccaaatcctgtgcggggtagcagttgggatcgtgggaagtttctccagtcttgtcaagcatcatcaaataaagtcaatcagaggcctgccaagaagcaaaaaatggctagtaatttgagtcaaatacagaatggaagtgcttcaagtgacagtgagaaggaacatgatctaaccaaacattatgccagtgcaactgcactagcaaactcgcctgaggaaaagaaacgtagggagcatagatccaagcgttttgaaaagagtaaagattcatcattaaaatcaagaaatgcttctgcaaataacgatggtatggctagttttcgtgcaagaagggcaatttcgtctcttcgtactagaacctatgaagaaggcactttggctgtggaggatatggattgggatgcactgacagtcaaaggaacatgtcaggaaattgagaaacgctatctacgacttacagaagcacctgatcctgccaaagtaaggccagaagatgttctggagaaggcccttgcaatggttgaaacatcagaaaagaattacctttacaagtgtgatcaactaaaatctatccggcaagatcttacagttcagagaatccagaatgaactgactgtaaaggtttatgaaacccatgcccgattagctatgcaagctggcgatttacccgaatttaaccagtgccagtcacaactgaagaggctatatgcacaaggaatcaagggttgctattttgaattttctgcttacaatttgttgtgtgtcatgctacactctaataataaacgagacttgctgtcatcaatggcaagcttgtcaaaagaagccaaacaagatgcagctgttaagcattcccttgcagttcatgcttctgttttatcttgcaattacgttcaatttttcaaactatacaagaaggcacccaatttgaactcatgcctcatggatctatatgtggagcggatgcgctttgaagctatgaaatgcatgtctaggtcatatcgcccaactgtacctgtgggatatgttgcacagattttggggttcttgagaacagatacaggctgtgcaaccaatggggatgatggattagaaggatgcgaaaaatggttgaaagcgcatgggacagttctttcagaagatagcagtggggaattgcagatagatacgaaggcctcttcttctacactctacatgccagagccagagaacgccgttgcacatggtgatgcatcacttgctgttgatgacttttttgcacggactgacggacaacttaaaaggggcagcagcgatggaccaacagtggatactccgtagtagtattgggggctgccgtggcagtagtgctgaggtggcttcttccgtagaaattacaacagggggcatgaaatggaactgaccaacgatgccagcggagctacagtcggaacatgggtgctctaactgatccagtcatcgggttctggcatttgcctcaaagtgatctagtcatccagagttgcaccgcgatgagcttcgttgagaaggcagataagaaagcagcattacaagtttttaatgtcttggtggtttactcacccctaactttaagcgtagaaagaactgtgaaaaaacaactacaggtctacagctttgaagcatacacgtatgttttccggggctcctttttttctggctgccccttagtccgtgaagattgtaaaaatatttttaatgcacataaatttgctttcctatcctatcgaataacaacatttatgtacgtactaatactcctatagttatatctctcgctcgctcgagccgaaccgtttactgatactaagtctttcatatatatgatgatgcgatagcccgaaatggcttgtta

SEQ ID NO: 31449 - DNA, 2361 bp, Zea Mays
tcttcatcttcctcgcaacgccgacgctgcaacttccgctccctccccgactcgcgctcggcacgcaggcaggcgactgcggtggcgctcaggctcgggctctcagcaacggcggggcagtcccagactcagcggctccctctctccaatcgccttgcgccctcgctccgttcctctgctcaccggccgattctgcgttgcaatattttccagcatagcttgctcacctacttctcaatttagaagacttcaatttctggatctgagcatcaaatcaagaccataccactttagtcagtcctgtctgatggcactggctgcagctccagccagtggtgattcacagagtggtcctcagaggaactatcaggttgttgtggctgccactcgtgacatgggcattggcaagggtggggtcatgccatggaagcttcttggtgatcttaaattcttcaaagaacttacactaactacaactgatcctgccaaaaagaatgcagttataatgggaaggaaaacatgggagagcattcctgttaagtcaaggccactgcctggtcgtttgaatgtcatacttactcgatctggtagttttgattttgcaacagtagagaatgttgttatatgtggaagtatgaagtctgccttagagctgctagcatcaactccatactgcttatcaattgagaaagtttttgtcataggaggtgggcaggtactgagagaatatttgaatggacctgcatgtgaggctatccatctgactgatattcagtcaagcattgagtgtgatactttcatccctccagttgacttttcagtgttccagccatgaaagtcagtggcagaaactcatgagtcaaatggcaaggaatcaactgagattgataccaagaatgacaaatttgaaatagagaatttctcttttctccccaagatagtatatgaccgccatgaggagtatcaatatctcaatcttgttgaagatattataaggttcggtgctcagaaaaatgacaggacaggaactggaacattgtcaaaatttgggtgtcagatgcgattcaacttaaggaaaaattttcctctgctgacaacaaagagggtgttttggcgtggtgttgtcgaagaactcctttggttcatcagtggctcaacaaatgcaaaggttttgcaagaaaagggtattcatatctgggatggcaatgcttcaagagagtatcttgaccgtattggcttggcacacagggaggaaggtgatctaggtccagtttatggatttcaatggcgacactttggtgccgaatatactgacatgcatgctgactatactggaaaaggctttgatcagctaatggatgtgattgacaagattaagaacaatcctgatgaccgccgaataattttatcggcgtggaatccttcagatctcaagaagatggctcttcctccttgccacatgtttgcacaattttatgtggagaacggggagctatcctgccagatgtatcaacgctctgcagacatggggcttggtgttccattcaacatcgcatcatattctcttttgacatatatgattgctcaagtttgtgatctttctccaggagattttgtccatgttataggggatgctcatgtctatagaaatcacgttcgagctctggaggaacagattcagaagatgcctaaaccatttccaattttgaagataaatccttcgaaaaaggatatagattctttcatggcgtcagacttcaagctggttggctatgatcctcaccagaagctagagatgaaaatggcagtgtaacggtggcttagctctggagcccccagccttggaacctcggtgggtgaaatcagtcgaacgaactggtactacataaaaaatgaaccggacatcgcactagcttgtttttggtgatggtgctgaatgttgtgcgggaggcgttttcccccgttattagtagcgatctgcgtgctatatatggtcgctgaagtcaaaattggctctcttttattttttatctactactactactcatttgcgagtgagagatggtctgggcacaccattcaattgcaacggcctactggtgtgttgccccccaatgagggctgtgacgattgcgccactacctcgtgagaaacatgatgtgaccgaaattgctgtgtacctgcatggtagaacaacgcactctttggtatctggttgccttaatacgtgacctggttaattcagtttccagtttggatgggcacaagatagcgatttgctgtggcgttttagttgttgttgctgtgctgggggcagaaagtctagtgccgtgcttgacgaagacggggtcaaagcgcttg

SEQ ID NO: 31450 - DNA, 1818 bp, Zea Mays
actgggcccaaaagtgctgtgctaagttgaattacgaaagggcccgcattcggtggtctgttacctgctaccactgtgcatcaagcgaatttctcgcggtcgggcgtctaggagagagagctcacctgagcctttcccaagttgtttctcttctcttgctccgcaaaccagcgcaagcccttccctgacagcggcggcgacatggtgctcgaggcgacgatgatctgcatagacaactcggagtggatgcggaacggcgactacgccccgtcgcggttccaggcgcaggccgatgccgtcaacctcatatgcggtgccaagacccagtcgaacccggagaacacagtaggcgtgatgacgatggccgggaagggcgtccgcgtgcttgtcactcccaccagcgacctcgggaagattctcgcctgtatgcacgggttggaagttggtgctgaggcaaacttggctgcggcaatccaggttgctcagcttgcgctaaagcatcgccagaacaagaggcagcagcagaggattatagcattcatcggaagtcctgtgaagtacgacaagaaaattttggagacaatcgggaagaagctgaaaaagaacaatgttgctcttgacattgttgactttggtgaatctgatgatgaaaagcctgagaaactggaagcattgatcgctgctgttaacagcagtgatagcagtcacattgttcatgtccctcctggtgaaaatgctctctctgatgtcctcctaagcactcctatatttactggtgaagaaggtggaagtggttttgctgcttccgcagcagctgccgtagctactggagcatctggatttgaatttggtgtggacccaaatgtagatccagagttggcactcgccctgcggttgtctatggaagaagaacgagcaaggcaagaggctattgcaaaaaaggctgcagaagatacatctaataccgaaaatatcaatgcctcaagctcaaacagcgattctgttatggctgaagcagaacttgcctcaaatgctgctgctggtgacaagcaagaacagccaaaggatgcaaacatgtccagtgacactgatatgagtaaggtgtttgaagacagaacgtttgtgtcatctatccttaattcgcttcctggtgttgatcccaatgatccatctgttaaagatttgctggcatcattgcacagccagggagagcaagagaagaaggaagacaagtcagacaaaacagaagacgagaagaactgatgtagccatgttcatgcttccatgctcacaaagaaattgaacattggtctgcattggctgcgcttactctcttggctatgaaatttgcttatcctcatgtaacagtgctttgtttataacttaatgccgagggaatttgtattgtgactgcaacaatcttctcgtcataaatgttcaagtgatttcgtgtttcaagctctatttgcttgtgtttatttcaagctgtaaccaggccattcgatctcgtgtatgccgtatgcggcggatctgctcggttataagcgttgccctagaattttacagcgacatgggaggtggctggtatctaaatcagggctagtttggaaactcaaatccccttcgggattgaaggagattagagagaaaattagttcatttccaccccaatcccctctagtcccaaagggaatttgaggttccgaaagtagccataatatctgtaatgcgctacacatttgctcacgtacattgatacctagtggcacctgcgtagttttgctaaatatagagaaatgcagtgttttactctttgtt

SEQ ID NO: 31451 - DNA, 312 bp, Zea Mays
cgacgacaagtgatgcgggggtgacggcaaacatcaaggtaacgatcttacccgcagtggggttggcgacagagctagccaccacagttcggatccattgccgtgtgcaactccgacgaggaattgaagatgtcccgaggaacacccctttacggcgtagccccggaaacatcccctgcatcatggcgaagctcccaagccaattcatggactccggttatcgacattagtgggggaacgatgtctgcggccaactcacccacctctctctgcttgaatccctcgcctacagtacggagcacacaagctggt

SEQ ID NO: 31452 - DNA, 390 bp, Zea Mays
aaagtccaattttgaccaatccattctgaacgggagaagaagaccaagagggagaagagatgggtgcagaacggaaccacgaagcaatacaaacccgagagccacctggagaggaagagagtgttgttagcattcgggagccatccaccggaatccaccgctccttcggccaagcagcctacagaggagatccatggctggattgcccttcccgaacagcagacagtggcggcgcgggggacgacgacggaacgcagccaacctcgccggagccggacggcggggatgcgctcctacttcggatcccagctttcagcctcttcgacaaggacggcgacggtatcaatcttacatccattcaacgtacccgctctgttcattgtttccgga

SEQ ID NO: 31453 - DNA, 4172 bp, Zea Mays
ccaaagttcttcaggacgcagtccccgcgaatcacaatggcaacaacctgctgtgctacatatgccagctcgggatggtatcgatatccaaaatcatcagctcaccctgcacatgcgcattcctgggcgactatacggaaagataggtttttgcatcgctggagaagcgctgcaaagtcgcattccagatctcccctgcctccgctgtataaatagaccctcaagctccctgcaacatccatcaaggcccaagctcagcgaccaccaagcagagcaagccagtgaggtctctcagagcgtagccagccagctacaatggcggggaacgcgctagccaactatgtccaggtctacgtcatgctcccgctggatgtcatcactgtcgacaacacgttcgagaaggaggacgagacgagggcgcagctgaagaagctgacggaggcgggcgccgacggggtcatgatcgacgtctggtgggggctggtggaagggaaggagccgggagtctacgactggagcgcctacaggcaggtgttcaagctggtgcaggaggccgggctgaagctgcaggccatcatgtcgtgccaccagtgcggcggcaacgtcggcgacgtcgtcaacatcccgatcccgcagtgggtgcgggacgtcggcaaaagcaaccccgacatcttctacaccaaccggagtgggctgacgaacatcgagtatctcacgcttggagtggacgaccagcctctcttccatgggagaactgccattcaggtcagctgacttgaaactcctgccctcttggtgtacctagcacatgcagaacgaaaggaagatggtaaaatcaagcgaacttctctgtctgtctgttgcagctgtatgctgattacatgaagagcttcagggagaacatggcagacttcttggatgctggtgtcgttgtggacattgaggtgggacttggccctgctggcgagatgaggtacccatcgtatccccagagtcagggatgggtgttcccaggcgttggagaattcatagtgagttctctttccaaaaacaaatatttttctgtatttttttttggttattacaaaacaaaaggggattcatctccatgtgttgggcagagacagactagtcttggtccgtgcgttggtttctgcaagcagacttcaaagcagcagcagaagaggctgggcatcctgagtgggatttgcctgatgatgctgggacgtacaatgacactcctgagaagacccagttcttcgcggataacggaacataccagaccgacaaggggaagttcttcctcacatggtactcaaacaaactgatcaagcacggtgataagatcttggacgaagcaaacaaggtcttcctgggatgcaaggtgcagctggcaatcaaagtctctggcatacactggtggtacaacgttccaaaccatgcagctgagctcactgccggatactacaacttagatgacagagatggctacagaaccatagcacacatgctcacaaggcatcgtgctagcatgaacttcacttgtgctgagatgagggacagtgaacagagttcagaggcgaaaagtgcacctgaggaactggttcaacaggtgctgagtgctggatggagagagggcctaaatttggcatgtgaaaatgcactcaaccgatatgatgcaacagcttacaacaccatcctcaggaatgcaagacctcaaggcatcaacaagaatggccctccagaacacaagttgcacggattcacctacctccgagtatctgatgaactgttccaggaacagaactacaccactttcaaaacttttgtcaggagaatgcatgctaacctggattataatccaaatgtcgatccagttgcaccattggaaagatcaaaggcagagataccaattgaagaaatcctagaagtagcacagccaaaattggagccatttcccttcgacaaggacaccgacctaccagtttaaacactccaatgatgcaaactacaggaagaatcacgagacacttaaaaaatcaagacaaatagtaagcctattgtcgagcagtagtctattaactaaataaaatgctgtgtggagcatattataatcgcatattgccctaataatattgtgttgttaaacctgaggcttgatggttatctgatgagttgtaataatagccttggtcttcctgttgtatgtatgtatttgagctaaggaataaaaattgtggctttgtgggttatttattgtgccctttagagagtatgtgtggtttacaagtgcttgaaataatagttctacctgcacattctggtgatgataaaaacaaatcattacacaacatcaagagaaaaataataatcaaatcaaaatggtgtgatgataaaagaataaaatgtgttgtgaagctaagagagcaccatggttgtatatgatttggatcacctattttctgtgtcagttttatgcatactgttatggctctggaccggatttatgtccgacgccgtctaggttcagggttagcaaatcaataaccttatctttctatctttagagtttctacattttcctttggaaggttgagtcagcctctgtctaggttcaggttagcagattaataaccttatctttctatatttaagtctttctacctttagagtttctatattttcctttggaaggttgagtcatttatggactataaataaagggttcaaggaagagcaaggcatgcttgattgccaacgattctattagcaggcactgccaatgacaactggtcggtgacgccgtacagccattatcgtgacgataggttgtcatcgatttcctgcggctgcctctaccaattctataattcaaaagaatacaaacctttcatgtaactaaaaaaatgtttgcttcacctcaacccaaagccaaagatgtcacaaattggcataaacatgtactatgtagtgtggatcatcatgcaacccgtgctcgaacttgaactaaaaaaggatcaaacctgaggatcgacagatcggccacttggttagtggaggtgggatttaacatcctgccaatctagtggtccaactcaggcaaaagtccttgaataaaagccagatgacctaacattctctgttttaaaaaataccaggacaaatctcctagaaaatgctacaagatttttttttcgtgaccgtgtcattgcacgtttttcattaagagggagtagagtgaacaaagtacaaaccccctgtcggtaattagagttaccgaataggagggttcccaaaggaccactaaagcgatactacagaacgcattttgcaacacaacataagccggtaatagaaggtaatcgtagaagaataggaagcgactgcaagtgtctgaaacccgctgaagaccattcacttgtttcgtccaagatcaagcacagcagctcccgtggctggcccaacgaaggtcttcgtgttcctcttttttcaatttctaaaatgctacaagatttgtctgtggattcgtcaacagaagcacaggaattgtctttagagtaaggagaaaatcaaagtaacagagcaaaagtaacaatatgtttttcttccagctcagggagctcactagggccatacatgctaattgattactgatagagcaaccgaattaagggtacatatgcatgaatccttgtaggtttttaacgaaacggaaggaagagtgccagagaggaacaccactatttcagtttcagtcagttaattagcggactggtgtagctagagcagaaaatgaatctatcagaacatgttatagggctgatcccaccaagtttagcaaatcacaaaagtactacatggagaaaataaaaacccctacatattatggctcacacatatccgtgacagatatcctattgcttttgatcctgaaaatatcatatagcaacttgggcgttacaaacaatacggaatacggtgtgtggtatgctgtgaatgaaggttaacgctactgcttcagttaagcgctagcaggcgcgcgggccttgacttcgattgaattgattgattgatggaactactcgcaaatcatgattcggggtcgactgcgtgatctcaacgagggtgtggtactgtggtcttgagcctggaacaggcacagagcggccgac

SEQ ID NO: 31454 - DNA, 4106 bp, Zea Mays
gcagagggaacaccgcgagctgtgacagcaggggtggttccacctccaaaggcgcctcctttttcgacgccttgatgcctttctaggactaggaccagtccgaactgctcgtgctccctctttcccgtgcgcgctgcaggttggtcgatcccacctggcggcctccgtgattgccgacaagtcagtgtctttccagactggagatggggactatgtttggagcgtgtgttggcccaagtgagcttcacttgaggaaggaacttactgctttgcaaaaggcgcgctgcttgcaggaccctgacacttgctcaacatggagatcacctttgagttctaggtcactggtggcaacttcaaggattacatacaacggtggtatttctagtaatttagcaccaaagcacaatgagtcaccttgtgcacctccaaacactgataagaaaagaagaaaggtttatctctacaattggaggcagaattcttataaatctagtgaaagcggaatgaagatagatgaggatgtcaagcaaccatctggtgatctaagcctggacagtccatgcaagtctaatggggtaaagtccaaaggtgatgcatatctggatcctccagccagcatctacaatgttcagagttcaacatcatgtactcctgtcaaaagaatagctagaaggagaaatggtgttttgtccaagaaaggagcagtcagaaaccaagctataccgaagttgtcagatcttcaggttaactctggtgagccatctgaggatactgagaactgcaactcagaggctctggagatacttcgaagaggctacttatctcatcctgcatctccgctatttgctgcatgtggttgtgtcagctcttcaaatccttcaaaactactgaaaataggtagaagagagggatcttccttttcttgcacaccggtttctactagctcctattacaggcatgtaagaaggaacaccagcactgttggttcttgggatgctaggactgctacttctcttgatggtgatgagtctaaccaatcagcagttctgagaagtcagaggtcgcatgtcccttgctatgtatcaaagaggagaaaacatcaaggatctgaaggaagtaattattctccttcactatccgctatacttcgaagaaaaggtagcagcctaatatgtgggagccagacaatgcacaagaagaagaaatcatttggttcaatgaaatgggcacattcgaagaagtctgctcagggaatgccacttttgggtaatagctgtgattttggttcgtcgtcatttgattcatcaagtgatgatctctcaaccaatataggggagcttgatatggaggcttcaagccggttggatgggaaaagatggtcaagctgcagaagccaggatgggatggatctatctgttcattgtgctgatctgcacgagtcagacccgagaagcttgagccaaaaatatagaccaagagcattcccagaaattgttagtcaaaatattgcagtccaatcacttagtaatgctataacaagggaaaggatagctcctgcctatctttttcaaggtcctcgtggaacaggaaaaacatcgactgcaaggatattttcagcagctttaaattgccttactactggagataataaaccctgtggggtatgtaaccactgcactgacttcttcagtggaaaagctagcaatataaaagaagttgatgcaagtaacagaaagagtataggcataattaagcacttgctggaaaatttgccgccatctgcgcctttgtcccggtacaaggtgtttgttgtcgatgaatgccacatgataccttccaaattatggtcagcatttatgaagtttcttgatgaaccatttccttatgttgtgttcatatttattacaatcgacccgaacaacgtacctcgagcagttgtatcacgttgccagaaatatgtgttctctaagatcaaagatattgacactgtgtgccggctgaggaaaatctgtgtaaaggaaaatcttgatgttgagctagcagctttggatttgatagctctgaattcagatggctcgctacgagatgcagaaacaatgttagatcaattgagcttgttagggaaaaagataactccttcacttgtcaatgatttggttggtgttgtctcggaagagaaattgcttgatcttctggagatagctatgtcaggagacacggctgagacagtgaaaagatccagagagctgatggattctggcactgatccaatggcattaatgtctcagttagctgggctcatcatggacatcattgctggcacctacaaattggctgatgttgcttgttgtaatggctcagcagttggtggtcgaagtttaacggaagcagagttagaaagattacaacaagcattgaagattctttctgatgctgaaaagcagataagcctttcaagtgagcgtcccacgtggtttactgctgccttactacaacttgggtgtggtcatagttcagatgtgaaccaacaaaaaggcagtactcaagaacaccataaagtagccaatgatgctatgtctgagatagcaagggaatcatccagcagaactttttctcattcattatctgcctttggcatttctaagagaacgcttgactccaaaacaattagtgtgcactcgagtcctcaggtccttgcctcacattcatctcggttgagactgaatgacaacttggtttatggagagtgtaggtctgttgatagagttccactcaattctaatcaactgaatggcaactgttcccagcaaagggccctggtaaatggaatctcagatagccttgctcaggtttggataagatgcattgagaactgccactcgaagacattacagcacctacttcttgaccatgggaaactagtatcaatcaggcaatttgagggccacgcgactgcttttattgcaattgaggactgtggcataaaatctagagctcaaagatttttgagtagcattaccaattcacttgagacggtactgaaatgcaacgtggaagtcaagattggtccactagcagaattgatggacggagaagtaacattagaggctggtcctaatgtaagaagatacgagtctgacgtcttgagttgctcatcaaacagtgaccgactaaagggagctttagattcaaggagaagctctggtcatcctgatgaagtaaagaaagaactggaaacgtacaaagaagttcccatccagactacaaaagaaccaacaattgacgaccagcgactggaaagtgcatggctccaggttactgagaagcacacacctggtctggtggatcaggcactacacgatcaacatcaggttctgtctcaattttctggcaaccaacaccaaaggaagtcctcgatgtccctagttgtgccctcaagccatgtagatgaggatcttgctcatcagatagaagcgctgaagattgttgacagttatggttctcagaagcaccagagtggaagaagtgaaagcggcttttccgtttcaccaagcagaatgcacaggaaggatgacatggttgattgcgacaaagagagcgtatgctctgagcttggaaaatcgagatgccatggccttttcccttgttggaaatctcaaaaaccaaggggagtaaagacgaagaggcatatgcgggtgaaatcttcttcgtctggcagacttgtttaacatgccgatgatgatgtagcgagcctgggagtagaatacgtgttggaacggaattcgtgtttgaaatggttcttgtttttgcaaaatgacacattgttgtttcagaagaaaaggaaatttgaattgctagaacattaaattcagcatccttctctcgtggccgcatatttttggccttcatggggtagggcaggattcagggacggaggtcaatttctccagcaatcagctgcacgtgtaatcttgattttgtatttatatgtgtcctagtaaagttattatgtgctccttgttatcttggggaaaaagaaagagactatatcttcaggaacctcacatgaatgaaactgatgaatatagatttaagttaccaaatct

SEQ ID NO: 31455 - DNA, 1660 bp, Zea Mays
tacgttgctatctcttttgtgctgaaaacaaaatctgctgtccttatctcgttgtcgctcttggcatcttcttcaagggctggatttttttgaagccatctccacatctgctagatatttgtttacgtgcctcatcttcattccttatcctgtacacgtcaagtctttggaaggaaatttctcagcgtgtagcttcatcttcccctccgtgctcggcgtctctggcatgctggtcgaccagcccgtgactccctgcctccctgggacgccgcacggctgcaggccgcggagcagtccacgccaggggcagccgaggaggcggctgggcgaggaggacacgcacgcgcagggcatgctcgtcaagttcggcgacgtgctcgacgtctttgctttcacttgcgtggccgtgctgaagctcctgcaccgcgtgggcatgcgcgcgctctcctctgtgcgggagagcaggctctcttcacgccacgcgcagggcaccgtccagcgtcgccagtcgacttccgccaccttgccggtctggccatggatttccccttctcccctgcgagctccaccagtccgacccaggcgaccacggtcaagtccccagctcctcgtctttgtgcatcgtcgatcgtcacaggccgtcgtgggcgctgccccgccgtcgcgcccggggttttagcacatctccctgctccgaccaatttcgcacctcgccgtccatggagccgatcgtcaccagctcacgcgcccagcttcatgttttccctcttcctcccgcgctcagacactagaaaagatatcaaagcttatgacactcataaattatcactggcagtttcaattacgccagtaaaaaaaatcaggtggcttgagaaccaccagtggaaacatatttccactggcggttggtgtaacagaaccgccagtgaaaatagaatatttccactggcggttggtgtaacagaaccgccagtgaaaattagatttccactgtcggttctgttacacctggcggttgtgttatgataaccgccagtagaaatatgtttccactggcggtttttcaagccaaccgccagtgaactatgtgttataaataccactctttctcccccgacaggagctatacgctcgcagccaacttccattggaggcgattttggaggtccagatttcacaaaatacaagggagaggttttggtcttcattttttggaagaaggtggataagaaaggttgatttatgtttttttgtcaatttttattcgttcttgctcaattttagccacattttggatctagggttttacatgtgagagagaagagtatagctaggttattttctctatttcctcaaatgagattgcttaagatggttagattttgtctattccctctcctttttcatgtttaattctcaaatcagtttatccatgacacatatttagttgcttaatgaatggtgaatgcatgtgttggagagggaggatgataggtttggtaattaagattgtttttattaattgttatgaaaggttggtttaattatgtttcaattgccaattattgttcatttttgctcaattttaactacattttgaaactaggctttcaccatgtgttagagataggtttgggtattaagattttttgtttattag

SEQ ID NO: 31456 - DNA, 1279 bp, Zea Mays
cgacggcagctccacgcgctggcatagccgtctgttctcagcaaacccacccgtctgttctcgtcgtggcggccgccctgtccccattccccaatccctgtcgccgtgtccctaatccggctccgacaatcccacgcccagcagtccagctccagcaccaccagcgccgccctgccccacgcggccacacccaggacccagcggccagcactactgccaggctggcagcgcgcggaggtccagcgccagccgccagcaccaggcttccaggtctctagtgactcgatctcaagcaaaggcgtttcgggatgtttatcatggatcgatcgatcatggcggatggggagacatcggcggaggaaaagaggaggtggacggggccaccagaggcgcaggagttggaggagcgcctggactctctcagggacaaaattgcggccgcaagtcttgtcgctggcagccgattcggcgaggagcagcgacggtccttgttgcaggagtggttgcgcctcgcatctgccaagttggatctggatctctcaggcataagcgagtttgacctatcagcagaggcgttgccttggttgatgccgccggaggaggcagacaagaggacgacgcacacgcggcaagaggcgcaggagttggaggagcgcatgacctgtctgcggttgctattcgaggacgcagcagatgacagaattctcgccagaagggagcttggagcagcagccgacgagttcctgctccgcttgacgacgcgtcaacaggccttgacgcgcgagtactcgcgcctcgccaacctgaagaggcctctggatctctccggcatgactgaggccgaccgggcggcggaggcagagaggctgagggaggagaagctgcagaaggcgcgtcaactccaggaccagggggacatgagcggcgcccgcgagtgtgaaggtctggcacgcatcatcgacttcgatgtcaagcagggcggcgaatacctcaacagtatctgctgtgtcggcaacatctacaccttcgaccacacagaggagtcgcccgttggtccgatgagatttaccaacagaccctggcaagacaagatgtgtgtgaattgtgcgtcgataaacatcctatctgtcaagattgcatgctcggatatcgacttccccatccaagtctatggcaccgttgttgccagggactgcatcgactacaagtgtgtttacctcttccgccgagataatgaccattgccaactcatcagctctaatgtacgtatctacaactt

SEQ ID NO: 31457 - DNA, 615 bp, Zea Mays
  misc_feature (1)..(1): n is a, c, g, or t
nttgtgcgattttagacgaatggctgtcgacggagaacaatggagtggacgaactgattagacgccatcttggagggggattgacgcttcaaggtccccaagttgcatagacaaaatcaagagactaatgggctgagctagcaagtacgtgatagcgacctgcaatggcacctatggacccggtatgacatgtataatgactgagcaggctagagcctgaacatagtcaatgatatgctcatgaggtgaaaccaatcgcttatgcaagggtcgatggctgtttgaaattgctagaacacaaactgaagaccgatttcgagttatatagtggacctgaaaatgttcctgaacttttaaaggatgtgcaggaagtgttgttctttcagatttatttttgttttttagtctcaatgtctagcgtcatagttgtaaagcacatgaactgcgaaattctgcagataatggctgcattttttataaatgtgatttttaggtaccagcagcctagcaacggtcttgtttattgcagtggccaaccagtcaattggtacttaaaaagacatgtttgtttaaatgaatgattcaagtgcatggtttgttaatatttgattgaaa

SEQ ID NO: 31458 - DNA, 1450 bp, Zea Mays
tttttttcgttatcttttttctctctctctttttcctgaaaaccaaagagatgaaaaaccttcatctcgttcgttcgtttcctcctgtagctacggtacctgaattattggcacgcctttttcctttctcccggcctcctcctgcgctcgctgctgctgctgcacactgctctcaggcaggcctagcgttcgtttccttcactttctctgacgccctgatgcgaattaacatctgctgctccccaatcgtctgctcaagattcagcccgctgccacggacacgttccatctacttgcggagttcgacgccgacaagcgcagctgcagaaagcgtctggacgggcacaatcgccgccgcaggaagccacagccagacaccatggcttctgctagctttatcgcaagccagcaaggcacgcgattctcaccatttgcgcatccaagactggaggcgagctggccgccgggggtgatgaaaaccgaggagagtccatatcacatcactcaccaaatccctctgggctccagcagcagcagcaggcagcagcatttcgtggctctgggagccgccacgcctgcctacgccaaggaaggccggcgcttccctttcctgcaggagggcgagataagcttcgccaccggcgtggtgctggagccgccggcggcggctccagcgtgccagccgctcctcaggacgggagcaccatccgagagcagcggcgccggcggcagtaagatgttctccgatcaggggctggctcgcgtgctcgactcggactgtgctctctctcttctgtcagcgccggccaactcctccggcatcgacgtcagcaggatggtccgcccgactgaacacgtccccatggcccagcagcccgtggtcccgggcctgcagttcggcagcgcgtcgtggttcccgcgcccccaggcttccacgggcggctccttcgtcccctcctgccccgccgcggtggagggcgagcagcagctgaacgccgtgctgggccccaacgacagcgaggtgagcatgaactacggcgggatgttccacgtcggcggcggcagcggcggcggcgagggctcctcggacggcggcacctcgtcgtcgatgcccttctcgtggcagtagtcgtcgtcacttgtcagcagccgctgcgttctctcatctttcgcgcttcagacgatctggtagggagatactggctttagtgatcactgatcagcattgatttctgttctttttcctgcattcgctttgttgaatcggctctgctcgccagcattcgtgtggacattttttgaacataattctgtgttcgtttccctcacattatctttgctacggtgacacctgccggctgctgaccgtagcatgttccttctcttgtgacttgttctcgagacgtccatttgatgcagggcgcatccagaatttttcagttgcagtgca

SEQ ID NO: 31459 - DNA, 2729 bp, Zea Mays
gcttatcgggtcaggactcaggacgtcaggtcacacccgcaaagccaacaacgcctccacggcgactccggctcctccacggctccagctccaggccccagctcaccctcccccctcccctcgaggcggaccgcccccacgtcgccggcgatcgaatcggcggccgtagcctcgcgcttccagcgtcggagagtgcgcccgtccggcggatgagatggcgctgcggcacctcgtcacgggccagaataactgcgtgccggacggcgcctcgtcgtccaaccccctcaacgccctcgccaacgccttcctcggccagtcctccaaggcgcagtcaataaaggaacttcctggttctgttaatgtcccatctacatctgactttagcgtgtctgctcctttgtcaaacatccctggttcagaaaatgagttcaaacaagaccagcgacctcttgcacggggtgctgactttattcgaggtggtcctgctaatgattggattgagtcttttcggcctccgagggttcctcaacttggtgtagaagcacaatttccagattttgagcaaatttataacaatgcagggacaacctttcagtttcagccgccattggatggtccaccacaaagagtgttgtccggtgtcttgcattcctttctcacaagtggcccagctggtgtgccatttcaaccacttccggtaccagctgctcttggtttatctgaaagcgacaaacaatgcattcgtgatcgtagctgcataatggcacggcatattttttctgaccaaccagaagaatatatacagagtcaggtcaatactttgctgcattcgcttgatattgacaaccgtatgagaggacctatgcatgggcaatacccagaactacaggagtactggaagcagtcccaaagttctacgcgtcctgccccaatgcataatgctgctgataaatggattactgagtttggcaagcaaaataataatccagaaaattgggcgaactctttcgaacaacaatatggccccaatgggtgggcctctgagtttgaacagatggccatgcgccagatgggaggagcgaacatggccaacctggctgctatggagcaatcccgagtgcttgcacaaactttagcaagtaataatgatcccaagtttcagctttcacaaggggcggataagtgggttagcgagttctctagtcaacctaatcatggtgcactaaatgagaactgggttgatgagttctcgaaattaaatgttactgacgaatgggcagaggaattcagtggaggtggttttggcgaaagctctgctgatccatgggtagatgagttccaagaacacttgtcatctttcaaacaaagtccgggcgcctctcgaggggtttatgttttttctgagaacaacccgtatgttggtcaccctaatccaatgcaggaaggacaggagctcttccgcaagggcctcttaagtgaagctgttcttgctttagaggctgaagttttgaagaatcctgataacacagaaggttggaggttgttaggcgtaacacatgcagaaaatgatgatgaccaacaggccattgcagcaatgatgcgtgcgttggaagctaatccaacaaaccttgaagttcttcttgctcttggtgttagtcacacaaatgaattggagcagggggaagcattaagatatctttataggtggcttcagaatcaaccaaaatatggtggccttgtccctctgcagtcaactgattcaccttatggtcctgatgttgttagattgtttaatgaagctgctcagatgtcacctgaagatgcagatgttcatatagttctgggagtcttatacaacctatcaagagagtatgataaagctatagcttcatttaagacagcactacagctcaaaccacaggactattcactctggaacaagcttggtgcaacccaagcaaacagcatccagagtgctgatgcaatattggcgtatcagcaggctctggacttgaaacccaactacgtgcgtgcatgggcgaatatgggaatcagctatgccaaccagggtttgtatgaggattccattcgatactatgtaagggcagttgcaatgaacccaaaagctgacaatgcctggcagtacctgaggatctctcttagcaatgcttcgcgagcggacatgattgctgcatgcgacgcccgcaaccttgacgctcttcagaaagagtttcctctgtgagccctccggtccaaggcattagagcttccatggaaggaagcagcacactagcaagccgagtgactgcacctgtggtcatggaaatggaattggaaaccagtagcgttttgtatttgcctgttgattcttatatttatttttaggaagtgggggaatgtgtagcaactaggaagcgagggaacaacatccagttgatgtgaagcattcatggcacagtaggcaatagtggcaaaggggtactatacatacacacttacgggacgcacaacataaataaagaatggttgattaataaactatttattttggggacacacccctaggatcaacccctacttgtttcgagtttgaatactgatttgtatcaacaggcaataaataatgcgctttgtaaccttttatatcataatgtaatgcgcacgcccaaatcagttgtgtctaagaaaaaacttgacaaaatgaagtaacaaaaagaggaacttctgtg

SEQ ID NO: 31460 - DNA, 3326 bp, Zea Mays
cagagaccagaggggaagcagccaagtgggtggcagagcgttggaggctgaaggacttgcccgattgatctgaaggaggcagtagccagtgttatatttgcatcaatgcggtgttcagatgtcacagaactagcagatgttcggaagcatttcaaaagcaagtacggaaaagagtttgaagcagcagcccttgaagtgcgacctgacagtggtgtaaatcgtctgataattgagaagctgtcagcaggagcacctgatgtgcagactaaaatcaaaacattgagctcgatagcagaggagcacaacatcaaatgggagccaaaagcgtttgaggagaaactgcaacaaccaactgaaggtcatctgtatggttctgcaacatattctggaggaaatacttcaactatgggatcatctacttctagcatatcaacaccacagcctacatattcaggtgttagtgcggcacctgtggactcagccactatccatgtgccagcaaataaaactgcatatggcagtgccaattctaatactttttcgaaagaaagcattcataatagttccagtgcatcagtacctcctatctcccaacatgggccgtctgcttactcttcagcacaggttcctggttctaacaatatctcacatggaaatccaggaggtccaccttaccctcaatacagcgcaacagtcccagacgcagtatccaggaatgaagatagcaatcagaatagggaaagaaaacctttggtgactggtgccaattggaatgtggaattcaaggatgcaacatctgctgctcaggcagcagcagagtctgcagagatggctagcattgctgctagagctgctgctgaacttgctagtcgtggaaactattctggagataaaggcactggagcctatgattcagccgcatacagtagcaaaaacacagtgaggaagcaacgggcggaacatgtagtgaaggatgagagtttccatgaccagagttcaggtgttaatgatccaagcgagatgccaagtaactcaagaaatttttttggaggaacagaaacatcccatgttgatagtgagaatatatcgacagccccatatcaacagttccatgcctacaatccagacagccatccatatgtttatgaaatgccaactgaaccacctcgtgctcattcacctgacccacgttttgatgatttatatgagagggaaagtgacattggaagatctgaagttgatccgtttgattttcctagagaaaacttccaagatactgcatctgttgggcacaatttcaaggatgtggaaatcaggacacctagctacgatcaagaaagcacagatgactactatggtaattttaattcttcacatgatacattggcccatggcagcagcaccactgcttgggataagcaaaacgacaaagctcaagacaactcttcacctgttgtttttgatcaatatgattctgatgttgaacaagagaatttgttggacacattctcctcaaagcatactgaacaactacctgctcccggagatcatatgagattctcaactgcagattggagtgaacagcataccagtgaatctccatccaagcagagaacgtcagccctattttccagaacagaaacacaactatctgataatttaggaacaaacaaaagtgatattccttcacctcattcttatcataacatgcgtcctgcttttgattcagatggtggtagctctgatgaggaaatagccacaaccacgcatgcagtgcctttaaggtcacattcaggaggatctgcttcgtctgtcctgaacaaaggtggtggacctgatgcttcacccatatttgattattcaggagcacatgcagtgaggaacttgaaccgtgtgcaaagcagagattctgatctttcggaagaagagacagatttagataaatttaaaggttcatccttcgccagagcaaatgagcagcagctgttgccttctgccatacgtacttcagcaacttctgatgataaggaagatgacatcagcctgaactttggtaagttaacgcctggactaagaaacaaacccaggcaacccccaccatacaccaaagtttccagggagagcattctgcctaagcagtccttgcctaaggtttctgctggcactgaagagtcagtcgattctgaagagaatactacattcaaacaggatagaagtagtccccaaagctcattttcagccaggacttcttcaggtaaagactacgacagtggactttatgaaaggaaccgaagtgttggaacacactgggaagcaaaatcaaccatagcaagaaattcctctggtttagatgatgctgagaagttatctgatctacctactaatataagtcttccaacaactaagagttctgaacgctggaattcgagtaaagtgccttatcatgaaaaaccaggtattggaacacgccgagaagtgagatcaacactggctagaaattattttgattcagatgacagtgaagaagaactagagcaacagcagattcctcagtcgaagcaatctggagtgctgatacagtcacgcaggacacgggaggtgacatcagacacaaagagagatggtcgtttccaaaccggagctcagtatggtgatgaaactgagagtgtgacaagtaagacacaagtccatcaaggattcaacagctcaagtactgaacggagtgaaaggagggatccaagtgtgtaccccagggttgcagtacagcgctcttcgtctaaagctgagcagattgaatctccgatggagagagggaagccacaaggagctgaaatgagaagcaccttatttcgaggaaatgaagaggacacagaaacctcatctggaactccaaaagaaagcacccccaaaacaccccctgcacatgttcatcccaagcttccaacagactatgattctttcgccgcacattttaggtctcttcgaacaaaccggccttaggtttacacgacatatagagtttggagtttcagttgaattaagtcatatatacgatactatgatacgttttatggaggttgagttgagatttgtacattatagcaacactgttttctggacactatcgtgctgtgctagtttgggcgtacaattcttttgttctcttgtatcctcatatactcaatagaatcatattgtaaagactttaatttcctgttagtgattattaataagcacggcatgttggcatatgtatagaacatgcggggttctttcattccattgtaacgggatctgctacactcatgctatgagattgtttcatg

SEQ ID NO: 31461 - DNA, 2770 bp, Zea Mays
cgagccccaactggagactgctgttcccgtcgaccggattcggttcggaccgcagctccccacagcccacactcgtccgtccgcccgtcgaatggcggctcccaaaccctaagccacagatcccttcccctgcctcagcttcgaacgccctcgcctcgccgccggtctttgtgtactgccgctgtgtccgtcggcgcggatcaagggtccgctccgctgcaccccgcggggagaaaggggcgggcctcggcgtcctccgctcgtcgcccgagtgtctgagtactatcaggtgcaagtccagccgaactgattgcatgacatatgaaatagcgagcgtcgaatgaccttctctatggatatggatttgaacgcatcaccggtgcctgacgatgatgagcagcagccttacaatgaaccagtggaggctgagtatgctcaggaggaacatgttgaatctgctgtcgcaacattgcgccgggaacgtgaagaaagacgcaagagactaaagagagagcagcaggatgatgggtcaaggctacattcccagcagattagggttgattatgctcctcaacccaaaaggcatagtcgcatcaaagaggcacctcagggctggttggactgtcctgcatttggggagccaatagataaaatcataccatctaaagttcctctcgatgaaacattcaatgagtcagtgcctcctgggaagcgatactcctcaaagcaactagttaacaaacaaagaaaagctggtcgtgaaataggtctggtgattgatttgacaaataccaccaggtattattcaccagctgaatggacgaagcaaggtactaagtatgcgaagattgcatgcaaggggagagatgcggtacctgacaatgaatctgttaataagtttgtctatgaggcgataaatatgtttgctcaaaggcggccacctggcatatacaagagggactatattgaagcactatattcattttaccatgaggtccctgagaatatgatgatagcatgccctccaacaccagaatggaagagaccagatgatctcgatttaaatggcgaagctaagcaggatgatgacgacgacaatggtgatccagaaccaccgcgtaatgaatcagaggataaaatcatcaccaacgacgatgtgttaggggacgaagtgccatatgaccagcaagaagctttgcgtgtgctatgttataagttgcttgaaatgccccttataaggggacattcacaatttcctggatcacatccagtttctcttaacagtgaaaatctgcaactacttagacagcgatactactatgctacatggaaagctgacggaacacgatatatgatgcttataatgagagatggttgtttcttgattgatcgaaatttttgctttagaagggttcagatgcgctttccccataagagccttgaaggtctgcatgatatgaccttgattgatggagagatgattatagacacggtaccagattcaggcttgaagagaaggtacttggcatatgatcttatggcacttggtgcagtgtccaaaactaagttgccgttttctgaaaggtggaaaatgctggaagatgaaataatacgaccacgttattatgagaaaaataaatttgagagtggttctaagagcaatccgttgtacaaatatgacatggaattattttcggttagaagaaaagatttttggctgctctcaacagtaaaaaaggttcttaaggtgttcattccatccctttgccatgatgctgatggccttatatttcagggctgggacgatccatatgtaactcgtactcatgaaggtctcctgaagtggaaataccctgagatgaattctgtggactttctgttcgagcttacgaatgataatcgtcaactggttttcctttatgagagaggaaaaaagaaactcatggatggtgcccggatagcatttactgacgatgtagatccatcctctatcgccgggaggattgttgaatgctcctggaataaggaagaacagtgttggtcctgtatgcgtattagatctgataaatctactccaaacgacatcaacacataccggaaggtgatgaggagtatcacagataacattaccgaggaaaagcttctcgaagagattgatgagataagtcttctcccgatgtatgctgataggatgcagcaggctcatacaaagatggcacaacaacagcggcggagattgccaccacagtgctagccagtgctggggcgctctcctaccgccctagccagctgctggcttccgtagctgtgtaattagtagaggtttcagtagccccatatgatgatggctggctgggtctggcctgccaactaattctttgcacctcatttgtgtcttctccctgccctcccacccacctgtataggcgtcgccgcagagtagtttccctgtaaattgtgtactctatgttctcccatattctcccctatggttttatttttcatgggtgtagaatagcgtttaacaagagggtggtgttctaggtacattagtgtacgcgttactatctctcggtgttgcggttgccttgtgctagaataaatatggttaccatctgttgctgatgggtcatgtggttcccccggcggatatcatgtggttgcgtggtatgggttattttcgtcttctgttttgttcgcacctgatccgatccgatcttttgttcaatgaagaagaaaaaaattattggtaaaacctacgtgtttatgg

SEQ ID NO: 31462 - DNA, 2466 bp, Zea Mays
ctcatcccgccatttctcattttggtggtccagaacgctaaaaccctagcaggaagaaaagaactcccctttcttgcttcgtgttccacttccacccgcgccttcctccggcaagtagagaacccatacaagcccccgtattgtcgcatagtcatcctgcggcgtcgccctcctcctttcccactcccaccggttcttcttgacctctcgagatcattctgcccaaggtgctcgatccccagaccagcgatagggaatgttgaagactgtttctgtgagattgtcgcgagatgacagtctccggccatgccaagcactgctgtctcggtattcagaaactgttgtccctttgattcggaggttttgctcgacgcccattaaggttgaggaggtcgccaacatcgaagctgatggaaaggtctcatatctggatgccgctgctctgccctgcgacaactctgactgtcgtggtgagcccagtcatggcagcaggccatggacgaaacggttgaagcattatggaccttctcagaagggaaaccgtaaccatcatgaaacgaaactgccaggcagtggcagggatggatcttctaggaagggcagccaccctcagaagggtaaaacgaaactgccaggcagtgggagggatggatcttctcggaaaggtagccaccatgaaacaaaattggcagacagggatgaacttattcagaagggaagtcatcatgaaaaggaattggcagacacacccttcaaaccttttcttttccagattgtattggatacttctatgagttctcttatgcctgtacttgacggatgggtgaaaatcggtaatcgtctggaaagagataaagtcaatatggttttgttccatctgaggaagcagagaatgtataacaaggctctgaagtttgtggagtggatcgaaagaagaaaactattaaattttgaagaacgtgattatgctagccatctggatttgatagcacggaactatggtgttgaagctgcccaaaagtacatcgagagggtcccagaagccttcaggagtgaggtgctttatgaaactctgcttgttaactgtgtatgccgtgatgatgcccagaaggcagagcaagtcttcaatgaaataagggaactctctttgcctttaactatctctgcttgcaaccaaatgttattgctgtacaagagggtttctcgaaataaggtggttgacattctcacattgatggaaaaggaaaatataaagtattctatattcacctacaagctcatgattgacttaaaagtgcgatcaaatgacatattaggcatggaacaagtcttaaattctatgaaagaaaatggtcttgagccaaattttaccatccagactatggttgctaaattctacatatctgggtgctttacagagaaagcagaagaggttatcaatgctatggaggtacatgtaaaggctaatcgtcatgccgtcaggtctcttcttgacctctatgctattcttggaaggccagttgatgtagagagagtatggaacttgtgcgctgaaccaaagttggaggactttttggctgcaattaaggcatggagtaaacttggacatatcgaaagagcggaagagatctttgacgtgttggtaaagacgtttccgaaactcacttccaagtactttaatgctatgttggaggtgtatgcggaaaataaacttctggacaaaagcaaaaagtttatagaaaggatgtgtttggatgggtgtacaatcggccctcttacctgggatgcagttgtcaagctttatgtgaatttaggcgagttgtcaaaggccgactcgtttctgatgaatgtcacagaagataatcctgacagacatccccttttcagctcatatgtaatcttactaaaggcatacgcagaaaagggcgatatccataacgcggagaagatatttgatagggtaaagcagaccaacttccctgcaagaactctgccctataatttgttacttgcagcttatgccagtgcccaggttacaccctatgggttcagagagaggatgaaagctgacaagttcagcccgggcaagagtcagatcgaacaactgaagcaactcgacagcttgtagaaagcaggcaaatccagattgattttcttccttttcaccccttcaccgtgaccacatggaacattttccttgcaaagcagttagactggaatagaagaatctaccaggatgcatttgttctttcagcatgaattctgtgcaccttggtatgcttgttttgcaggttgatcagagttttaggcgagttgctagccggaagtagacacttctgatggtatattatctgattagcttcgtactcctagctaataataaattgagggaaatggaaacaagtattttttgggtttatttatattactcaatcaggaagttaagatagtagtcattacaaaaga

SEQ ID NO: 31463 - DNA, 735 bp, Zea Mays
tttcgtgatctttctaggtcggtgctctgattgagcttcttcttaatattatactgtaggggcggtctttcccctaccggccgagttttaatatacataggcaagaagaaaaacttcatttaagctcagggtcaaatagccgctaaggaaggctacaacatagctttaagtcatgttcagaactttcagttgtatacttatattcaatacaccatgtaagccaattttggcactgtaccttccttgacctactaggtgtgctatcaggagtcttacgtgcactttcacctcctctcttgcgttttttagaatttgaaccctgaccagtggataagaacaaagcatgcagagagaataatcatgcaagttaattctggttccaaccacaaaacatcagcaacagcatcgctgataagaaaacagaatcataatgtacaaatatgtgttgtaacctggtcatcagagagcccagaatcagctgcagagtgaggttcagcaataaagtccaacagctttgacacaatatcttcctatatgagttaatcaaactacattagaatgtaatgtatcgaattaaccaaaatataattccaagaacaaggcagtaaaacaaaacctttctaatgtttgcttttggagttggaatgccaagggtccaacaaaggtccaacagcgtttcttttacacacttgtcaagcttttcttttgccttgactctgtgcttttcctacaaac

SEQ ID NO: 31464 - DNA, 1115 bp, Zea Mays
gcctatcaccccgaaggcccgaaacaagattagattagagatagcaaaaggcgaagcgacggtaaccgccaccaccaaatcgctaccgccaatccgccatgatgctcccgacggccaccgcgacggccgtcttcctcaccgcggcgccttcctctttctccacccgccgtcggcgcagtcgcgccatcttcgcatccctttcgccgtccttctcctcctcggaggagccgctgctggtgcgcgcggcgcggggcgaggacggcctcccacgcccgcccgcgtggatgatgcggcaggcagggcggtacatggcggagtaccaggcgctggccaagcgccacccctcgttccgggagcgctccgagaacacggacctcatcgtcgagatcacgctgcagccgtggcgtgccttcgcgcccgacggcgtcatcctgttctcggacatactcacgcccctgccggccatcggggtgccgttcgatatctcggactccaaggggcccgtgatccaatcgccagtacggtccaaagagcaggtgagggagctcgtccccatcgaccttgatatgctccagttcgtcggggagtcactaaagattctgcgaaatgagattgatggaaaagctgctttgctaggatttgtgggggccccatggacaattgcaacttacattgttgaaggggggatgaccaatacgtacacaaatataaagagcatgtgccatacagctccagatgtcttgaagggtcttctctctcaccttgcacaagccatatctgactatatcatttaccaagttaactcgggggcccagtgtatacagatatttgattcatggggtggacagcttccacctcatgtgtgggagcagtggtcaaaaccatatatcaaacagatacggtgcactgggcaagacactcatagaggcttcaaatacttgtactcggttttcaaagactcggtattcaaagatgatgtaaattatcggatatgtttggtgcaccattggacaggttatcaaacatgttatttagagaggtttgtaattatactacttatcgatgtatttggtatgcacattggatactacgtacagtaatggccagaacttgtc

SEQ ID NO: 31465 - DNA, 2429 bp, Zea Mays
ttggctttaatccaaaatggtttctactggctttaatccaaagcgaacaattgcaatatatttcttaagttagtgggggaggataattgcatacccgtaacagcatacatgcgtttacattgagttttttctctctcttcttgttgacctgaggtgtactccatgcattgttcatgaatggtagtggcgagcaaggtcaaaaggtagaggctgaaagccgcaagccatgcaccgcaatgcaccagcacgcagcacatgcattgcccgccaattcacagtcacaggaacgaggaatcctaccaattccgcgtcgtgacaagaaaagcttcccaacatctctgtcacgggctctcgtagcagaggagtaccactcagcgtctcactccttccccttcccttcccttcccttcagggaccaggccatcagttcttcacgagctgggaagagctcgtgagccgtgcattgaaggcaatggccgctgttcgtagatgctgcctgctggccgcggtgctgctgtggtcggcgctcgcttcagcggccacggccgcgccggcgcctgtggtggccgggccggtgtccagggtggaggacgccaccatgttccggatatactacggtcagagcttcaaggtcatcaagaactccggcgatggcaagagctaccttctcatgcagaacacgtccaagatggcatccaagacgaagtactgcacggggaggattaagtcgttcgtcatccccctcgccagcttctccgtcgacaccacgacctctccagtgtcattctttgaggtgagcaatgcatgagactctgcagtgcagtccaattggcaatgggtccttctgcaagggaaagaaaaaaaactcagaaaaatgtctaaatattcaattcctcatctactccgaacttaaagctaaagaaaattgtactcaggacagtgttactaataacaagtatgcatacacattaaaacaagagcagcaaaagaaacagaggagccaatcaagagagagtatgctttaagcttatggcaaactcataagtacacttgacatatatgcagctgcttggagtgctagagagcttgaaaggaataacatcgaaccaagtcgcttctcagtgcgtgctccagtcatatacaagtggaaatgcccagcttgtgaatagaactgatgtgcagacactctcgcagtttactgcgcatttcataagcgatacagatgaagacagaggttgcaactttgcagcatatgtacccttagaagagggcacaccattgcagatggctgagtggatcaagtacctgggaactttcacaaactctgaaaacagggctaatgctgtctacgatgcagtaaagacaaactacctgtgcttaagcaaagtagctgcaaaccttggcacaagattcaagcctgtagtagcgtggattgaattcacacagggaatgtggacatttgttaaagaaagttacatcttacagtatgtcacagatgcaggagcagaaattgttgatgcaactattacggataagagatttaatagttcagatccagaggatatggataacttccatgctattctgtgtgtgagtatcaatcactcagaatgtaatattacaactgtaatgttagttgacgagctcactgttgcatgtgagtgtgtgacgtacaaaagacacatcctcttttggccataaaagggattaatgctgacacaattaataattgaaataaactggactggttgtatcaaatgaacaatgcctgcaaaacaccaaatggtctattacttgacacatttttcaaatgactctgcacttagtaacagttaactaagcttggttcacgaatattacagacagtggacgtggtcatagatcagacatatgctttggagcctgcagagtacaaactatccacctttttggagaatattaatgttagccacgactcctgttacagttttgtatcaaatcgcagcatatggagatttgacaaaaggataggagcttctgggacacttggtaaccgaagcaatactattactagtatcatatcttttacctatgtaatgatctaatgaatttttccatctcaaagaaatgatgtcatacacatttactctttttccctttaagattggtccgatggagctatctcacagcctcagttggttcttggagatctcatagaaattttcttcccaacggggaactacataacaatttacttcaggaatcttgcaaaggcatgacctgtgttttcatttcgctacctctttcctttcatttaattgatttatgatttctccagaacaaggttgttgatcagtggaactataataacacaggatgaaggggtcacagagattggtcctgaaatgtgcactaggagcatatccacacccatggatcctataatccca

SEQ ID NO: 31466 - DNA, 2579 bp, Zea Mays
ctgccctgctcagctcatcagaacacagaaggcaggccacagcccgcagattgtgcgaccgcagagtttggatgctcctgcctatgcaagcaagatgtcaaccaccagagatattgtttagtgctgggcaagttatgcaattttggatcataaattacacagggacaagataattatggaccgcgcagacacatcaggctttgtcagtggtggttgctttggtactacactcctgctgatattcttccattttgtctattctacgatccatgtctgaaagaccctcaggaaccctgcagctgtctgggcagaaatatcatcaggcccctgttctttgagatctctggtgttttatctcattttgttttccaccattgttatattgtctcaactgtgatggataacggcttcatggacatccctcatccgcctctggtgaatgacccctttgtgttagtgggatgcccagcgccagcctccacgatggagaacatgggccaaagcacaatctgtatggatggcctgaacccagcaatggttagttgcagccatgttaatggaaacacacatataatgaacggcttaacagcaagagatgatggcagcaggttactccttggtttgggcccaacaccgaatttttattctgcagtgtccacgggctcaaaacaagctcagagattgtctggccagagttcaacttccattgattcagggatgctgaagcttggccttcagacggatgacagggaagcaattcaatatctgcaacaagcaccgaatggagcactccattctttagatattgttgacgaggcttcaacatctgctgctgtaaggaacatgggtggttacatgccatccctactctttgctccctgctccaattctattgccaatgagacacaagtagaaaaccaagattctctagacctcacgcacagcaccagcaacagtcagcaccttcaacatgacctccagctcagccccgaaccttctgcaacgaccgagtcatcatttggtatgagttctgatgttgtcactgcaacaactacatcagagcgtagccattcccgacatcctaagaaatgcaggtttaagggatgttccaaaggtgcaagaggagcatcaggattgtgtattgctcacggaggtgggcagagatgtcataaacctggatgccataaaggtgccgagagcagctccgcgtactgcaaagcccacggtggcggtcgtcggtgtgaggagcttggttgtaccaaaagcgcggaaggaaaaacagattattgcatcgctcatggtggaggctgccgctgccaacatcctggctgtcctaaagctgcccggggtaagtctgggcggtgcatcaagcacggtggtgggaagaggtgctcggttaaaggttgcatcaggagcgctgaggggaaggctgggctgtgcatttctcatggcggcggccgacggtgccagtatcctgattgcggcaagggggctcagggcagcacattgtactgcaaggggcatggtggcggcaagaggtgcatctttgatggttgcagcaaaggcgcagagggtagcacacctctgtgcaaagcacacggtggtgggaaacgatgcatgtttgaaggaggcggcgtctgtgcaaaaagcgtgcacggggctactgaatactgcgtggtgcatggaggagggaagcgctgttccgtgcccggctgcaccaaaagtgcccgtggccgcactgactgctgtgtgaagcacggtggcggcaagcggtgcaaggttgacagctgtggcaagagcgcccaggggagcacgcacttctgcaaagcccatggcggagggaagcggtgcacatggagcacaggctgcgaaaagttctcccgtggcaagagtggcttctgtgcagcacatggtaccttgatggccaggcagcgagaagaagaggtggtgaagaatgtagggagcatgattggaccaggtctcttcagcggcattgtggcgtcatctgccaccgcagcaagcagcatgacgaacgagcactcggcctctggtgtcagcaccgcttccgactgtgacggcacggtgaggagccaatcaatgattcctccgctggtgctggttcctcgctctatgatgccttcatggtcgactgagcctgtagatggaggcagagagggaggtcatgttgttcctgaggggagggtccatggtggtggcctactgtcacttctcggtggcagcttcagggacgccgacgtggaaaagctttgaagattttgtcagtttgtttgtacataaacaggccgcgttcccgcctatagaattgttattgtgccttttcttgtctagataaacatttcaaccttcatgtaccggttaaatcaatactggtttagtccattgtaaagtggtgactgtcaattgtcgtgaacacttttagcttgttggttcggttcggttgtagtctgtctgtttgtgcgtattcttaagaaactcgtctggactttctattgcaaattgtcgaatgtcaattttctgaaatctggaatttttcagcatataggtccaggttagtctgt

SEQ ID NO: 31467 - DNA, 2205 bp, Zea Mays
cagactagccctagtcaagccatccgggcgcccggctcattagggttcctcacccaactataaataccactcgacttcccccacctccctcgtcagctgcagtgtcaatccctcctctccgccgcctacagctgcggggagctcgccagtcgccacttcgccagtcgccacttcgccagaatgttccatcagtaccaggcagcgggtcgcgcgctgccagtccccgctgatgagcaccccaagatctaccgcatggagcttgcgctaccaacgaggtctgctccaaatccaagctctggtactatctgaggaagctcaagtctcaagaaggtttaagagcaacggtcagattctcgccatagacgagatctttgagtgtaaccctacaacaatcaagagctgtggcatctggctgtgttaccagtgcaggacaggttaccacgacctgcacaaggagtaccgtaataccaccctgaatggtgccatggagcagatgtacaatgagacggcttcctgtcatcgtgtggtcaccctacatacagatcatcaagacggcaacaatcaactttaagctttgcaagagggacaacgccaagcagttccacaattcaaagttcaagtttcctttggtttactgcaacaagtcaggccaccaaataggaagctgaagaccaccttcaaggctttaaggcccaacttgttcgtgttatccaacttgccctgacaccctcccaaatctgtgaggctgtcagtctggtggtttgctagttcaggatgtctgaccataggcgtagaggagggagacgtacccagcaagagcaacatgattcgtaggatgaggcaccccattcgcagttgcctcccccatccccgatgacaatggagaagatgttcctcatgcaaactcaagcagttcagtcaattgtgcagaccctgatagccatccagcaggtgcaacaacaacctcagccacagatacagatatcgtagatgccaagagataatgtgcggagtttatgagaggtcatctcctgtgttcgctcagtctgctgacctcatggacgtcgaggattgcctgcgtatcgtggagcgtgagttgcacatcgcccaatgcaacgacagagaaaaggttatgtttggtcctcgcctgttaaggggagtagctcagtcctggtgggagtactatctcgctatccacgccgagcccgagaccattacttgggaggaattcagggataactttcgtcggtgtcatattctagaaggtctaataatagtgaagaaaggaaattctgacactaaagcaaggacccatgtcagtgagtatagagatatgtttctgcaattgtctcgctatgctactgaagatgtcaacactgatgccaagatgcagtaccgtttcctaagaggctttgttgatccccttcactaccaattgatgaatcataccttctccatctttcagcacctgatcgacagagctatcataattgagaacaagcgcaaagagatgaaagatcaaaaacgtaagattggtggacctcagcccgagagcaacaatcgtccccgtttctcaggtaatccacctcagcagttaaaacaaaatcactgtcagggatatcaacagcagaactagcgtctgcatcagtagcaattccagaggcagtaaccccagcatcagcagcagtatagttagaacagtcaatcgggaggaaatcagttctagaggcagaataatcagtcacctcgtcttcctgccccagcaaccaactagagtagtcaaccagcggccgatgcactgcacctgggatcttttcagatactgtaccatgacgatcttcttcagtgtgcctgacataccaacttcagggcacttgttcttcgatttcatgcaacaaaccactaagccgactgtaccaaagttgttcccctatataccagcttaaattttgttacaaagatcttagtcaaacattcactggatcgagcactatttggttttaaagttgattcgatgccactgttagtctaatttcagagtgatactcgactgaaagcccatcttctagtccattttgctacaatttctgtacaattatatatctcaatcacttaatcaaacattcactggaagaaaatgagttgtctttgtaagccggtgcactatgacccaaatagagtcacatcttttagatgtcttgggta

SEQ ID NO: 31468 - DNA, 562 bp, Zea Mays
ggttccatccgtcttgtatgggaatgacccattgagcaagccaaaaagatagatcattacatgtgctcggattgtgctgaaaaaaatggtgcaaagagaccctcaaattcatacccagtttcaccaaactctgattctaagatcgaatcaaagaggcgcaagagataaattctggcaaaggagatcgatatggcgtctgctcctcattactgatgcatattgagatgtacactgcgagagaagagccaagccaattgtaggacaaaacttgcttaacttatcattcttctgtgtattctggggacgtttcctgcagcttagacatttagtgtgatgagtaggtcagtcagtcccctcccccgctgcagcgcgcgcatgatcagctgctggtggcgggataagtcgggaaatgctagagcgctgatgattctgtcgatgtaactttatcgggttgtgtgtgtgtgtttgatgatagcttgactgctgtttcataattcagttagatgttgccaagcaaagacttgagataatattgagttcgatcttgaaacttgaaacgtgc

SEQ ID NO: 31469 - DNA, 2400 bp, Zea Mays
caataaattttgaaaaaaagatagcctaagagcatctccaacaactcccaataattctaatccctactgctctataagcacggtgtgtaggcgtccacaccgtgcgcgttctgcctcccgacgctccatgcatctcggtcacgctttcatctccgccatcatcggctacctgcctcgacatcctccccctccgctcaccgtccaggatctcatcgcgcacgcctagtctgtcccaccccgacatcctcccccaccacgccgtgcacgcctcacgtcgtgcgtctccaccacgcccgccgcacacgccgcgatgagatccaggaaagcagtctgcggatcccccgcgacatcctcctccaccgcgccatggccgcccccgacgtcctcccctccgcgccgcgcccgcccgatccaatgatgaaagcgggtcggatctcgggggcacttcccccaccactgctccaagctcatggagcaccaagaatccgccaagtcgagccctgagctccgacgtgaacctgcgaatccagcgcctctgtcaggcgggtgacctcgcatgcgctctgaggctgctgggctctgacggcggcgtagatgtgcggagctactgcacggtcgttcagctctgcggggaggagcggtcgttggaggctaccaagagagcacatgccttaattcgcgcgtccagtgtcgctgccacgggtggaaaaagggagcgtctttgggaagaggttaatgctggcgtacctgaaatgcggcgacctgggcgaggcaaggacggtgttcgatggaatgcctcctcaagctgctgatgtccgtgtccggacttcgctgatgagcgcgtacgccaaggcgggtgatttacagaaagttgttttgctgtttaggcagatgcaagtgctgcggggtcagtccagatgcacatgctgtttcctgtgtcctcaagtgcgttgccagtttgggcagccttacgaacgagcatgcgcggttgcaaatgctctgatcgccgtgtactcgaggtgtggacggatggaggatgcgaagcgggtatttgacagtatgcatccctgggatgccatctcttggaattctatgattggtggatgcttttcaaacggatggcatggtacagctgttgattttttcagcaaaatgtggtctcaaggccttgattctgtacaaagtgggatagatgatgctgctcttggatccaaactggtattcatgtatgtgaaatgtggggacatgggctctgcaagaagggtgcttgatgcgatgtcatcaaaaggtaatgtgcacgtatggaatctgataatgggtgggtacgcaaagggatggcttggtggctcatggatatatagtaaaattgggtttcagggcagagtgtgcagtttgcaatgcactgatatcattctatgcaaagtccaacatgattggcgatgcagtcttggtgttcgatataatgcctcgtcaagataccatttcttggaattatgtgattagtggatgctcttccaatggactaaacagtgaagctattgagttgttcataagaatgtggacacaaggacatgagctggacttagttacattgctaagtgtttttgccagcttgtgcagtcacgctattggtttgcaggaagggtggttcatggttactcggttaaaactggattgattggggaaacatctcttgcaaactggattcattgttcatgttgctaatgctagcaatttttcctaccagatttcttggtatatcttttaggaagcctgctaaatctacattggaacttatctttaaaatttgtatgtcatcaagtccaattttatttgtgcaataaaagcagggaggcttttatctataacattttccttttatcttttctgtagagatttttctcacaactagctgttaggcaacttctatgttttcctgtagtgtatgtgcgcaaccatgggtcggttcctagggcggactggtccacctggaccgtggaggtggcggggctcgtgagacgcctcgccaagttgaccatggagcagctagtgacggagttcgagaccttggaactccccgtgacgctggtatgcgtggccaaccgacacaaggagcataacatggtgtgccaaaaggtgggcttcaactagccccgacgccatctccatgtccatgcggtgcggcacgcgcctctacgacgtgttgtgtcactgcggtgtcatgggcaccacggatgacgttgtcaacgtgtgcttcaatactgattctttagaaatactttgtgccatattataatattggttgcacattagtccattctatttaatcacacggatttcacaaattataatgatgtttgtcgttccgtatctatgtttcaaactaattttgtactcccg

SEQ ID NO: 31470 - DNA, 1888 bp, Zea Mays
cgaataccaagtgtggagagtagggtgctgtggacgaggcgagctgaggaagggaagggaaccctcttgaccgccggcggcgaggggagatgccgccggagaggacgaggaagtcgaggacggaggagctgtgggagcgcgaggtcggcggtctcccacccaagcgcttcgccaactccgtcatggcctccaagtctctcaacatccaaaagcggctacggaagcacaggagctgcgtcaacacgataagcttcagcgcggacgggaggctgctcctctccgggtccgacgaccggaccctcgtgctgtgggactgggaggaggcggcgccggccttgtcgctccacactgggttcagcagcaacgtgtaccacgcgctgttcatgcctgtctccggtgacaggagcatcgtctcgtgcgctgctgaaggggatgtgatccattcacagatacaggaaggggggcgtgtggttacacacacacacaaacttgttgagttgggctttgcagtacacaggttggctgttgagccagcaagtcctcacacgttctactgctgctgtcaagatagctccgtgtggctttttgatctcagggcgcgaaatgccatggaattgtttaaatgtagggctgcgaactatcacactgctgaaaatatcgcactctatgctatttccttagacccaaggaagccctgttgttttgcagttgctggatcagatcagtatgtaaggatatatgatacccgtaagatttttgtggatgggaattctagtttcagtcgcccaactgagcacttctgccctccgcatttgattggtcgagtggaagaagaaataactggtttggcctactcacagaccagcgagctattagcgtcctatggtcaagaagatatctaccttttctcaagagagcatggtttacacttcaacaatgttgaggtcaataaacgactcctggaggatatgattgagccttcatttagtgataagttgcctgtacctaagaaattcaagggacaccggaatgaggaaaccgtgaagggggttgacttccttggccccaactgtgattttgttacctctgggtcagactgtggcagcatatttatttggagaaagaaggatgcagaactgatcagagcgatgcgtggagataagcgggttgtaaactgtgtcgaacagcacccttctgggattgttctagcaagtagtggcattgagaatgatatcaagatttgggaacctggtgaaggtgaaaaccgctccatcgttcaagctgacgaggacgatgacaatactgtttggatccacggcagcagtgattctgatgacttctttgacgacaatggtttcggtttgatggtcatggaaccgatccatttatatgaaaacagcgataatgattcatatgaggaggatacatcgtcagaggaacatgacagtgatggtgacagcagtgccggagatgaagattccgatgggggaaacagtgcaggagatgagggcgacgattgatgatcaaggacacggatccatgcctattcccagggagcaaatcttcatccgagaacagctgattcttttgtggttgtggttgtggttgtagccttgtaggttattttgggaggagcaaggcttacccaaaaaaacaaaaaaaaaaacgtttttagttaggattatcatgggttactgtttggtgttcctctgtgtatatatttttcgtcggaattggggtagtctaccgtaccgatgcaaacgtactgtggaagctaatgttcgaacgggagactgaaatggtcatgatgttgaatggcatcaagtattcaaccatttcatacaatagtttggtggaaagtttataaaaaattgtctcctcttcgtgg

SEQ ID NO: 31471 - DNA, 4720 bp, Zea Mays
tctcaaggttctcttacctccctttagttctctacctccatattttgctctcattgctactgtataagatttttcatgccattcttgagtcaccattttaaatgattcgatcttctgttatttctactcactcagctgaactcccttattttttctaagcagaaaaaatcttatgcgatttctactctctccgctaacctcacattttacggttcatcgttttgcagtttccctgccgcacttcagttctctatcccattatatttttaggaatgaaatgatgaagtcctgattctcttacgccacctcgggataacacgttcattcaaagccagaggtctagggagctgagtttctacctacaacattttcctcagctttatttcttgtgctacctatgtaacaaaatacatactaaaacataaaaataccatgttttgcagtagttgaaagttcattcaaataaaaaaatttggacggctgaatatcgaccatcaacaaagcaacaaaggaaatggatggcaacgacgaaccagatccccctacttctcatgtgacttctcgtgtaactgatacttgggcatttactcctcaaagaaagatttcatccatgactacccacaaaaacgttgcactagcatgaccgattagtcccccaaggtaccaatgaatacaaataattcactatattaattagttacaatgactaacaacattaatacttagtctgttgcctctaacattacagtgacctaggtctgcatctgtactttccacgacatgttcaatctccttctacggccatgtctagactttccacatcggactcatcaagtgtgagccaaaagctaacatattctccagcaaagaataaacatgagttcacactgccgacagccttagccggtatggagcttggcctcgagtgtaggcccccaggaatgtcaggctaacaccaagccaagctgggttcgtcttctacatagtctcgtttgccaatatgcgatggaccccgcgctggcgagggaggtcctggccgccatcaaggctgacgccgcgggcgctctcagtggatttgcggtggcagtgatgctgttcgtggccagggtgccgaggttcaacgagggtgccgtgagtgtgctccgggatgcggtcgtggtgtcccgccgggattaccgaatgtcaaggcggtgcaagtggttgccggattgtatggaaggggaatatgcacgggccactcaatgtgtcgagaagggaatactaaaatctgtcgacgagagcattgttggcagggagcatgttgtgccaagcattgttcaggtggcttttcgcctgttagaagtctcagaaggtgatcaaggtgaggaagctggcttaggtgaaggagtaatgagcaccgaagaaataggcattaatatgctcaaatcattgtttgaggtccatgaaatggcacggactgagataattgaacagtgcaagttccggattctctcggcaaagcctcagcaaagtgtgccagttctcaggttgattggatgcttgattttgagtcatccatttccaatgctggaattcattgcacatttaaaggagttgttggattatttttcttttatgaatgacaagatatcaactgctttgatcagttgcatcttgccactcacaaagttcagccgtgatctgaaggattacgtaatactggttgtaagaaaggcgatgttcaagagggaggacatggttcgaattgctgctacaaatgctataattgagctgattattgcagaaaacaagaaaaatgaagccaatccttttgaagattcaacaagtcagccaagctctagccaacagcctgaaacacatctagagtttggtaggtgtctctttcaggaactaagtgggttgcttcggagatgtctctcacatcaggccagtgtcaaagaggtcttgtacgagggtcttatacgtactgctatctctgatccagctgtttctgacaatatccttgattttctctggcctcacttccaaaactattactcagaggatgcagaatgtcctcttaaaattggttcatgcttcaaagtagagcatgccaaactatgcattgtggaacctttagattgtctgctgtcatgtatctcaagaattctgcaaattaagcaacatagtaaatgtgaacgaccacgtgatgcatattggaagtgctttggttttgctgcttcacaagataatgaggttggacgagcatcatcaagtgatttattcgtgaaagctttatcaagcatccaaaagtatttgaggatatccctcacagagcagagaggacaaagccaagaagctggatctctttcttcaccatcagagatggctcattgtcataactttgctatgcttggaatcattgaggtttttattgatttttctgcttcaaaactggagaaagcctctggcaaatcgaaggaaatgatagaaaaagaaatcgtggagcttgttgatgcgcacagtggctttgagaaaaaaattagcagtggtagggaaaggatagcacggagaagagcaaatgctggtgatgctacagataagcacaccaacgaacccagggagaattctaatgcttcattgcagaaacatcatggaaacaggggtaaatttgctgattcgagtttgtatgaactttcggtaatgtgtgtcaagcagtgccatgctgataactacaacaatgttagtcaacattctagccaaactaaattgaaccagagctccaatttgacatcctttgtactgaaagcctttcttgaattgttgaaatcacttgcatcaaagcacagtagggacttcacaataaagctgcatggagattttaaaaagttaagccagccaataatgcagctagtatggtgttttctgttagacccaattcaagaaaatggtggaagcaagaagaacatgacccaaggaaagaaaaacactgagtgcaaaaaggatcagttatatttggctctgacatgcctaaaaaaattccttgagccaagtgtttcaggagaacactctagtgatatcattgattttctaatatctttggctccacctaatatagaggatacaatgggtactggggatcttgacaataatgataccactatggttgaagatagaagcacaagaaatgtccatgtgattttgaacatactgaagacgttatatgccagacttcttacccaatcagttttacgtgaatctgaggctgtaattgaattgattctgggtatttcaagaaaactgcaacttgaacgaaggcatcttgttggaaaatgggctacagatctatgtagaaagaaaaccatgcaaagtcctagaatggcacgagagatgttaaaactagctatacatcttacaccagctccagatgacatgattcttgtttatgaggtgtctactgagttgatgaatttaatgacctctggagatgatggagattcttctgatacatttcatatcattaactgtaaaacaaagagctcactcgctgctctctctcttcaaatggttgagtcatctcttactgaattggattggggctttggaaagcttaaagcaatgcttacattaggttatgattgtgctaacattgatgaagatcaaccagcagatgaaataatgctaaggttggctttggagaaagcactctactcgagatcaacattagtagttcaagtgctctcttcctttgcacatatgagccctatggatactcaagcagaacattttctgaaattgactgtcaagttctacaagcttttaactcgcatgtcaaagtcccagattgtacctaaaggctacagacaatccattccaagcctcaagtttcagaaactggcagaagtaacttgcaaaatgctcaccgctcccctttatgattttgtgtttcaacagaatcagcaaatacccataaagggaaacctcgccaaaattagaagagaaaccaaatgtatccctgatcttatttttcagattgaggattatgagaagtatttaatacagctaagcaaactaactaaggtaaaccttttgaggcatgccaaacgcagtgtagcaagagacttccagataaaagataaatctgggggacaacaggaagatgatcacattccagacaatgctgcagcatctgataacgaggctgataaggacgcaatgggtccaaacgcaccagttgaatcatgtgctgacgatgctcaaaaatcatatgctgacgaaaatgcatcatgtgaaagtgggcatgatgaggatgcaggaggtccaaacactccagcagaagcagatgctgatgaaatcattaggtctagcattccatatggtagtccagtccaggagtctgaatctgatagagaagaggaagaattattagcacggacgaagagagctaagacaaaacaagttgtgcaggattctgatgaggatgcagatgagtaggtttttaaacattatcaatagttcaattttcgaagcgtctattgtgggcaacatcatgccaaggtgtatatacataagtttttatgggttatcttgctgattatagacgatgaacacaagagatgtaaaatatatggttttgcaaaaattcttgtgggccatcatgttgattatagaccatgcacagaacatatgtaaaatactttattgtaaattataagttattctaattttctttaagtgaaaa

SEQ ID NO: 31472 - DNA, 2099 bp, Zea Mays
gcaccacgcaaaccgagctcgagaacaccaccacgaacaagaaagaaacacggccgcggcggggcggggcggggcttcttctccttttccaactcgctgcccgttgcgtgattccgccgcgtcgcgtcgcgtgtgcatttgcgcgcgcgcgcaggagccgccgctccgatcgccctgaaaaaggttactcggaggcgccggctcactgacaacgtaccagacactagtcctggtcctcacgttcttggcatacacatgcttccacatgactcggaagatcccaagcatagtcaagagcgctctggacccgcagacgaaggtggggttctcgcactggggacggttgcacgccagcagaaacgctctcaccaccggctggctgccgttcaacaccgccgacggctccgcgctgctcggcgagatagacgtcgcgttcctcgccgcgtactccgccgggatgttcttcgccggccacatcggcgaccgcatggatctgagggtcttcctgacggtcggcatggccggcaccgccgtgttcacgacgctcttcggcgctggatactggctgaacgtccacagcttctactatttcttggttattcagatggtttctggcctgtttcagtcagttggctggccttcggttgttgcggttgtcggcaactggttcgggaagagtaagagaggattgatcatggggatatggaacgcacacacctctgtcgggaatatagcaggctcgctgctcgccgcgttcctcctgaagttcgggtggggctggtcgtttgccgtccccagccttatcatggcgctcgttgggttgatggtgtatgttttcctgccggttagtcctgaggccatggagattgacagtgacggcggtgagcttaactgcgagaaggacgctgtgaaggagcctctcttggaaccaggccaagaagtgaaacatagtgcagtggggttcttagaggcatggaggattcctggggtcgcgccgtttgctctgtgcctcttcttctccaaactggtcgcgtataccttcctgtactggctgccgttctacatcagccatacacgcattggtggcgagtacctctccgacgccacggcaggaagcctatcgacgatcttcgacgtcggcggcgtgctgggaggggtcctggcgggccacatctccgaccgcctgaacgcgcgcgcgatcacggccgcgagcttcacttactgcgcgatccccgcgctcttcctgtaccgcacgtacgggagcatgtcgatggcgtggaacgtctcgctcatgttcgtcacggggatgttcgtgaacgggccctacgcgctgatcacgacggcggtgtcggccgacctcggcacgcacagctcgctcaacggcaactcccgggcgctggccaccgtgacggcgatcatcgacgggacggggtctgtcggagccgccatcgggccgctggtgacggggtacgtctcgtcgaggagctggagcgccgtgttcaccatgctgatggcggcggctctcctcgctgggctcctcttgagcaagctcgtgtgcgccgagctgcaagggaaaacgcattccagcgtgagcaaggacgcaggcggtgaacatggtgcctactcagatgaagtgtaagtctgaagccctggttagtaagcccacgttcccgacctgaagatgaaaaggcagagatttagctgctgagtgacttgctcaaatggcaattcagatgattttcttttgttttgtgtggtagaagatgtaagtgtgtgcttagattggtttttcaggtttactagactctagagcccaaatacaggcacattttaggcgcctttgtaaataaggtcgggctcatactagttaccattgctagttgctcaattgtatgtgatgtttagggtatatgtcaaatggagggcgaaccaccttttgtacactggaatggccaactctgcatttactttgaatgttggccttctttttgtacgtgtaaaccgtgtgaaggttcagagaattttgaattgaagcatctaggctgaccgctagtgtttggttgcgccgggattgccttgctcaaaggagctgtttggtt

SEQ ID NO: 31473 - DNA, 2263 bp, Zea Mays
attccccccgccaaaccctagcacccccatcccccagcttgccgttctttactatgacggcgacatgggttttactagagcgagcgtatctccagccttgttgtgccttcagttacttgtagatttcgttcatatgcggccagatttcggttccgtcttgcgaagattccctttgtgtctcgcaacgtttgctctcgagtctagggtgtcttgtaatgccgccactcgtcttcttgggcgtgcatgcgtcttcttgggtgcagagttatcgcaaggtgggcgccaaacgctgggcaggcactggagaaactggagggacacgctggagggcgtcctacaatccactgctgggaagcagggctccggagggattcagagctgcatccgagctgcgctcagatttagtggttgccctcccacagaacatgggaacttagctcacgacggaggagcaggcagagatgaccctgttggagctgtacattctgaagagaatagtggtgccttggttcagttagaagacggaacagctgcacctttggaagccaacaaaacgatgtgccataatgctctctttgacattctgatctccgagaagtttgcgatgctgtgtgatctgctagctgcaacattccatgtcagtaagcctgacgatgtgattggtttgcaaataattgatgccaagatgagaaatggggattatgcacagaaccatgcgctgcttgaccatgatatcaagcagatatggaagaagtttgaacacgttggccaagaaatggctggtctggcaagcagtctctcagtgatttcacaagcttctcaccaaaagcaggcttctggtgtttcagaaattgatgtggctgaacacaagatagaagaaacaagcctggttggtgttgcccgcaaagccctaagggagttgactccccagtgcgattctggctattctacgataccaaaacgagctgggaggtctggatcggatggaatttgcaaggattgtggcagaaaggcagacagcaaaggaagaattatctgtgacagatgtgaagctgcgtaccatgtttcgtgtctgaagcttgccatcgatgaagaggccccagcaaaatggtactgtcccagctgcgttgagccagacgtagctttgaagcataaaaaccatggcaggtcacatgaaggctgtgatgtatgcgagtggctcgtggtgaagccagaagagcctgctgaagatgttagcgagcctgaactggcggtcaaaacgcaggagagctcagtgtcaagcatgggcgaagacagcgaaccagacctctcaacgactgctctagcgaacttgtgcaagaactgtggcacatgcgaagacgaggacaggaagttcatggtatgcgggcatggtttatgttctttcaagttctaccatgtcctgtgcctgaaagagagacagattgcaagcgagaagcagaagaatctaaagtgctggtactgcccgtcttgcctgtgcagacggtgcttcaaggacaaggatgatgagaaaatagtactgtgcgatggctgcgacgaggcttatcacatctactgcatggacccgccgtgcgagtctgtcccgagaggtaaatggttctgcacgcggtgtagcgcgcggaggtcagtgcaagggatgcagaggtatgagaagtcgatcctggagaaagtcaagcgtgctcctggtgccaatgggccgaaggtgcaggcatctgctggtccagaaaaataggcagcagtgtggatgatgtttcacaggccatactagggtagaagaaagggaaggatacttttgttcctctgagggagggggtatacattgctctggtagctttgaagaatcgatggatgggttgtgtatacgtggggggaaggaagatgccccgttggctgctgatgttgattcactgtgctgccatttcgtttttggaattcttgagtgtcgctcggcttgttgttgtgctgttatgttgtgtctgatggtaagtggcatcgcttatcgatgatatgtacatgcctgtaactcgttttcttttatttgttggacattgtgtgtgtgtgtgtgtgtgtttgaattgtgatgacctagagaacgctggtgtcaatcaatgcagcgtaccttgtttgcgcctaaatttggtagacaaaagaggagattaccttcgtagcatgtgtaccctgcatgtggaaggcaaacctatcaataattccttgtatgaatttgacatagattattacaaactgt

SEQ ID NO: 31474 - DNA, 2248 bp, Zea Mays
caggacgacggcaaatccgcccacgcaaaatatcagcccaagtgcccatcgcccaagcttcctagctcacccgccgccacccactagccaaattccccatccctctcctgccgccacccatcagccacatctctccctcctactccctctccggcagccatcatcagacaagatccctcccccaccatcgagccatgtcgagtcgagtgcatcttctgcaagcacggccatcttacgaaaccctagctggctcgaaggaccactactgtccggcgccctgaacaacttggcatgatgccgacgaagggtggagcaaacaaatcacaatgacatcgggtagtagatccaccattgcatccctatgaagaggagcgccttagacaatgtatgaggaacaattcgaggttgcaacaacttggaattcctgctttagtcagcatgtgtgggaacataaattccatctctaggaacaaaaagccaaataacagggataatgaagattctgaatctgagtatgatccttcacatgacgattctattgaaggggatttgtttgaccatgatgatcataataagaagggctcaaaggacactaacagaagaactattcacatggctcctggtggaatcaagcctcgaactaagagagtttatgcagagcaacatactactagaaatacaagctaatggccctacccaggttgacaacacccacatggccaatcgagatggctttgaccaatttgatgacaacatgaccaaccaaggggaaggcattacccagcctggtggaaaaggagtaaatcagcatagagaaaggggacttaatatgggacttggtctccaaaggatgaaccgagctcggcgtggcaaactgccaattgtcattactgaaggaaggataaggcctgtggcaccaattgttgctgcaaagtttgcaactgagtgcaacattgcagttcggaatcatgtgcttgtgcttaagtcatggaaggaatacgagaagcatcctgggctctttaaattgtttacagcaaaacttagtgcaaagtttgatatcaatacagaagatgcgctagttaaaaatgcttgtttccaaatgatgaggaatgcactgcgccaacaacgatataagctgaagaaacaatattttgacccttttccgctacatctagtgaggaaaacatctcctatcaaatcgacaagtgatgaacaatggaatgaccttgtggaacattggaaaggtccaaaaaatatggcgacatgtgaacataacaaaggcaaccgaggcaaagttaagttccatcaaacaactggatctcgtagctatatggttcatgtagaaaatttgggggacaagtacatggatcaagaacctgatgcattggatctgttcaaggagtgccactacagtaagaaaaagcaaggctacacttccactgtacaactggctattactcaaatggaagacaagcgatctacaccaggagaaggtgaacaaccaatgtctacgactcaggttgtagctgatgtgcttgctgagaacacaaagaagaatcggtttcttcaaaatgtgggaatccaaaatgcacgacctagatctagtgtacaaaatattgaagcacaacttgaagtagagaggaaggcaaatgcagagcttcaatcacttgtcagcatccaacgtgagcgcatggatgtattattaaagcaagtgcatgaagcagaactggtaaggattagagagcaagaagagatgaagaagaagcaagatgccatggatgctcaacttgagcttatgctaagtcagattcaaccaagttaaagctaactagtatggggtgttaggctttgttggtacttctcttttgctgatgctattgcattctattgatggataaatacgtttcaatccattttttgtctattgtgctgctagagtagctttagcggcatgtgtggtgtgttggagtggcttacgtgtcagtggttggatacttgctgtaatgacatgctattggatacttgcatgtaatgacatgctggagtgtggtcagtattttttgtgatgagatgctggattaaaatctgagttgtgatgtaatagaattcaacattttgtcattatgttctggattataattaatatatatttaaattattgtgtttgcaaaagctgcgaagctgtccatgggctagaatgttaattgtaatgggctgaaacaaaatgggcaaaaattgcaataaaaag

SEQ ID NO: 31475 - DNA, 82 bp, Zea Mays
tcatgattcaaaaattcgagatgtctatgatgggagagttgaagtactttctaggatttcaagtcaagcaactccaagaggg

SEQ ID NO: 31476 - DNA, 1382 bp, Zea Mays
gggttagatacaacctctctgcaaaatgcaggggcagctgcgaactccagtgctctcttcttgacagcagctgcacagaacctgttgtgtctgaagttagcagaggagattggtgacactcctgaagccccagcattagctgccgagaagctaaagaacatgggtccagtaacaaaaaatgaatgggtcatgattgggacgatgcttcttgcagtctcactatggatttttggggaaactattggcgtatccagcgttgttgctgcaatgattggactctcaatacttcttgtgcttggagtgctaaactgggaggattgtttgaatgagaagtctgcatgggacaccctagcttggtttgctattttagttggtttggctgggcagcttactaaccttgggattgtgtcctggatgtcgaattgtgttgccaaggttcttcaatctttctcattgagctggcctgcagcatttgttgtccttcaggcctcgtacttctttattcactatatatttgcaagccaaactgcacatgttggagctttatactcagcatttcttgcgatgcatttagcagctggtgtgccagctctaatgtcggcacttgctttggcatacaatgcaaacctctttggagcactaacacactatagtagcgggcaatctgcagtatactttggagcggggtatgttgaccttccggatgtattcaagctgggttttataacagccgcaatcaatgctgtaatttggggagttgctggtgcattatggtggaaatttttgggtctttattgagtgtcggggcagtgtaagtacgtgaaaatcgtaccatattatcaaacaagtaattcatgatccagcatcggaggtggccagctccaaccacacccccacaagcgccccaccccacgtaccatgtcttatggggaggagctactccaacagcccccacgggccacggtccacctcatatgtggagagagaggagaaattccccccttataagcgttgtaggagcttcggcatcggaacaccttcgaagcagactgaagagaaggacgaagaagctagcttcgtcataacgaacataaggagacgatgtcgagagaaggtgtcatccaaaatactaaatgcagaagacaatattgccctcatgttatttgagaatcctatgtattattcttgtgggcatacatgtaatttcatacgaagctgtacgatctcctataaatagatgaacaatgtcctgcataaagtacgttttggcagactgaatgattgtctcgtttaatctcgtcttcaaaacaccttcattctaattcactttttgaaaccaaaggtacgattgtaaattcattatgtgaaagaggagaaacgag

SEQ ID NO: 31477 - DNA, 2074 bp, Zea Mays
cacaaaagccacgcacgcggggcgcttgtcttgcgcgcacgaaaacccacatccaccgcggcgccacaccgcgtgcgtcggctgcttgctgccccgtgttccttggctcccgccgacaccgagcgccgacaccgagcgccgccaccgccatggctgccccgccccgcgccaccgcggtcctcgcgtggggttccggggaggacgggcagcttggcatgggcgggaacgaggagaaggactgggcacactgcgtggaggcactcggttcctacgccgtcaccgccgtcgtagccggtagccgcaactccctcgccatctgcgaagacggccgcctcttcacttgggggtggaaccagcgcggcacgctcgggcacccgccgaagaccaagacggagagctcccctggccccgtccacgccctcgcggggttgaagatcgtccaggcggcgattggtgggtggcattgccttgcagttgacgacaatgggcacgcctacgcctgggggggaaacgagtacgggcagtgcggtgaggagcctgagaggaaggaggacgggacgagggcgctcaggagggacatcccgaccccacagcggtgcgcacccaagctcaaagtccggcaactgctggagggacacattcagtggttttgactcaagaaggtcacgtttggacatggggacagccatggcctcctggtgatatcaagcaaatatcgacaccagtacgcgtgcaaggccttgagaaagtgagggtcattgctgtaggtgcattccataatttggcactcacagaggatggaattttgtgggcatggggtaataatgagtatggtcagctggggactggagatacccaaccaagatcacaccctatacgcgttgaaggactatctgatctctcactggttgacattgctgctggaggctggcattcaactgcactaactatacagggagaggtgtatgcttgggggagaggagaacacgggaggcttggatttggagatgataagagtagtcgcatggtccccctaaaggttgagcttctagctggagaggatattgttcaggtatcatgtggaggaacacattcagttgctctaactcgagatggccggatgttttcttatgggaggggcgaccatggccgtctgggctacggcaggaagctgacgacaggccagcccatgggagtggacattgacctgccgccgcccaagacccgcagcagccgggacgggcagtggcaggcgaagtacgtggcttgtggcgggcggcacaccctggctattgtggtgtgggcagagaccaccgactgatcacggagtgatcaacttcctgaatcctaatctgggtgcaaatctgagtttgacaatcctgctagataattatagtgttagtgaaataagcataagttatgcgacattaggcatcataaatttttatgtatgtgcttaatttggcaaggaacaaaaatagtcgggaagaggactttgtgcagatgggagagcttcagtatttcagcaatatttttcgatggacaattttgtgctgtatcctgtgcttactggctcccgggttgctaccttcactcgctgcacggctacacatctaactgtcaagggtgacaatggatcaagcactagttcaaatcgaatattggagacattcaattagcgacgattaaggagatcatgcttcaactcgcggctgctcaagaacatgcacaaattacctccaaggagcttggcctaaggagacgcctcaaagtgcgcagtgttggcttgaagcacagcaagaatcaggcagcactctcgtctcacgcacatccgttacggggacgcgaacaccaaattcttctaactatgggtgaattatagggcacgccaaattaagggagtatttggttactttgtcatgctactaactaaacttatccctaaattttctatttgaaaagccttttttagttataccgttggaagtttagtgactagattttagtcacttaagttttggaagttggaaccaaacatcccctaaatactgaatacataccaactacaccactg

SEQ ID NO: 31478 - DNA, 166 bp, Zea Mays
tttcgagctcttgcgcttggattgctttcttatttcttgatcctttctttgcaatcaaactcacttgtaattgaggcaagagacaccaaacttgtggtggtccttgtgggaactttgtgttccaagtgattgagaagagaaagctcactcgatccgtggatcgttt

SEQ ID NO: 31479 - DNA, 2840 bp, Zea Mays
atcgaacatcggagagatgcgcgcgggcggcggcgcgcctccccgacacgcaccactctccccgaccgcctccgccactgccacgctagtacccgcttctgtcgccatgcccacgccgcgcctcgtacacctccgccacctcctctcattccgctccgcccttccccgcccgctgggtcccaaccaaagccacccgctccccgggtcggttcacccgtcccttctcctcccccgtgccatggctggtgtcgcatacgcaggtctggcgacggggtcggcggaatacgaggaggtgctcgggtgcctcgcgtcgctgataacgcagaaggtgcgcgcggacaccggcaaccgcggcaaccagtgggagctcatgtccaagtacgtccagatactggaactggaggaatccatcgcgcagttgaaagtggttcacgttgctgggaccaaagggaagggttcaacatgcacatttgctgagtcaatccttcgatcatgtggtttccacactgggctcttcacttcaccacatttgatggatgtccgcgagcgatttcggcttgatgggctggacatttcagaagaaaagtttattaggtatttctggtggtgctggaagacactgaaggacaagactggtgatggtgtaccgatgccggcctactttaggttccttgcactgctagcattcaagatcttttcagatgagcaggtctttttaaccatttagtgggtgtaggaaggatatcccagcttctttttaaatggattttgaagccttttcccagtatgaggaatttgtagatattgcctcattttatatgaaaataaattggtagaaaagcatatcttgtgtatctgtgtacagtagtggaatataaaaggttgtttcctccataatacctgtcatcatctccattcagaactgtctgttggtaatgttcttgacagatatgacactattaataatttgcattataaaatccttaattatctaataagtttatttaagaagcattactgtttaaggtagataaagctgtcatacgttgctcaattttttatgctttcctagcagcatgttcaaaacaattttcttgttttgtcatgtttaagcaggtggatgtcgtagtgctcgaggttggtttgggagggaagtatgatgcaacaaatgtggtcagagcacctgtagtttgtggaataacatcccttgggtatgatcatatggaaattcttggaaacacacttggagaaattactagagagaaggctgggatactgaagaaaggagttccagcgtatacagttccacagccagaagaggcaatgtctgtactgatgaagcgagctactgaattgggtgtttctcttcaagttgtccaccctttggacccacagaaattagaggatcaacctcttggactccatggtgagcaccaatacatgaatgcaggtcttgcaattgcattggctaatacctggcttgagaggcaaggccatttgaacagattacatgtcaaacattctggtaccttgccagatcagttcatcaaagggctgtcgagtgcttgtctgcaaggtcgaggacagattattccaaattcacaagtgaactcagaaaatgatcgtgattcttcattggttttctatttggatggggcacatagctcagaaagcatggaaatgtgtgcaagatggtttgcccacgctacaaatagtgatggaatacagccaggtccttcggagcagcctcacactgatagggattccaggaagtttctccttttcaattgcatgactgtaagagatcctcagagattgctcccacgtcttctagatacatgtgctcaaaatggtctccactttgagcatgccttatttgtgccaaaccaatcacagtacaacaagcttggatcccttgcatccccaccttcagagcgtgaacaaattgatttgtcatggcagttgtcgcttcaaaaggtgtggggaaacctgcctcatcacaataaaggtctaaatgatgtaaactctagcggagctacctcggtttttgaatctcttccattggcaattaaatggctaagggaaactgctcaacaaaatcaatcgattcagtttcaggtcttagttaccggctcgctgcaccttgtcggcgatgtcttaagattgctcaagaacaataagtaacttcatttggaatggcacattgttcagattgaactggctgcctacggaccactaaggcactaactggagcttatcgaaatttgtgattgggatagcacaacataccaacttggttacaaggctggaagaaattgaaagacatttttatttcagttccaatcagcggtaaaattgttgtatttaatcgtttctttaagttcctggcgttatgtgccatcacatcctcactccagaaggatgtaaccaatttttagaatgtacaattagtggattctcagcgacacatctttgtatgattggtggacgggtctgcgtagcctttgcaacagacaatcaagaagacgctttgacggcctgctaattcatttttggtggaatttatggctggaacgaaataacagaattttccaaagtcagcatagaagcgttaatcaagtggcccttgcagtcatcagatattgctagtagctgaggtcttgttgatctggtctagtgggtttttgttcttctccttttattttttcttttttaccctctcccctccggttctctggttttgtatcttccatttctttgctctctaatctaatatatttcggagtggcaagtcttttgccccttcctttcaaaaaaaaaaaaacaattagtggattata

SEQ ID NO: 31480 - DNA, 2351 bp, Zea Mays
ctctagcagacgggaacctgggaacctgaaccctcaaaccccgccccttggcctcccatacctttcgcgccgaacacccgccgtcaccaaaactgacggctcctccccctctcccctctccccttttgtgattggactgaagtgggattcatatatcaggtgtttggattcttctctttcctctgctgtatactagcttcctaaaggatcgatgtcggctatctccaatcagaagaaacgcaccttggaagcccttcagcaacagtatactgctgcaaaagctaagaaattgcaagatgaacaggttaagagtcagaagaagagcaattttaatacccctaagcctaaatttgatgcaccaaggggaagcaaaggtctagtaatcactcctcgacgaacatatgcccagccttctcctcataaagatgtagcattttctagttctaattgtcaacaaaagccttccacgtcctcaggtactacctctataagctaatgcatgagatgtggaaggactatatcaaagagcttatggatatgagcccatacgactccacagtatccttttgtctgttattttggacctcttatcttccttttttattttctacatatttttagcggaaataaatccatgtgttatactgaaactcaacaaaataaaagacagtctttgagtgttcttgttatgagcggcagatggctgcgagggttagaggacgatggctagggttagagggcgacagctatggttaggggcgctggggaggtcggccgcagggatttgcccacgaccggcaagagagaagggatttttcttctaatctcttgtttaccttcaattgatacaatcactcttcttatatagtgagggttacttgacccctaagcactagatctaatcttattccaaactaatctatctttatctaaacaaccttgaggggtgtgctacagtgcgccgttactgtagtgggccctcttgggccctgacagttctgctgcttttggtctcaaaattttgactcttgagtcagcggcggagtcgctgtccacccctctgggccgccggctgggctcattggcgaagttcaaaagaaatatttctttatatcaaacaaaaatactataatttgctagctaaattttttgcataatgtgggttgtccagacacctgaaagcttttggctacgctactgtctccacttgaacttttttgtcgtttaatacaaaggcaggagaagctacagatcattgcattaatgagaaagtattttagtggacaaccccacacaagcacaccacccaacatatattgaactgggttctattgagaatgctatagtgataggtggatagtataacgtgatggatttaaacccactatgtctaatgtagcaaatagttaaagggcacggatttccagactttatacaatacaataaaatgagctttcttgtataagctacgtcgagaccactcaaagactctagttttcttgaactgaaatttattgaccatatgaattatgaactaaactaaaaacactaaatcatttgttaccatataagcattatattttatgaaatatcaacgaatttgaagatttgaacaaacaagaaagacaataattaacctgagtgtgaagcaagcgcattcagagtagtggaccaactcgagcttttggaaaactttaatgtaaaccctattattgtgcctgttcctgtaatatgtacccttgagctaattacatgtcctgtcttcaccacaggaaaaataaatttactgagaaccttctttcagcagatcttcatggggcccttctaatagtggcagaacacaaagctgcttcatataaaagtgtaaacggaatcatgattcgagatactgcagagacgtttggaattatatccgaggacaaccgcttccgggtttatcaaaagctggttcagttttcgtacttcaagcagaccgctggaagttcacactgatcggcgacaagctctcgcccagggagaagttgaaggaggatcagcgtcaacaacgtgcgcaatcgctaatcagatagtttccaatgtgccagctgttctctcacaaaatttttgctccacggaatacttgcttttgtttaggtcctgccactgtagcatggtagttttagcgctctagaggcgttgacatttcttagcgacttactggcagctcgagttgtggaggggtgtgtgatcatgagccatgtactccggtgactgattattgattagtataggcgaagcaagtccatttacgtttgtttcatctagtcacacaaacctgtggcaaatatttattacgccttgtttctgtcgcc

SEQ ID NO: 31481 - DNA, 2716 bp, Zea Mays
agagaaagcgaagagcaacaagagcaaagcgaaaggcgggcgcagctgtccgctgccttgccttgccttgccttgcctgtgctgtgcgaacctgctcccagttagtagtattcagtttccttatcggctgctgcccatttccgccccctcccgtcttttcccttccgcgtcggtctcctcccccactcttctacttcttgctgtcgtcgtcttctctcgactccccgtcccctccctctgcctctcccacccgccgcttccggattccgccgcccgtgccctcgccaccaggaattccactcggaccgctgcgtggattcctcggctcgccgtccggatctggcctcgctgagctgcagctgccgcgaatcccgactcgattcggccgcgctcggatctcgccggactagcggggaccgaggcctctcgattcgcctcggggccgagatggatcatgtggtcggaggcaagttcaagctcggcaagaagatcgggagcgggtcgttcggggagctcttcctagctgtgaacgtgcagaccggagaggaggtcgccgtcaagctggaaaatgtcaagacgaagcacccgcagcttcactacgagtccaagctatacatgcttctccaaggaggaagtaggccctagagtcctgtcctgtcctgtccagttttacttctgggacggtactctgtggttagttgctagcatgatgcgcgagttgggctaaccttccgctcccccccttttttttgtttcgtcacagctggcattccgcacctgaagtggttcggcgttgagggggagtataacgtgatggtgatcgatcttctcggccctagccttgaggacttgttcaactattgcagtagaaagttttctctcaagaccgtgctcatgcttgctgaccaaatgattaatcgggtcgagtacatgcatcaaaaggggtttctgcaccgtgatataaagcctgataattttcttatggggcttggtaggaaagccaatcaggtctgatcctatatacatgcttcactcttgctggccaactcattacatttgagccgaatgttttttacgtgcattttgctgcacttgagaagcccaaaagatcctgcactagtgacttggctggcttggggttagtgtgtgttatgtgatgtatttgattacgacgacgatttccttagcgtgcttgtattttacagtctgctatatatagtttatttctttaccttcggtgaatgctggatggtttccttgtctatatagctgccaatatgttatattctggaaaacaccttttctctctctctctctgggattgaggtctctcggtgtaatgattgttgaacttattggcttttgtggcaggtatatataatagactatggactcgcaaagaaatatagggatcttcaaactcataagcacatcccatacagagagaacaagaacctcactggaactgcacgatatgcgagtgtcaatacccaccttggcgttgaacaaagcaggagagatgatttagaatctcttggttacgttcttatgtacttccttaggggcagcctaccatggcaggggctgaaagcagggaccaagaagcagaaatatgacaaaatcagcgagaaaaagatgctcactcccgtggaggtactctgcaaatcgtatccatcagaatttatctcctatttccactactgccgttcattgcggtttgaagacaagcctgattactcttacctgaagagactattccgcgatctctttattcgggaaggataccagtttgactatgtgttcgactggaccattctgaagtatcctcagataggctccaacccgcggatgagggtgaaaggactagtggagctgctggaccctcgatggacaagattgagaaggccacaggagaagcaggcggtagaaggaatcttagtggtcctgtgaaccagactgacagttatgcacaacgaccgcgtgagaccgtatctatgtcattaaaggaaattatgcatagcactgaccggtctggggaaaggaccatggagagaccacgtacatcctcgcgcacaggcagtgcatcccgtagagctgttgcatcaagcagcaggcaggcctcatctgtggaaccaagtgagcagcagtatagccgggcaagcagattgttctctagcaacagtggcagtcgcccatctagcacccagagggtgaacccatcgccaggcgaggcaagggctacctccctctcacgggcggcagtcgcgagaggcgctcgcgacgagccactccatcgcagcctggagcttctgtccctcggtggcggcgggaaaaggaagtagtggcaaggaaagcgagcatctgagagcgggcggaagggaagaacgcttgtttgcgactctgtaaatgacaggattcgtcaacagtttccctggggcttcccatagtttccttggtgctccggtctgttgtaccattgcttcatagatagcaacgattccttgttaaacgtgtgctgtgttgcaggttgcgttagggccaagtcctagcctttgtgatggtgattacatttaggggtggtcaagattcacttatttatgtttcttcaccctttcctggactcggcgacttttttcatgtcgaactctgaattttcttattcaacagaagttgataaaaaaggacttcctgtgtaaaccaaataaaaaaacttctc

SEQ ID NO: 31482 - DNA, 1261 bp, Zea Mays
gctgtcaagattcaaaaactgaaacaatgacaaacaacacagttccattttctgaatcttaataattacactgtttgcgctccccttggatctactcgtattcctttacatgattagttactactaattcatttctctcctagaaatttatgcacacttttgcaacaagacctttcttcccagcccttttctacagttttgttaggaagtggttgctgcctgaccctagtcgtgtattgcagccatcgcacggcaaattggccagcggcggcggcaggtggtggtgtgagcctgcgaggcttcctacctgcgctggaagtttaggtgcttgatggcgaggaagaagagaaagacgaagaggccaatgatggcaagatggaggcaggtcaccagcacaaagtagcgatcctgcaggcccaggtacccctctaggaactcacgcaccgtctgctccccgagccccggcaccaggatctgctccgtcctgtctgcgagctgtgagaacattagcccataaaccgtccatgccgccggatccgcccagtacacccaccgccaccacacaggcatcatctgcagcaaatttactcaactcgtcagccgattcagatggggggttacctctctcacgattatgaagccagagaagacgttccaaaagataaagatgaggaacgacagccccatggcgatctcgatgttgggggtcagggccaccgtcatcatcccgtatagagtgtagtacatgaagctcatcacctggtataggaagaaccagaagaatttgctcgctgtcacctggaacccaatcattgggtacacgattgatgagaagatcatcacttgcaccaacatggcacgggaaagcaacaggtcaagaagaagcactgaaggagcagcaggatggggcatcgggagaagctcacattcaaactcactaagtgcgaatcattatcattattatttatgttacatttcgtaaaccaaacagcacctaaagccagcctcatcatggtcatgtgttgtgtgctctgtggtctgcgctgcttcctgctcctgcgaggaaataggaatttgaaggtttaatgctggcctaacaagggtcctcactgactggctgctagtctcttctgtctttgtacatataagacgatatgtagcggttattcctaaatttctctccatatatcctacttttacgccacatcgtcaagattttgtctcctgtttttcatcttctgcagcggtttcctcaaaatac

SEQ ID NO: 31483 - DNA, 2235 bp, Zea Mays
ttcactatgtgtcgatgattgaagcatacctgcgagctaacaaaatgtttgtggacaagcatgagcctgagacggaacgagttttctcttcatatctggagctggaccttagtgaggtggagccttgcgtttcaggccccaaaaggaaatgaagtcagactggcatgcttgcctggacaacgaagttggtttcaagggctatgcggtgccaaaggaacagcaaggcaaagttgtgaaattcgacttccatggaaggccagctgaaatcaagcatggcagtgttgttcttgcagcaatatgtagctccacaaacacatcaaatcccagcgtcatgattggtgctggccttgtggcaaagaaagcctgcgaattgggccttgaggtgaagccatgggtaaagacaagccttacccctggatctgtggttgctaccgagtacttgaaacatatggccttcaagattatctgaaccagcaagggttccatgtcgctgcgcatggctgcgccacttgtgtgggcaactctggtgacctggatggatctgtatccgctgctatcacagaaaatgatatcgttgctgctgcggtgctgtcggccaaccgaaacttcgaggggcgtgtgaaccctctcactcgggctaactaccttgcctcgccgcctctggttgttgcctatgctcttgccggcactgttgacattggttttgaggaagagcccattggagttggaaagggtggcaaggaaattttcttgagggacatatggccttcaaaccaagagatcgatgaggttgtggagtccagcgtgcagactcacttgttcaagaaagtgtacgactccatcatggaacgtaaccctaggtggaaccagctgccggttccaaaggaggcactgtacccatgggacgacaggtccacctacatccgcaagcccacttacctggagggcatgtccatgacgccgcctggcccgcccacggtgacggaggcctactgcctgctcaaccttggagacagcatcaccacggaccacatctcctactcggggaagatccccgagggcacacctgcggccaagtatctgctcgagtatggtgtggagcccaagaacttcagctcctatggtggccgccgcgggaacaatgaggtggtgatgaggggagcgtttgccaatatgaggatcgtgaataagcttcttaatggcgaggctggtccctggacgatccatgttcctaccggggagaagctctacgtttacgacgcggcaatgaaatacaagtcggaaggtcatgacatggtcatcatcgctggctccgagtacggcagtggcagctctcgtgactctgctgccaagggaccaatgctactgggtgtcaagtcggtgattgcaaagagcttcgagcggatccaccggagcaacttggtggggatggggatcattcctctctgctttcaagcaggagaggatgccgattcactcggcctcaccggacgtgagcgctacaccatccacctccctaccagcaccgccgagatcagtcctggtcaggacgtgaccgtcacgacccacgacggaagatcattcacttgcactcttcgcttggacacacagcttgaggtcacatacttcaaccatggaggcatccttccctacatggtccgcaacctggcggcacaaatgaaataagttgaagtttattggtgggaataaattaaaagcaacagattatttgtactcttgattctttggttccatgctctcttcggccatctccatgtcaatttgctttgcaaacaatataatatcagcgtgccgtgcccttgtagatttccaaatggttatatgcatatgtactattgaaattgtcattttagtttgcaaacaataccaacgtgcctttgtagatttcaaaatggatatatatgttgtattcaagtttgctatttctagtgaccccatgtggccattggagcccccccggggggggggggggggggggggggatgtcgggagtcagtccaaggtcaccacatttctaggccctcgcagttgttgggttgaatattagaagggctggtaaatgctaggagcctccgacctcttcccgggtctacattagtttcaacccagaaataggggagtatgaaagctcttgtaaataaatcgagtaagactatggagatgacataatctatgaatatcctcgtaaaatctctgagctatttataagaacct

SEQ ID NO: 31484 - DNA, 1864 bp, Zea Mays
tgaccgacagctcgcgggttgtattcccggccgccagcgtagcagaagcgaggtttcctccaatcgatctgtacgccctccccaccggccggtcgcgcacctccaccaacctgctcgctccgtccgtcgccgtcgccgacccgccaccatctccgccctccaaaaccctactacccctgtagcctgcagccccgtgcccgccatggctaccaacggcagctccgtgagggttcgggacacggagagcagcctggagaaggtgaagcggcagctgtcgtcggggtccgggaggtacctgctgcaagggcccctgctcaagcgatctgagacgagggatgccaaaatacgatggctgctgcttctacattgggactcctcaaaagaaggaatactttctttgcgctgaaactcctggtgctgcaaaagcttgggtatctacattacacgcaactcagttagtcttacgagctcataaagaggcagtaaattctttggctgggaatggctctccagctacattaggcacagttgctactgcagttgctaatgctaatgcaacagccatggaggctaccaaggagatagaagctgcactaaaggtttcaatgagggcagcccttgggttgggtacaaataactccaacgatggccaacttgatgacctaacaatcatgaaggagactctacgagtgaaagatgaggaattgcaacatttggccaaggatatacgttctcgagatgctacaataaatgaaatagcagacaaactaacagaaaccgcagaggctgcagaagctgctgcttcggcagctctcacaatggatgaacagaggcgacttttgtgtttggagattgagcgactaaaacaagccttggaaagacaagtagaacaatcaatgctgaagcttagacagtccgaagagaaggtcatcagcctgagcaaagagaaggagcagttgatgaaggaaagagacgctgcgtttcaagaggctcatatgtggcgcgtcgaactaggaaaagccagggagcaagcagtgatacaggaagcaactattgcccggaccgaggagaaggcaagagtctccgaagcagatgctgcagctcggattaaggaagctgctgaaaaactgcgtactgttgagaaagaaaaggaggagcttctagccctggttggtgttctccagtcacaagtccagagagagcagagcagcacaaagcaagtgtgtggggagaggtctgagtcgtgttcaggcgccgacagcccccctcccctgacaaagcatgttgatgcatcggacgatgacgtggacaaagcctgcgtgagtgactctagatcagtgctggtgtcgagcgacagcactgaggtccagctggctgtggacggggtggacatccgtcctgtcggcgacgcagagtggggtggcttccagcagtcagatgcgctgatcgctgatgtccgtgaggtctccccagaggcagatggaggcagcttggacattcctgtggtcaaccctccaccgatcagtgatcatgttcagggaggcgcaactcatccctgaaggcctgaggttgctggcttgctgctgccttccgagattggtgtggttgctgggaaaccgatagggatgtctaaatctggagagtcgccgttgagggtgcatattgcatcgatgcgattgtatgtccattgaggtatacgattgaataaaaaggtagtaactgtgtctggctgtgggattgtaaatattcgcctcattcccttttgctacggctattcacgtgtgatattttagctcaggtggatggattgtgtgatatcctggtcaagatttaataaaattaatagagtatttatactaataag

SEQ ID NO: 31485 - DNA, 895 bp, Zea Mays
gttcaactttgatgggtaatgtcgtaattaaggactgatggtattgaacctatcgatgccctagctatagcctatgatgtacctgactatttaacgtaaccgtcaatgttgttccaccatttgacatacatttcgctccgtttctttacagtgttggatctgggggcaacatgtccaaattttagagttggtggacgtattcaacgagacggttgtactctgctttccttgttcaaccgtacgtgcttcgtttatctaggctttgtttagcctgctgctgaatgctgatgaacagggacgagtacgacaagtttcaacgctctctagaagctgacgagtgatgactgatgactgcgttgtgccgctggtggtcaacgacaattggcgttagcggccctaaaataaaataaaataaaaactctggcgtcagcactcagcagacattttttaccgttccatgtgtccatgtccagacgtgcatctgtactgtactgtacctggatatgggtttagatggtttcttgaggaaagtcccacgcattccatatgcagaaacggatcgggtgcagtgcagaagcccagtgcagtgcatgcagatcgagatgcatgcatgtcaagcgccatgtctgataaatgtgtcgtcgcacaggggggacgacgcagattcattgacagacagacagcggatttgcaacgtgcacgtgggctatctttaggtggtgaagcgacctcattttgctataccacctgtccaggagggtcggggtagacattattgggacaccaaaagcaatcatgcatgcttgttttttcggttcttggcctgatagtgatagctgtcagctgatgccatgcgtcgcttgtctcatcctcctcaccatccttaaggccctat

SEQ ID NO: 31486 - DNA, 3169 bp, Zea Mays
aaacgctcctgtatagagagagctgggaacaagacgggaggcaactggtcggtgctcgccacctttaatttccgcctccgctgctactggagtagttatatagctagcttgctcagacacctttttggatgctcgctgctcccgacaagaccgcccgccatcgtgcagccatcgcagatcgggatctcgcggagctgcgattcattcgccagccatcctactcaaacgccacccatctctgagtctttgaccaactgttctgaagatttgagacactgttggagatgggtacaaggatgccaatctttccccgactatcgagcgcactgtccacggcgttgctggagtggatcttgatgctcctgctgttcatcgatgcggtttacagcttcctggtcactagattcgcccgtctctgcagattaccggcgccatgccctttctgctcaaggctcgatcacttcctgggcaacgagaaaccgtgcttctatagggacctgatctgcaaaacccacaagtcggagatttcgtccttggccttctgcagcctccaccagaagctcgcgggagcccgaaatatgtgtgaagggtgctgtggggaagtcgccggtgatgataagacagatgagactgatagcaatcaaagaattggtgatgctttcaattctcctcgtgaaaaagtctgctcgtgctgtggacagcattttaagcgacggagtgtagctttgtcctctagagagactgcagaactagaacctactcgagcgtttggctcaccaaaaacttacacggagtactctgtagtatgtcaagtggatgagcctttggagcctaaagatatataccaccaaagtgactacaggtctaatgagccagacggtctgctacagatgacatctgactctgagactgaggtcccttgtgccattgatgtgagaagttcacaatctcgtgaagccgatgttaagggcgaagacttgcaagaagatccagcttgtgagcaacccgttcttccttcccctgtggtgatcaagaaatctgaaatagtcgtcaggaaggagcctagtgttgaagacacctgcattacatcttcagcgtgtcctgctgtggatgatcatcctaatagcggaggtggtgtggaccagatggaagaaaaagaaagcctatccagaaaatgggcaccccagcacgatcctgtacttgttatagaaaattcaggtttacaagatgctggtatttcacaaattatgccaagtgatgagctaccacaggtttctggtgagactgaaccatctcagagcacaaatgaaggcaacacggatccatataaatctcagttcacaatactagaggagcactatgctgtttcggaagaaggaaatataaaatgtattctggaacaatttgacgtgacagaaattactagcagatcaggtggtgagtttcgtcaaagaagtgcgtcagcagctgattcacatacaaatgcactggtactagagaatactcatcatggtgcttcagaagatgcagaacagaaaggtgctggatccaaaacgagtggtgaagttgaagattatactaagaaaattgaacccactggtgacatgggagaacatgaactggtagtacaagatccttctggtagtgctcccaaagatttaatagttaaagattatgtggacgaacctcatgtatcaacaactaccatgagatcgagcggtgaagtacctcaagatcatagtgccaccgaggaaaacccaaaaacaattgacagcattgttgaaaggagaccatctctaagcagtcagattagcattaccctaagatcaagtggtgaagtacttcaagatcatagtgccaccgaggaaaacccaaaaacaagtgaaagtattgttgaaaggagaccatctctaagcagtcagattagcattaccctaagatcgagtggtgaagtacttcaagatcatagtgccaccgaggaaaactcaaaaacaagtgaaagtattgttgaaaggagaccatctctaagcagtcagattagcatgaatgaagcctatagacttgccattggcaacaagggtagcttgacatcccctacattgacggatgtaatccttggaaaggactctacttctagcataaacgaagaactgaggctactgttatcacagatctcagcttccagggggcttgaggcaccatgggccgatccaggccctagcccacgtgcatatggacgtggtgatgagttggtggtgcagaacattaccaatagattatcacttgagaggaatgcttccggtttggagtctctagacggaagcattgttagtgagatggaaggtgaaagcaccattgaccggttgagacggcagattgatcttgatcggaaatcaatacacctactctgcagggaactggaagaagagaggaatgcctcagccattgctgcaagtcaagctctggctatgatcaccaagttgcaggatgagaaggccgcaatgcagatggaagcttcgcattaccaaaggatgatggaagagcaagctgaatatgacagtgaagcggtagcgaaagctaacgagttactcactgaaagagaacagctaattgaagaactggaagttgagctcgaaaactataggagacagtatggaggtggatcaacacagagacgaggcaatcgagtggcttttaaacaagaaaatagggatacaactatgcttgacggtggtggtcttgaagatcctctgattaacacacaacagggcataaattccttggtgggtttggaagaggagagggcatatatagcgactggtttgagaaaattggaacagaagctccaattctactccaacaacagtgtttccgttgagttacccagtccagatgttaaggatgacctctccgacaaagtatatgtcacagaagacttctcgttacactgccaggaaagctcgatggagagcaaggaagctggctcatcgacaactagtggggaggttgatctagttgcagtgcaggaagaaattgcaaagttgaacagaagactgaagacactagaaggagatcgcagttttcttgagcatagcatcaactccctcaggaatggcgacgaagtgatgtgacggggatctgaagcaccaactttggagaagtacctgga

SEQ ID NO: 31487 - DNA, 883 bp, Zea Mays
ttatgcttaactaagttacagatatttggaaccggggttttggagcgattccatgcagccaactgctgttctagagtttggccttttccccattcgtatggtggatgaattgaaaagaagcgcctttttgtcatgattaataacctccctacaatatatgaagttgtcacgggaactgccaagaagcaaaccaaggagaaaactccgaaaagcagcagcaagagcaataaagctggcccaaaaccgccacgccagccagaacccaactcaaggggttcgaagatgccacctccgaaggatgaggatgacagcggaggcgaggaagaggaggaagaggaagatcacgaaaacacgctgtgtggttcttgtggtgacaactacggacaggatgagttctggatatgctgcgatgcgtgcgagacttggttccatggcaagtgtgtcaagatcactcctgccaaggccgaacacatcaagcactacaagtgtccgaactgcagcggtagtggcaagagagcccgagcatgatgatgctggatatatccatctctcatgcctgacttgatgtaaaacacccacatggggaccgaatgcccgatggttgttgctttcagtgtaggaccagctgtagggtcttgatgtgctgtttgctgtagtatgtcaaagacgttctagatctattgttagtaactagcaactaattgtagtagcctgtatttcttcaatcttctcccagggcgcctgtgctgaactcaaactgttttagatctaagttgtgcattatgtatcactcatgttagtttgttaaaaaatgtgttagcattcgtatgaaacgccaaccatgtttacaaattaattaacttcaagtctattttgctcgcac

SEQ ID NO: 31488 - DNA, 2373 bp, Zea Mays
cccacatataaagcaaggcgagggcgaggtagggaggatcttggaatttggccgccgtctgcgttgcttgggtggggaaggagcaggcggccaggcgcagagccgcaaaagcagacgcgaaaaagcccaggcccgagccgaagcggggaggcgacaccgctgcacctgcactaccgctcgcacggtcagcgatttgccgcctcgcgggagccagctttggcgtcggcgtcggcgtcatcgtcggcggggagttcccggagagggattccggtgaggatgagcagcggcggcggtggagggggagccaggggaccgtcggggcccgtgccggcgtccgcgaggaagctcgtgcaggggctcaaggagatcgtgaaccgccccgacgcggagatctacgcagcgctgcgggagtgcaacatggacccggacgaggcggtcagccgcctcctctcccaagatacttttcaagaggtaaagagcaagcgtgataggaaaaaagaggttaaagaaactccagagccaagatctcgaggagcaagtaactccagtcgatccagtagaggtggtgtggaccgtgctggacgaggcaattcagttcagtctggatcgagtggcactgattatatggcttcaaggtcatcaatattgggacctgctgtggcagctaccaatgccatgcagaagccaacagttcctagtttgtccacaaacaaagatgtggttcctaatggatcagttggagcacaacaatcatcatctggttttcagcacaattggtttggggtgccaggtcagatgtcaatggctgatatagtgaaaatgggaagacctcaagtgaggtcttctggcaagcctatggctgcaggagacacatcatatgctggtcaaaccccatctttatctagctctataaaccagaactcaaaacaatcggcaagcacagccctaccaactacttttgaccagggctttcctgctctcccagaccctattccacacacagtgaattctagtcatggttcagctgggaacaaccatacacatgagaatgattggtttcctcaggacgacctgccatctggagttcagcccacatgcattgaggcgtctggtgaccagtcgctatttgtggcatcactggaccaatctatgttggttgccgatgcttcttactcacaagaaatttctcatgcagaagagaacaactccactgcagttgaagcaacactgtcttccgaaagacacttggaaattgtggaggatgacaatcatttcaacgacgggttattgcagaactcaagcgcttaccaggctcaagtgcattcctatgttgataatgaagttgggatttccaatgttgatgcagaatcagcttcgatgaacttccagcatttaagcctgcagaatgaagatatagctgcaaccaagtctgctgaggataaccctgcggttatactccctgatcatctacaagctgcaaatgcagattgtgctcatttgagctttggtagttttgaatctggtgccttctctggcttgctttcatcaaaggtcccaaaaggcagtttggaggacgacgaggtgctcattccagatgaatcccgatcagttaatcgaatagatgttaggaatcaagattactatgatgacgatgctctaaattcttcagaaaatgtggatgttgagacaagaattggtaatatggataacattgatggaccttcagtttcagaatctgatgcactgaggcagggtgccatagatgtgcctggtcttcaatatgacctgccatcagtttcaagtcatgcatattcaaacacaacacagccaagtacaatggaagaaccacaaggaaacacacaagcacaacccctttcccatttttctggcttactgacttcaaaacagggaggcttccccaatactcagtctacgcaacatgttcccagtacaagcatttcgtcgggtcttcctctcccacaacaattgcctgtatactctcagccaactctgccccttgggccttttaccagcctggttggctatccatatttgcctcagaactattacctaccttcagcgccattccagcaagcgtactcaagtaatgggcctttccatcaatctgctgctcctgccgtgcctggagctggtatgaagtatccgatgccacaatacaagagcagccctcctgcttcgaccctaccacaaccatcatcactctctggttacggagggttcggaagtgcaaataatatccctggaaatttcagccaaaatcagggtgctcccgctgcacctacaactttgggatttgatgaagctttaggcacacaattcaaacaccccaatcattatgcagcactacagcag

SEQ ID NO: 31489 - DNA, 767 bp, Zea Mays
gtggctaccaatactcgaacagggcctaatgtgtaggcatggcactaggttggatttgggcctaaacaggctttggtgggacatccacatccttgtccgcggcgaaacaaaatttcccacagcgagcgaggttcccctcccgactcggtgatggcggcgccggcggcggacgaggcatggtgccggaagacggtgccacgggtgatggaactggtgtgtcggcgccttccgcagcgggacgcatgcgcgctgcttgctgtcagtccctggtgctaccgtgccctcgttgctaactccaggctctgggaggtacttgatctacgtgagatgaagaatgctggaaaccgacttatttcagcactttcactgagtggcatctcactggaaaatttggaattcctgaacctaaatgcatgtcagaagatctctgataaaggaattgaagctgttaccagtctttgtcctaatcttcagcgccttgctatctattggattgtaggactgacagactcaagtattgggcacattacaaagaactgcaagcatctagtgcaccttaacttgagcggttgtaagaatatcaaggataaaggaatgcagttgattgctaataattaccaaggactaaagagattgaacataaccaggtgtgttaagttgacagatgatgggcttaaccaagttcttctgaagtgttcttcacttgaaagcctaaacctttatgccctttcaagttttactgacagtgtttatagggagataggatc

SEQ ID NO: 31490 - DNA, 2573 bp, Zea Mays
ccttaataccctaaccttcttactgctccagcgaaggcacacagccgccgctgtttcttcatcttactcgtgctcggcacgcaggcgacggcgacggcggcggcgttcaggctcgggctctcagcgacggtatcagtggtctcccgcctctcgccagtcgcgtcgcgccctcgcctccgatcctctgcacaccgtccggtgaccttgtgttgtaagtttttccagcactgcttgctcacccatttctcaattagaaaacctcaaattctgtccctgagcaccaaatcaagaccataccaatttagtgagtccggacagatggcaatggccgcagttctggccaatggtgattcacagggtcgtcctcagaggaactatcaagttgttgttgctggcactcgtgacatgggcattgggaaggatggggtcttgccatggaagcttcctggtgatcttaaattctttaaagagcttacactaattacatctgatcctgtcaaaaagaatgcagttataatgggaaggaaaacatgggagagcattccagttaagtcaaggccattgcctggtcgtttgaatgtcatacttactcgatctggtagttttgattttgcaacagtagagaatgttgttatctgtggaagtatggagtctgccttagaactgctagcatcaactccatattgcttatcaattgagaaagtgtttgttataggaggcgggcaggtactgagagaatatcttaaaggacctgcatgtgaggctatccatctaactgacattcagtcgagcattgagtgtgacactttcatccctccggttgacttctcagtgttccagccatggtattcatctttcccggtgatagagagcaacattaggcattcgtttgtgtcttttgttcgtgttagaaagtcagtggcagaaactcatgagtcaaatggcaaggaatcaaccgaggttgataccaagaatgacaaatttgaaacagagaatttctcttttctccccaagatggtatatgaccgccatgaggagtaccaatatctcaatcttgttgaagatattataaggtctggtgctcagaaaaacgacaggacaggaactggaacattgtcaaaatttgggtgtcagatgcggttcaacttaaggaaaaattttcctctgctgacaacaaagagggtattttggcgtggtgttgtcgaagaactcctttggttcatcagtggctcaacaaatgcaaaggttttgcaagagaagggtattcatatctgggatggcaatgcttcaagagagtatctcaacagtgttggcttggcacacagggaggaaggtgatttaggtccaatttatggatttcagtggcgtcactttggtgctgaatacactgacatgcatgctgactatacgggaaaaggttttgatcagctaatggatgtgattgacaagatcaagaatgatcctgacgaccgtcgaataattttgtcggcgtggaatccttcagatctcaagaagatggctcttcctccttgccacatgtttgcacaattctatgtggaaaatggggagctatcttgccagatgtatcaacgctctgcagacatggggcttggtgttccattcaacatcgcatcatattctctcctgacatacatgattgctcaagtttgtggggatgcccatgtctatagaaaccatgttcgagcactggaggagcaaattcagaagatgcctaaaccatttccaattttgaagataaatccttcaaaaaaggatatagattcttttatggcatcagacttcaagctggttggctatgatccccaccagaagatagagatgaaaatggcagtgtaatggtggcttggctggagcccccatcctatggactcggtggatgtaatcagtaggactggtactacataaaaattaaccggacaccgcactagcttgtttttggtgatggtgctgaatgttcagtgggagacgttttctctgatttatcagttgcgatttgcgtactatggtcgcttaagtcaactctacaaaatcggctcccttttatctggagccagttgattactcgattgcgagtgtgagggatgatctaggcataccctgttgcaagggcctactgggtgtgtgccggcccccatgaggctgtgacgattgcgccagtccagtacctcgtgagaattatgtaaccgaagttgccgtgtacctgggagaactcccgtactgtttggtgtctgattgcctatttcactttgcagtttggtcacaagataacgacttgctggtagggttttgagaacacattctgttgcgtttttcttgtgctttctggggggaagaaagcctagcgccgtgcttgacgaagtcgtgctagcgcttgcacttgcagcggcggtgtacgatttggttggagccggagcgtgaagtctcaagtgatcctgcaactgtcctgtcagttaaactcaaagatgttggaaattgtagtacgatgcggcccctgcgagttttgtagagttgaccctctttcattgtttttttttaaattcaaatcaagtttc

SEQ ID NO: 31491 - DNA, 1735 bp, Zea Mays
ggagggtcttggaggggataattttttttaggcttttaaactagtccttagtgacataaatgccgctttggtttaaatctagcataggaaattgaataacggaaatggagaatttactgctccgccttgggaactcgactcgtttggaacacgtgcacgggcacgctcttcgatcagtttcgtggaattattactgcgctccaaactggtcatgggaaacggctagaaaagcatgcatgtttttagtaccgctttgtgtgtttgctttaaatgaaaactctgttaggttttgattcattttttttaaaaaaaatagattaagtttggtccatatgcggtttcagttatttaaatttgtttggtccatatatgggttccgttatttaaatttgtcggcgtattagtcaaccggcactcgcggtggtcaaacacacagacaccaaacatgcttagccgcctgctgccggccccataggcccagagtattccagaggctgtcgtactgatccagcaactgcaactgtgcaacctttctctctgccatgattgtagtcgacacatataccctgtctactacttcctgttaactgagacaacgcaagcactctggctgcctgcaatgatttgcaattgtttttctagtacaatgtgacgaggttcaagtgtgggggcttcgcgctcggcctggccatgaaccactgcatgttcgacggcatcggcgccatggagttcgtcaactcgtgggcggagacggcgcgcggcgtcgccgagctcaccgtgccgccgttcctggaccgaagcgtcctgaaggcgcgcgacccgcccgtgcccaccttcccccaccacgagttcgccgagatccccgacgtctccgacacggcggcgctctacggcgcgcaggagctgctgtaccgctccttctgcttcgacccggaccggctggagcgcgtgcgcgggcttgcgctcgccgacggcgccctgggccgctgcaccaccttcgaggcgctgtcggggctggtgtggcgcgcgcgcaccagggcgctggggctggcgcccgagcagcgcaccaagctgctgttcgccgtggacgggcggcgccggttcgcgccgccgctcccgcggggctacttcggcaacggcatcgtgctcaccaacgcccttgccacggccggcgagctgctgtccgcgcccgtgtcgcgcgcggcggggctggtgcaggacgccgtgcggatggtcaccgacgactacatgcgctcggcggtggactacttcgaggcgacgcgggcccggccgtcgctcgcgtccacgctgctcatcaccacctggtcgcgcctcgagttccacggcgccgacttcgggtggggcgagcccgtcatgtcgggcccggtcacgctgccggagaaggaagtcatcctgttcctggcgcacgggaaggagaggaagagcatcaacgtgctgctcggcctgccagccaccgcgatggacgccttccaagagctcatggacgagatatgattcattcgtcggtgatgacggacatggatgggttgctgctatacatacatttacgatgcagggtgcttatacattcttcaattgctcggtgttatagtacgaccgtgttaatactcgatctatgttgatgttgttaagtttagtggccatatgagaatttgctgtcgattgcaattgttctaatattaatggaaaatagtaaactttatttcctttcatt

SEQ ID NO: 31492 - DNA, 1178 bp, Zea Mays
tggacacctatgtaagattaaaactattttccattggcatgcaacttacttgaggtgagaacattccaccagaagaatcttttgatgtagcaaggaggatcaaagaaatgtactgttatacttcttcagacgttgtgaaggaattcaataaacatgacagggaaccatcaaagtatgttaaacactggacgggcatcaaaccaaaaactggtgcgaaatacacatgtgacattggatacgagcggttcctggggcctgagatcttcttcaacccagagatgtataacaatgacttcaccactcccttgcaagttgttatcgacagaatattgtcttgtctggaggctcgactatgtttaaagatttccataggaggttacagcgggacctcaaaaagatagtggatgcacgggtccgtgcatctaatagtcggcttcttagtggagatgctaaggcccagcctatagaagtgaatgtggtcagtcatcctattcagagatatgcggtatggtttggtggatctgtgcttgcttcaactgccgaattctacgaggcttgccgcacaaaagcagagtatgaagagtacggtgcgagcatctgccgatcgaaccctgttttcaaagggatgtactgactcagcctatcatagtcctgttctcaagggtatatatgtatttaaaccgagatctgttccctgtggctgacgtcgtgaatggcgtccactcaagcgtaaatggggagatctgacagcggaaacggactgccaagagggatcctggagaatcctagccgtaggagctgtacaaaagtaaagtgcaaatataggttcattttttatcatacaatttagatgctggtaggcctgacgggatgggtttgccacctctgctgaactgggtggcattgtaatttgtagcgtcaacattggtgcttgtatacatgtagggatggcgttgggggggggggggggggcggcggttgggtcgtggttccgttaccccaaaccaattctccatcgtgccttgttgggacaggagagaattagggggattaagggtatgtttggtttgctatctaatttgtcacactttgtctaacttttctgtctaagattagttctttaattaaactactaaacttagataaaatgtgacatagttagctataatctaaacatg

SEQ ID NO: 31493 - DNA, 4579 bp, Zea Mays
  misc_feature (1)..(1): n is a, c, g, or t
ngggtaagtctttaactgctgcccataatccctcttctgtgaatgggttgtccacgctggccaaatcatgctgctgcataccaatctcactaagatttaaagttagggggcgactttcagctgttcccaaggccttttcataaaatttcagcactgctgcctgcttttcttcttgtgtgatagccatagaggtttctgtatgcagcttagcaataaaattctttttctttctgaaacgggcttgatggtgaaaaaagaaggtatttgcatctccttccttgagataaaggattctagaatgcagtctagcaatggtacgttccaaagaagcaagaccaagcagatgtagtttaagcttcttttttagccattcttccctgtttgaaagatccctggaatctcttgcaatctccagtctatgtattatttccttagccatctcaatatgtaatttaatgttaccaacctttctttgcccccacttctgtaaatctttactgagccgttgcaacttgagaaaaaggcgctctactgcacttgtggactgtacatgagcttcccagttccgttgaacgacctcaaggaatcctggcacttttgcccaaaagctttcaaaatgaaatctcctcttgcctttagtttggagttttaaaccaagaatcaaagggcaatgatcggatacattagacgccgaactttggaggactgaatcaggaaatatattctcccattccaaacagcaaaaggccctatccagccttaccaaagtaggtgaactcctctcgttggaccaagtatatttacggcccaggagagggatttctttcaaatcaaatttatttaaaaatctccaaaaccttcccatcatgtccctgtccagattatcattatttttgtctgaagcctgataaatcatgttgaaatctccagctgtcagccacggctcattacataacatcctgatatctttcaattcctgtaaaaacgtaatcttttcttcctcacatcctgagatctttgtaagtgaccacatccacaatgactgtgttctacattttgctttacatgttttgtgttgaacacttaggtgttttaactgtttactgtttatttgctttaaaaatgccaattgctgcctagaattgttttatacctatgcttaaatagaatactccatgcatgatggaatcttagacaactggggaaaaatgctttacggtgtgcaagttaatacatgtaattagaaattggcacacattcttatgtgctagatcgttgcttccgttatctccccattgcagacaaatattcagtatgggatatgtagtgctaatttgtttgtttacaagtgtaggaatatgaaagtggatgtattgataggagatggagtacatatatatagagactcaaccctaaccctaatgggccggcagcccaacagtggcgccggtccacacacacagtctaacatcccctcacagtcgcaacgggggtaccacacacgatgagactggagtagaggccgaaggtaggagccgacgggttgaaatcccccgcagtcgcagcgtcgtgatggtgcgaatgttgcggctggagtagagattggtgtgtgctccaagaagacgatagcccctagatgccgaggtagccgaagtcgaggtggtcgcggtcaggagacacgcagcaaaagcctgttcttcgggaggagtcgacgttcgagcgtcaacgattggcgagggcgacacaacaaaagagcaccagcaggtcggccttcctgcttcttcgatcgtccgggcgtcaaggagccccgccagggaagccgacagcagcgcacgcgtctgcaccggtcatggtagccgcgcctgcggcagaatagaaggggaaacggcagatccggccgggaaggccacgacagcgacggatccagccgggaagaagcgatccagcaaaagggacggcagatcgagccggaaaggtcgcagcaatgtggatccggctgggaaagccgcgacagcgacagatccagcgaaggcgatgaagggggtgggcggcggggcaggtccagccgggcaggggcctgcgccggacctagcaaggggtgttgacgacaccggtgacgggagaagctcgaagggtgacgcgctgctgggcatcagcgcggtcagtttaggaggtggccaacgcgatgaggaggggcaacacgtgcgagggtgccgacggaggacgcagcgaagaggagggggcacatgcgagggacgcaacgaagaggaggacgccgaccaagggaggcagccatggggaacagggaacgagcagagggactgctcgcaccctgtcccatctcaacgcgcgggaaatggggctcaggagccgagtgccatggatccgaagcttggctggcgacctaggagaggtagctgaagtgggaagccggttggagaccgcggccgccatggggctggaggtagagcgccgtgcgtccgggggcttgtgcccgccgagcagggagccagacggccggagaggaaccagagagaggaagagcagcggctgctgtagaggaaacagggagaagaagatgggggtgtcggcttcctgaggagagggatgacgaccagggacaggacctgagcgccatgggagatgagcagagagaggaaaagctgagggcggccattgctgccgagctggagaggagaggggcgagagcagaggggctgctccggcgcgccatggggaaccgcgccaccgggagaggccgcgcccgccagggaaggccgcaactaggccgccgtcggatccacgcgatggctcgtcggtcctggcggctgctgtggggtgagaggcggtcggcggctactgtggttcaggcggatccgccagcggcagcgcagatccaggcggacagccccggccccaacctcctctgttgttcgcgccggcgtaggggagggaggggtagcgcgcggccggtgcagggaggtccgacggcggttcaaggccggggaggaggtgccctggcggcgtaggggagggaggccgcccccaggagtgtgtgcgtcagcgccctgcacacgaggggaggtggcagggaccgagctccaggacatctcgcgcagggaggctcgccggcctaggatggctgggagccggcggctggagaggagctgccctaggagggaaggatgagcctcccggggcggcggcgcggaagccgtgcctagggcagaggtggggtggcggctggggaaagaagtgaggaaaccctaatcttttgataccatgtaggaatatggaagtggatgtattgataggagatgaagtacatatatatagagactcaaccctaaccctaatgggctggcagccggcagcccaacagtgccgccggcccacacacacattctaacaagattttgataatcacattggttattgcacaggacaacgatgaacatttttgggctttatgagctttcaatgtgcaatcggtgcaagttcatttcggctcatggataagttgatgcacactgcaattctataatcagaatttattattagcttaaaggaagtgatatttaggtgaaatagtgtgaaactcaaacataagtgatatttaggattaaagccaggctaggtgtccagttatcaaaaaacacatctatttgcggtgcttccaaatcatgcaggcacccaggatgatgagggagtcaagtcctttcttgaagagcccattcacagcctccgaggctttttcccaccactcaaagaaggatgtggcacctggttgtggtgctaaagaatgcataccaatctttctcaacatcttgtaccagaagagtcttgcaaatacacaccacacaaacaaatgatttattgtttcagcttcctggttacataaaggacatttgcttgggtgattcagatctctcttagccaatctgtcatgtaatgtccaaaggagcttgaccccaagaaaagatccttataagcagcctttgcggtgtatctgccatatgaagcaatgctaaagatatgcttatcctccctattgggctgcagttcaaaatctgagggaacttcctaaagatgaagatagtccatctcctatttgataaggcgtcttggacagttctcttgttaataaatctctttggaattgagccaaacagccgaggagccaaatcagaaactcttttcccatgtagccacttatccatccaaaacatggtgtttgatccatccccaacctcagagatcaaggccctggaaaagaaagcttgagccttgccaggtacctgaataggtaagccagtccaaggacgtccagggtcagtttttttgtaaccaaagccatctgtaccccatgccaccaagcaatgctctactacgatttttgtaaaagcatacaaatgtgccctagttcaggacttgcagctgatttccatgtacacacaaaacgttgggattacatggtctggccttgcatcaaagaatacttgcagatattgtagctgttcttcatgagacttattttggagaattatttggccgccctacttttgtgctaaagccagtt

SEQ ID NO: 31494 - DNA, 1401 bp, Zea Mays
tgcggctccgcccaacgccagttaccactcaccagtcaccagtctccactctggagtctggaactcccctcatcctccacatctccaccgcatcggaactaggaaggcgaagccgaaggcgcggcgcggcgcggcacggatcgagcgatggcggtggcccctcctacggcggcggcgctggagcagctaagcagcagcaagatgttcgacggcttcaatctccgcttccgccaccagagcgccacccttggctgcgccatgactttctccatctacctgcccccgtccccggcgtccaaccttcccgtgctgtactggctctcgggtctcacctgcaccgacgagaatttcatcataaagtccggcgcccagcgcgccgccgctgcccacggcatcgccctcgtggcacctgacacctccccacgtgggttaaatattgaaggagagtcagacagctatgattttggtgtgggtgccgggttttatttgaatgccacaaatgaaaagtggaaaaactggcgcatgcatcaatttttgggcactcaatgggagggcatggcgcgctgacaatttacttgaaaaacactgataaatacaagtcggtgtcagcatttgctccaattgccaatccgataaactgcccttggggtcagaaagcattctcaaattacctgggctcaactaaatcagattgggaggaatatgacgcaacctgcctgattaaaaagaacagcaaagttcccactactatcctaattgaccagggggaggccgacaagttcctggctgagcagcagttgctacctcacaagttcgaggaggcgtgcaaggccgcaggggctgctctgaccttgcgcatgcagcctggatatgaccactcgtactatttcatcgctacgttcgtggacgatcacattgcgcaccatgctcagtttctcaagagcgcctgactgtaaatgtgtagcgtgaggaagacaaggaggcagcctagcatgggtgttttatctatgccgacagtgttgtctcgtgtggcagcttgaggagaggtgaacagcacaccccacatgcgaaataagatggaagatttgctgttcctgtccattgacattgacgagctcgaatgggactgatgttgcaccgaatgtagtttccctgtcattcgctatgcgcaattatgttataacggccctggtgcaaggaatgattgcccgagtgcttgtgtgtgcggcgcgcgcggttgactcttcttggcattctgcagggggtgtacaaatctgtatggatcagagcttggtttagtgttgtcctcctgttcgaaccagaattgagcgcggacggtccggccctgaggccggacggtccgcggtccggacggtccgcgcctgtgggccggacggtccg

SEQ ID NO: 31495 - DNA, 3399 bp, Zea Mays
taaagtattgttgggcttcctaggaaatgaatgttcaactttaatggacttgcattttaagatttgacttgttcatgacatatccatactccatcattatcactgttgtttctaaacataattaaaatactgatattagacagtaactaattcttagttttattattatgcaaacataggaatgagctcaccttataatgagcagctgtatccgaagttttcatgtcgtcatcagtatgtcactgtagataccacagcaactttggactgaatatgcatggacttccaaagatgaaaattttgcatgtgcagtacatttttacttacgttcttaatttcttgcaagctagaatgattattcttattttaatctctgcatggagcagtgaggttcctaatattgttggttcttgctgtgtagaggctatgtgataatgatccaggggtaatgggtgcaactctatgccccctctatgacctgatttcggaggaaccaaattcgtacaaggatttggttgttagtttcgttaacatcctcaaacaagttgctgagaggaggcttccgacttcctacgattatcaccaaatgcctgcaccatttattcagataaaactattgaagatacttgctgtgcttggcagtggtgataaacaagcaagtggacatatgtacactgtattgggcgacatattcaagaagggtgacactgcgagcaacattggcaatgctatactgtatgaatgcatatgctgcatttcatccattttcccaaaccctaagatgctagtggctgcagctgaaacaacatcaaagtttctgaagagtgatagtcataatcttaagtacatgggcattgatgctcttggcaggttaataaaaataaatccagatattgcagaagagcaccagctggctgtcattgattgcttagaggacccagatgacactttgaagcgcaagacatttgagcttctttataagatgacaaagtcaacaaatgttgaggtgattgttgataggatgattgagtacatgatcaacataactgatcatcattacaagacagaaattgcatcacgttgtgtcgaactcgcagagcaatttgcgcctagcaatcagtggttcatccagaccatgaacagagtttttgagcatgctggagatcttgtcaacatcagagtggcacacaatttgatgcggctaattgctgaaggctttggagatgaggacgaaggtgctgacagtcagctaagatcatcggctgtagattcttatgtccgcattgtcggagagccaaagcttccttcttctttccttcagataatatgctgggtgttgggggaatatggaacagcagatggaaaacattcggcttcttatattattgggaaattgtgtgatgtggcagaggcccacctcactgatgacactgtcaaggcgtatgcaatctcagcaattctgaagatatttgcgtttgaaatcgctcttggaaggaggattgatttgctgcctgagtgtcaaacattggtagatgaattgttagcttcacattcaacagacctgcagcaacgggcatacgagctacatgctttactaggcttgggcaaaaatgatgttgaaagtgttatgcctgcagatgcaagctgtgaagatattgaggtcgacagaaacctctcatttctagacagttatgtgcagcaagccttggaaaacggtgcatcaccttacattccagagagtgaacgctctggtcttacaagtgttggcagctacagaagccaagaacaacaggaaacatctgcccatactcttagattcgaggcctatgagatgcctaaaccttctttgccactagcaacttcacaaaccagcatgtccacaccaaatactgaccttgttccagtttcagagccaggctactataaggaagaccatcaaacatcaaggcctcaaccaccaagcgatgcggtttctggtgagtttggtgtcaaactccgccttgatggggttcaaaagaaatggggaaggtcaacatattcctcttccacaccctcaagctcgatgtccagtcaacaaacaacaaatggggcctctcattctgatgggggagggccaagttcacagccacgggagtcctcatacggttcgaagagacagcagggcacagaagtctcagcagaaaagcaacggctggctgcttcgctttttggttcggcagcagctagagctgacaggaaagcacaagcttctcgaaagacagggaaggacagtccctcaactgagaaagtagctaccactaatgtggctgcccagtctgttaaggagcaagtaatcccagctgctgcaccaccgcctgatctgctggatctgggtgacgagacagttccatcgagccgtccatcggctgaccctttctcacagttggtgggtcttcttggaccagcatctgctgctccggcgctttctgggactccggctaccactaccagtacttccaaagcaccagatcttatgtcaatcttctcagatgatgtaccaactggagtgactagtagtgggtccaccgatcccactccaggtgatgctatttcggtgagctcccacaaaggagcgacggcagtggcaccaaagaagggctcgagccttcaagatgccttgcaaaaggactcgactgcacggcaagtaggtgtgacaccgacagggaacaaccccaatcttttcaaggacttgctaggctaaaggggacagtaaggcacaccgtatgctccgcgtggcctctttgggtagatggagttcatctccgacatgtctcgatcactgaaacagcgatgatctcgctgtttgatcagcgtaggaaaagggttgcaacttgcaagggctatatttgttctcgagtcacaagacacgacctgtcctccttccagttgggaggggggttgcgctgttgagatctgtgaatggttgcgggtatttttcctttaacctcttgtgattttgtgctgagactattgtacatgtgtttacatgacgtgtaatctgtacatgagaccgtggtacagaagcgtgtgccggcgcatttttgttcagctgggctagatacactacaattgctgggcactggaaagtaaaacaatgaaagaattggtgtcattctctggctggaataaaaatataaaacggtaaatgtgtagtgttgtttattgttgatgaaaacagtcgcagatttgtttttgcaacttttaactgttgagaagtaatgcaattctttttttttcggttccattcaaacctacttgctgcgtagggccatggcccatggggcattcagtattttctctcataaaaaggtctactactattcttttctggttctatttagtcgagatcgttgtttttgt

SEQ ID NO: 31496 - DNA, 837 bp, Zea Mays
ctgcaactgcgcagctcatcatcagcactgcgcaggaggagagaccgagagcgcggcgcaggaggcgtcgagcagcgaggtgcggcggcggcggtggcgagctggacggaggaggggaccacaagaagcggcggctgaccgacgagcaggtagagatgctggagctgagcttccgggaggagcggaagctggagaccggccggaaggtgcacctgggcgccgagatcgggctcgacccccagcaggtcgccgtctgggtcccgaaacgccgcgccccgcccaagagaaagctgctcgaggaagaagtcggccagtacatatataatattgagcatgcctttcgtgggcacatgcccggctggaaggtgacgaggctgaaggacaagctggtgctcgccgaggaggagctgacacgattcagatccgcgggcaatgacgcggtctccggtgacggcggagacgtcatggcccgtgccgtctgcagcgggagcccgagctcatcgttctcgactggcacctgccagcagcccggaggaggcggcggcggcggcgatcacctgggggacgacgacctgctctatgttcctgactatgcctacgctgacagcagcgtggtcgagtggtttagcctgtatggactgatgtaatcgatggtatggtatgccatcgtcgtcggcagattaattctagctagctactcatcgtagcgtgtcattgctgtgctgaattgctgatttctatgtgcgccctcttaatcatatgtacataaatcaagctatcaattactggcaaaatatagccagctagcagcaactagtactttaattcagatgtgtg

SEQ ID NO: 31497 - DNA, 244 bp, Zea Mays
gttgtttgggaatgcagcccaaatcgggcggtaaactccgtccaaggctaaatacaggcgagagaccgatagcgaacaagtaccgcgaggaaagatgaaaaggactttgaaaagagagtcaaagagtgcttgaaattgccgggaggaagcggatgggggctggcgaccgcaccggccgtatgcggaacggctcctgctggtccgcgatcgctcggggcgtggaccgttgtcgcccgcgccggcg

SEQ ID NO: 31498 - DNA, 1728 bp, Zea Mays
gtacttattttattattattattatcagcaaagtgcgagtgttggtgtagtgggctagtgcgtagtggttgtaggcttagcgcttaagcatgtggttatttctttatttgaagggtccagtagtaatgcaagtgtcgtgggggtgctggctaagcatgagatgctgctaggtgtttgtgtgtattgattaattagtgaaatgcaagtgctaagtgcaccggtgtgtggtgacaaaaattccttagtatcttctgtgcctgagcatttagaggagtaatacaacatttcatatattttataagaatttgtctttgacaatagatcattttaagcttgcacaacattacacaaagagtgtaaaataattttggaagtcagattatattcatattagccttgttgactacctttccttttgcttcctatttttagcactctcatggattgtgcttcaatgatgaaagaagtccagactccacatttccatacattatttcacaatgcctctataagtgtactgaaactgtattttttctcagttaaacttgggaattaccattcatccgtggccgctgttgtaaataatgatacttctgctcaagaggatgaacaacacactattcgaagtatacttgatcagggcaagacaacaactacaataggaaaagtaaataatgataacctcagcaggcttctcacagagtacttgggaatggataatatgcttgctcttgtttgcaagacttatgatggtgttaagggtcttgagaaatatgacaaggatgacatcattgataagactagtggcattcatggacttggtcgctctgttggaaaatttgtagatggaagatttattgtcttttgtcttgaaaacttgaggccattttctagtgatgttatcattgacgatccacaaagaaagcttattttacatagaccaaggttgcctggaggagagtcgcctcctggttttctggattttgtagtaaatatgatccacctggaccgagcacacttgaggttcctcatagccagtggccatggtcttagggaaactttgttttcccatttacaagtttataagactagaactaacattcaaagttcccttcctctgataaaagatggtgttgtttctctagatggtggtctactgagacccaatggctcattctgccttggccatagcaagaatcttgaagtgaaatttgctgtaaccactgatgtttcaagtttacttgaaaatgtcgttgaaatggaggaacaagttaaacgtaagaattgggagaaggaaatggtttgaaaagggaggaagatctgctgaaacaagttaaggaattatacaggaagcaaaaacaagagctcatggattatgtcactcaaccagcagtgacacatcaactcattcacccgcaactcctgggagtaatctgtttggagccaagctctccaacaagtggcggtaacattttggtggcgtacgtccctattttgttggggcttattgcttgttctggcatcagcacgacgtaactagcttttgccacaagcttggtgttagtttgtgagggtgataggccagtgaaattgttttgctgcttagcttagttggccctatggataccaattgatctatagacagccgggaacttggctaatttattatgactatggatgagacttttgtgatgtaattgatgagattattgatttaaatattgttat

SEQ ID NO: 31499 - DNA, 3477 bp, Zea Mays
gaagatttaagtgcattgtgtagagagcaatggacgggtgcagaaccatctgctcgactggaaatggctccaatggctgcaaatgctgcttggcatatgggtgagtgggaccatatggcagactatgtttctcgcctggatgatgcagatgaaaataagctccgtatgttgggtaacgcaacagctagtggtgacggaagcagtaatggtgctttcttccgggcagttcttttagttcgttacaaaaagtatgatgacgctcggatgtatgttgagcgagctcggcggtgtttagctacagaacttgcagcactggtacttgagagttatgagcgagcgtataataacatggtgcgtgttcaacaactttcagaactggaagaggtgattgattactgcactcttcccatggaaagcccgattgctgacggacggagggaacttattcgcaatatgtggaatgaacggattaaaggaacaaaacggaatgtcgaggtgtggcaagccctacttgctgtcagggagttggttcttccccctaacgaagacagagacacctggataaagttcgctgaactttgctggaagaacggtcgtattagtcaggctagatctacgttagtcaaacttttacagtttgatcctgaatcttcccctgaattgacactgtatcatgcacatccacaagtagctctggcttatctaaaataccagtatgcagttggtgatgagcttaaaaggagggatgcattttctaaactgcaagagttgtctgtgcaggttgctaccaccatgggcaatttacctggaacatcagcaaaccatggcaccatgtcaaatgctggagtaccactcattgctcgtgtctacttgacacttggtagctggaagaaggcactatcacctgcattagatgacgattccattcaagaaattttgatttcttaccataatgccacgctaagtgcaaaggactgggggaaggcctggcacatatgggctttgttcaacacagaagtcatgtcacgctatactttccgaggccgaccagatattgctggaaaatatgttgttgcagcagtaactgggtatttttattctattgcttgtgcatctactacgaaaggggtcgatgatagcttgcaggatatccttcgtctgttaactctttggttcaaccatggggatacctcagaagttcaaacagcgttgcagaaaggtttttcccttgtcaagattgagatgtggctggttgtgctgccccagataattgctaggattcattcgaacaatagagtagttagagaactgatacaatctttgctagttcgaattggaaaggggcatccacaggctttgatgtatcctctcttggttgcctgcaaatcaataagtatattgagacaacgtgcagcgcaggaggtcgttgataagatccgccagcacagtggaggtcttgttgaccaggcacaacttgtgtcgaaggaactgatacgggtagcaattttgtggcatgaaatgtggcatgaggcactcgaggaagctagcaggatgtattttggtgagcacaatatcgaaggaatgcttgctgtacttgagccattgcatgcaatgcttgagaggggggatgagacaattaaagaaaatgccttcattcaggcttatgggcatgaattactggaagctcatgaatgctgtttgaaatatcgggctacaggagaggatgctgagctaactaaggcctgggatttgtattaccatgttttcagaagaatcgacaaacagcttccaagtcttacgaccctcgatctgcactctgtttcgcctgagctactcaaatgtcgaaagttggaacttgctgtgccaggaacttatgctgcaggccacgaagatttgcggcaagatgaacgagtaatgcagctttttggtttggtgaatactctcctagagaactcaaggaaaacatcagagaaggatttatcaatccaaagatatgctgttatacctttgtcacctaacagtggtttaattggatgggttccaaactgtgacacacttcatgctctgatccgtgaatacagagatgccaggaagattttcttgaatcaggagcacagacttatgttggcttttgcacccgattatgatcacttacccctcattgcaaaggtggaagtgtttcagcatgctttgcaaaatactgagggaaatgaccttgcgaaggttctgtggctgaagagtcgaacttcggaagtatggcttgagcgccgcacaaactacgctagaagcctggctgttatgagcatggttgggtatttgcttggtttaggagatcggcatccaagcaaccttatgttagatcgctatagtggaaaaatattacacatcgacttcggagattgctttgaggcttcaatgaatcgagaaaagttccctgaaaagtaccattccgtttgactcgaatgcttgtgaaagctatggaagttagcggtattgagggtacattccgaacaacttgtgaaaatgtgatgcaagtccttcgcacaaacagagacagcgttatggccatgatggaggcatttgtacatgacccgttaatcaattggcgtctgttcaatttcaatgaggttcctcaagtgtcgaactatggtaatgttcatgctcacacggttgtcagtagtgaagaagcagtggctaaccgagagctcatgcaacctcagcgaggagcacgtgagagggaactgctacaggctgtcaatcaactcggtgatgccaatgaggttttgaatgagcgtgctgtagctgtgatggcacggatgagtgacaaactaacagggcgtgacttctcttctgggtcagctttggctggagcaggtagctctatccaacatggcagtgagcatttggcttcaggagatgcccgggatgcccaacctggtctctcagtgaaggttcaggttcagaagctcatactccaagcgacttcacacgaaaatttgtgccaaaactatgtcgggtggtgtccgttctggtgagctctcttggaaacagtagcagtttataacatgtaaatattgtgaataccgtgtgcatagaagtttcgtggtgacagtttgtatgtgcagctttgtaattagcagaacttcaagatgccttggaccatccttttgtcagtttcttagaccgtgtttagcagttcacccttatggccatccaaaacactgtttttgtactgtagattgtattgtttgtagattgtactgttcgcagggtggatttttgaatatgagtataagaatgtgtaagctgttgaagatagccttaggttttcttccgtgccacttgagggtttgttcgattagctctcaatttatgtggattgagtgagatcggattggtttaaatctcaagcaagttaaattttcttcttaatttttctaatctcatcaaatccatgtgtaacgggaataaccgaac

SEQ ID NO: 31500 - DNA, 1154 bp, Zea Mays
gatcgacccaacagaacgacggtggaaccctggtctcctccctcttcacccgcagctgcactgcagcacacgcgccaccgaagcgctctgcccacctcgctcccctccagtggccgccagcgcggctcagcggtccatcctcctgacgccacctgcaacggcgtcaggcggtgatccattccaactcgcgctccgtcctggcaatcactttgggaaggtggtcagtggaatagctttgcttaaaaagcttgaagcagttggtagtgaaactggaaatccttcttatcaagtgaaaattgtagactgtggtgaagtttccaacacaaattctcaggatccgctaaagggagataaagtaagctcaaagacagataacagcagttcagacagtgaaaagggtggccatcgtaccaagcgttccttaccgaaaggaatgatccaggtggaagctccaggaacaatcccattcagtttgatgtaaatttaatgaaaccagtaaatgtagatggcaacattggtggtgataatgcagaggctagcatgtctagaactggtgaaggaaggcatctgccaagcaatgaacctttgtccaccaatggtaaagatttaggtgtgggttctgcagacaatgggcaacctcaacaaatcaggaaaggacgtggttttactcagaagtatgggtatgcacgccgatataggacgccatctcccgagcgtccctctgtttgaccccgctacgatggagggagagatgatagatggaacaatttcaataggtatgaaagaaatggtccttacagtagacgctcgccagtaaggagataccatggctcgccaagagccaatagcccatccagtactacccaagcctcaaccgttcaaagtgttgctcgaaggggatatgtacagtgttttctttaaatgaaaccgactcatactactcggcctacacagtgcccattctgcaaaacgcccaattatgctgtggagtatcgtggcatcaaaacaaaggagtaaaggagcatagagcagtttacagacaattgaaaaagagaattgatcttttttatgggcgaagtgttgaagatggctttggtgaaggaaatgtcttgttagcatcaagtaagtggcgacatcacaacccctacaagctt

SEQ ID NO: 31501 - DNA, 3035 bp, Zea Mays
gtagtctttaattttatatatatgatcgagctgcagatgagaagctgcacgcgatgccccagcaagcagtattagttgggttgacggcgggcatggtggcggcggaggggaaggcagctgggaacaagacgatgatgcagaagcagcaggcgagcagctgctgctcggaccgtgaccaggacatggcggacctggagctggcgcttgaggcggttgttccggtgagcgtgcagcggcaggactcgctgtacagggacgcgacgagggcgggcggcggcgggcagcagcagcacgaagggtgggctcggactctgaggctggccttccagtgcgtgggcgtcctctacggcgacatcgggacgtcgccgctgtacgtctactcgagcaccttcgccggcggcatccgggacaccgacgacctcctgggcgtgctctccctcatcatctacagcttcctcctcttcaccatcatcaagtacgtctacatcgcgctcagagcaaacgacgacggggacggcggcacgttggcgctctactcgctcatctctcgccacgccaaggtgagcctggtgcccaaccaccagcccgaggacgagctgcagacgacggacgccgccgccgccgtgctgggcaagcacgggagcgtgcggcgccggaccgtgcagctggcggcgtcgcacgggcgggagcagcgggcggtgtgggtgaaggagctgctagagacgagcaagcccgtgcgcatctccctcttcttcctgaccatcgtggccaccgccatggtcatcagcgacgcctgcctcacgcccgccatctccgtcctctccgccgtaggggggctcaaggagaaagcgccaaacctcaccacagatcgtgtggatcactgtgggcatcctggtgcttctgttcgccgtgcagcgcttcggcacccacaaggtgggctacctgttcgcccccgtctcctcctgtggctgctcctcatcggcggcgtgggcgtgtacaacctgctcaggcacgacgtcaccgtcctccgcgccttcaaccccaagtacatcctggactacttccggcgcaacggcagggacgcctgggtctccctcggcggcgtcctcctctgcttcaccggcaccgaggcgctgttcgccgacctcggctacttcagcatccgctccatccagctcagcttcggcttcggcctcgtccccgccgtgctgctcgcctacatcggccaggccgccttcctccgccggtacccggagcaggtgtccaacgccttctaccagtccacgcccgagtccatcttctggcccaccttcgtgctggcgctggcggcgtcggtcatcggcagccaggccatgatctcctgcgccttcgccaccatctcccactcgcaggcgctgggctgcttcccgagggtcaaggtgctccacacgtcgcgccagtaccggggccagctctacatcccggaggtgaacttgctgctcgccctcgtcgcctgcgtcgtcacgctcgcgtccaagaccacggccgtcatcgccgaggcgcacggcatctgcgtcgtcctcgtcatgctcatcaccacgctgctgctcaccctggtcatgctcctggtgtggcgcgtcaacgccgcctgcgtcgcgctcttcttcgccgtcttcgccgccgccgagtccgtctacctctcctccgtgctctaccggttcgcgcacggcgggtacatccccgtcgccatgtccgcggtgctggtggccgtcatggtgctgtggcactacgtgcacgtgaagcggtacaagtacgagctggagcgcacggtgtcgcacgagagcgtggtgcgggacctgctgccgcgctgccgcaccgtccccggcgtcggcctcttctacacggacctggtgcagggcatcccgcccgtgttcccgcacctggtggacaagatcccgtccatccacgccgtcctgctcttcgtctccgtcaagcacctgccggtgccgcacgtggacgcaacggagcgcttcctcttcaggcaggtggcatcgtcgtcggagtcggacacagctgcaggcccacgggtgttccggtgcgtggcgcgctacggctaccgggacctgctggaggaggccagtgacttcgcgggcagcctggtggagcgcctccagtactacatccgcgacgtcaacctctacggcgtggagcaccagcagccgggcgccaaggtgagctacccgagctcgcgctgcgacagcatgatattgatggcgcggcagaggtcgtcggtcatgatgctgcggcagtcgtcggcggcatcctactactcgtcgtacgcagcggcagcggagacccagcagctgcagctggcgagggccaggtccacgtccggggcggggggcatcctcctccactcggcgtcggagagggccgagcagctggcccgcgccaggtccacgggcatcttcgcggaggagatgctgacgccggcggagtcgttctcggagctgtcgaggatggggagcatcggcggcggaggaatgcaggcggtgaagatcagcctggaggagatggcgcggatcgaggaggagcagcggtttatcgagcgggagatggaaaagggggtggtgtacatcctcggggagagcgaggtggtggcgcggccccactcgtcgctgctcaagaagctgctcgtcaactacgcctacgccttcctgcggaacaactgccggcagggggagaagatgctcgccatccccaagtcgcagctgctcaaggtcggcatgtcctacgagatctgatctgatctgattctgatggcgcgcgcgtcaccgatcgatctcccagctccatcatgccgtcgtcctcattatatatatatgacccagactccatatagtatagtacactactagtcttcagacagatttgatttcgtatgctttctctgcagtgatgctactagctacctagctagctagtacaattaattgtggcacacttgttagctgctgcagtagcataattattaagtaatttgcttctcatctact

SEQ ID NO: 31502 - DNA, 1493 bp, Zea Mays
caaaatttgcctttgtcatatgacatgtcaatggggtgcgtgaagctgagccaacttaccacacaactggagatcactcaagtgctgcaagcagttcacttgtttgcccatatcttgccctgcgtggttttctccatcctgttaatgtgccttctacttctaattctggtgctgaaagcacttcatttcatcggcactcaactggcttggaaggacatgtcactcctgatttgaacaatgctccagttttccatgctaccgagtcaagaaatcatgacagtgagcacagacatttgagtaatcttcctgtatcaggaactcctgaatattctatgactccatttgggataggagtaccaagatatgacagtggcagccaacagggattccgatcatatgcacatcatcatcccctaatccataggctgacccctcgcagcggaagcaatctggtggcaccattagggtcagttccagccgtcgtggcagagactagaggccatggccatggtgcaccgggccatatgtaccagcactcatctgtgcagggcagcccgttccctcctaccaccagaagggttaggcccagagccttgacgattacgtctttcatcgcagcgacttcctcagctgagattgcagggccccttggccacgggtttcccgctcctggagccgtgaacaggagcgtttctgatgccgagggcatcgaccgagcgtacacatggggccgggagggatatgatctgttcccttggacccctgctgaatggggcaccttcaatcccatgcagaaccatgcgcatggaagctttaccagaaggcctgctggggagcggatgccgcagagtcgccccgagaacggataccagccgcctgtgcccacttcacagaggatgccaccgttcttgtgatcagacgaggctgcctctccaattgctgtgtataaaattatttgattcggggtttggcagagaacaacgagcgaatatcgaccgcacggcagcatcgaaactggtcggctatgagacctgtgtgtgtgtgatgtttatgatgatgccgctcgtatttttagcgctttcggtccagcggcgctcaggtttcgtcgagcgctgtcgtttgtcctgactgatatggtgttgcgttgagaaggactgtttgagctaaactgcatctctggtcccgggattcgaaagcaccgcgtgcagctatggatttgttcgtcacatcacgttcgtgtatggctggccctggccgtttcatgaccgctcgattcctctgccagcgcagcagcgccgctattgtttttttttaaaaaacgtgctgcctcgcccactgccagtttcgcaccatgtttgttgtgacttttatccggctgatgttgccctctataatattctacaatattttgtctctatatattagagctgcagtagttcgaacagcagctgcgggtgtaagcaaccaaataggatgtcgaagattaacaccca

SEQ ID NO: 31503 - DNA, 1241 bp, Zea Mays
tgctgcatttcatcgaacaccacttgagcatcaatcgaatatgatgtaggcttgcttgcagtagtcaccatgtctaccgaattgggcttgacaagctttggaatgaggccagagagatagttgggtctttcctcggctgctgttgctctgtgatgcctctgtgtgtgttgtgtctgcgagcgcaggtgcggtttctgttggtcgcttggccagcgaccttgcaggtggtgccagagctgcttggggtcatccttgtcttctcctgctggaacaaccccttgggtaacagacttgcagaggtcggcaggtatggcgcaatacagatccacacacagcttgaagaagagcgacatctcggtgaggatgccacaggtgagctggtgggatggcgtgaggtaggagagctggtccggcagcgagaacgggctgtggtcgaaccctgccacctcgacaggctcgcccatggtcgtgcgcgtgcacgcgaaggagaagttgtcgacgaccatggccatgggcgtgcgtgcgctagcgccccacccgacgcggccgcgcctcagatccctcgagagctatgcaactgctccagcctcgcccacctcagcctgggggtcaaccagctggagggtgagattcctgctggccttggtctgctgtctcagcttcgcaccctctacatccactacaacaatttagtagggagcatcccaccgtcacttggtaaccttaccctgcttcagattcttgatgtccttgagaacaaactggtaggcagcatacctgtaagcctttcccatttagatcgtctggtagactttgaggtgggtagaaataatctctccggcacaattccaccactgctcttcaacaagtcatcgctcctgtatctcggagttgcatcgaacaagctgcatggaagcttgccagctgatgcaggcaccaacctgcctggtgtcaaaaagctcctcctaggtaacaacaggctgtccggaacacttcctagttcacttggtaacgctaccatggtcgaaatattaggtcttggattgaacagattccaagggagggtggcacctgagataggaaagctgtgcccgtttaatgtcgagatgagtgcaaatgaactgcaagcagaagatgaacagggttgggagttcttcacgctgttcacgaactgcacccgtcttcaactgatcgatctacccctgaacaggcgatggatcggagcggcgagactggcgagg

SEQ ID NO: 31504 - DNA, 553 bp, Zea Mays
tgacaaggtagaaaaaaataagacataataaatctgattattgttacagaagcaagctgcaagcaatatatgagtagtccgtcagtcagtccacagtgaagcctagttagtcagtacgccgtgaagcctctgcaacaattggtagcggctcccagtgcgcagacgggcaaacaacacgggcagcagggacgccggacgcagggcgtgctgtggactttggtgctgggcgggctgggcactgccgcactcgcctggtcgcctggatctcgctcctcgctggcggagtggcggtggcgggtggcggccaggtggctggggcagccgggcagggacgcaggcacgcagccagccagccacgcagtgcggcaccgtggcaggacggcagggcggcaggacggcagggtcgacgccgacgaggagcaggacaggagcggtttctcagcttctgctttctggcggagtggcggctggtggttgagtttgtgcgtgactggctgactgcgctgcgtgaggttgaggtgagagagaaactagggttcctgggtgattgaat

SEQ ID NO: 31505 - DNA, 2613 bp, Zea Mays
tagcacaggggaactagtactacatgaatttgttgggtcatgccatctacttgtgtctgggaaaagtgatgggaacagacaacactagatcaagagagagaacaaggaaaatcaaccaaaagctcaagaactgaaggacaaaaccagatagtgatttggaagggaaggccactggaactggaagtcattgactctactgaatcgcgcctgtgcatactgcaacagtgcaaacacagtcatggtggaggtgcattgtcgtcatggtggaggccggtggccggtgggcagggccctcatccgttctgcgcttgtggccttcgcatgctttgatgcaaacatggtgggtcttcttcacagtgtggagcagcgttgcttgccaacttggtggagcgcagggctggcagccggtgggtggtggtgctcgtttgtgctgtatcgaagcttgtgcaggtgaccgtgttatgtgttgagcggatgaggcaaagggggttcgggggttaactggactgggctgtatcagcagtctgccctgatacgtatctgcccgctgtatcgtgatttattgaatttattttttattctgataagtttctgatacgtatccaaggtatcctgcgtgtctttatcttatacatatctgatacaggatattctgccccaccccatgtatccatgtgtcacagtgtattgaaattaaacaaagttgacagttcgtcggtgccaaaaattatgaatgccaccagtgcacttgacattgttgggctctgagaaagggataaaccgaggaaatcttttcctctcaccccacaaatggggagaggctgcttcgaatctgtgacctggtgattcacctttgatggaatctttgaagaaagctgtggctgatgcaaaaaagccccgttccatacaagacttactgaaggagcaggtggctaaactgagagaacaagcgtctggtggaggcagagggaatgggaatcgccgtggaggcagtggtggttctggtggcccagatgatgaatcgttcaaggaaacattggatgaagtagtgcaagttatcttagccactgttgctttcatacttgtgtacatccacataatcagaggggaggagctttaccgtcttgccagggactacaccagatatctcgtcaccggtaagaggactgcccgactgaagcgtgccatgcaaaggtggcgcaacttctcggagagcttcatgcagaaggcaggctcagaagacgaccaatatgagagaccagctgtgtcaaaacctgcatggtggcaacagcctcagaaatttgtgcattttgtggaggacctttgcaggggaaactggcgtccccatgctcaggagtcttagttgatggagtaccccccgacccattgcagaatgcatacttggctgtgattggagcaaggtcgcctgtcaggctgtcacctggggcaggttttttttttttgttatttatcggatatttgccactggtttcttaggagtatgtagaaagtcgctgaattgttggcaattttgcagttgatagaacctcgttttgagactctaacctgccaagtcgggtgtggaattgtttattaataagctgtttggtttgaggaatgatctagtccatcgtcttctcactcctcacttttttgtttggtttgtggaatggattgagttgatccatcatcaccttattccttatagttatttagttagtactaatatgagtaataaggtcatcccaccaaatttgaggaatggactcatgatgcaccaccacattttggatgaaatgattcctcaaaccaaacaccccctaagtcggcctttctatgtacatgtttgttgaggactgcagatctattgccaccaccacaagcctcagccctcagctagctagcaagttgccctgccatacatttttgttgttaggatattaggacttcaaagttacactagccgtgcaaatgtaacaatgtagtattatgttttgtaggaaatttttgcacgacctatcatgcccatgaggccatgaaactattgtcctttcaatagcgatattgctagcacagtaaacaccaatccatcgacagaacaagagagttcatgaaaatatgaaatagctcactttttatgtttcttcgctatggttatacaaactcagtatagttctgaaaaaataaccgagtgtctgcaccaaactaccaaaaagtttcatattgtaaacgtgaatcggtgcatggccgtttccccagattgaaagaaatcatttgtcgctgttatactcggtggttggcaatgctgaaagtaatccggcacagatcaactttcatcagcaggagagcctgacgcttcagcagctttcttttccttctgtttctctctgcgcttcttgtttcgcaatgcatttttgctcatctcccccctgtcacattaagcttgtaccttgtcctgaagttctgcagaacccttagcatgaggtgggcggtatgctgtaggttttggcgctgtaattgcaggggccttgcttgatgtttgtgctgacttggaaccttgtgctgaaactataaaaggaagtcaatgaaagatatcaattgatcagaacagat

SEQ ID NO: 31506 - DNA, 1379 bp, Zea Mays
atttgaagctgctgtagcattgaatcttccaaacttcaccctcagtttatagcttttgatctttaaccaataccttttttttcattgttaaaattactatgcatattcatctgaaacgtcgatgttgttactgtatgcagcctctgcctctatccactccattgttaatatatccactatgttctaattaattcatgtaatgttttcttaactcgaccgtatctgcatttaatgtaacaaaacgaaacttgatcttttgtacatttaatatttcagcagtaaaagttgccataacagattggttgttgctgttgctttgttggataagtctgtacaaaaatagatatcttaccctcaaatatgattgtgcaacctttgatctcataatatgtcacttttataccatacctgtgactgcaatgctgcacttagcaaagaggaatggccagaagaggattatcccatctatgcaaatggtcctggatatgttatatcctctgatattgcagactccattctatcagaatttttaaaccttaaattaaggcttttcaaaatggaggatgtcagcatgggcatgtgggtcgagcggttcaacagcaccagacttgttaaatacgtccacagcgtcaaattttgtcaatttggatgcatagatgattattacactgcacactaccaatcaccgaggcagatgttgtgtttgtgggacaagctgcaggctggaaaagctcaatgttgcaatatgagatagcaacattggaggtggtggtactggtaggcgtttctgtggtggtagtgcctatccttattcatgaaggagaacctagaagccttgaaaataaattaaaccctcgagatgactaacaaattgccatttaacggatttttttggtatagctgaacaggcggtgtttcagctggaaatggaaacagggggaatgggcagcggcctgtaacgactttctgattgagcttgcggcgctcttctttctcgacgtatagacggagttctgtgagcagtatggaacctgcttgggtcttgatttgtaaatgggacgggtagaaagcttagtcaaataactattgcttttggcacttatggctgtggttgcatttataggcaacccagttgtacagatggtagtgtacaagaattttgctgtgctcttaacatggtcataagttatggtttgattagcaggcctacttgtcttaatctggtcataagttatgactttattactggtggacttgtcactatcacgacttcggctctatgactttatgacctttaaccacagttattactactgttcaaaattataattcattttctactcctttccttctaaaatactgttccacttggtcctagg

SEQ ID NO: 31507 - DNA, 675 bp, Zea Mays
cgcgtcctcgatgagatggcgaacatggaggcgcgcctcaccagcacgttgtcgcggcgttgtgaggcgatcgaacagcgcatcgacgcctcggatcagcgtttccaagcatccgagcaaaaggccgaagcgcgattcatctcgcccgagatggatcacgcagagatcgacaattggaaaccggcgatcgagaagcgtctcggcaatctgtccctggagatgtcgcgcgcgaacaagttcatggaacacgaatccatggcgcaggactgcttcaagccgggcctccttcctacggacatgtcgtcgttcggacgcgcaactgctccacatcattccgccgacgagcctaatggcaaccacatggaattccatcaccgggagcgtgagttcgatcggattccgatcccaactcacggcccggtcaagggcatgtactacgacacctctcaacggatcgatcctgattcttatccattgtcgtatgctgctatggagggtggtcgttcgggtcatggcaaattgccccacattaactttcctcaattcgatggcgacaacccccagttgtggaagtcacactgtgaaaaatattttgatatgtatgatgtcgatccagccatgtggatcaaagtagccactatgcacttcacgggtcgtgctgcgtgttggttgcaa

SEQ ID NO: 31508 - DNA, 1268 bp, Zea Mays
caaatttctcaacgtggatagtgagcacatttgactgaccgccatagcaaccagaggaacacaaagcggcgaccgacgagccaagcaagcagcagagcatggacgcgggagaggtgcggcactggaacgcggacgtcaacggcgtctccatccacgtcgccgagcggggccccgaggatgggcccgcggtgctcctaatccacggcttcccggagctctggctctcgtggcgccaccagatggccgcgctcgccgcccgcgggttccgcgcgctggctcccgatctccgcggctacggcgactcctccgtgccgtccgaccccgccgcctacaccatcttccacatcgttggcgacatcgtcgcgctccttgaccacctccaagttccaactcacaaaggtgttcgtggtggggcacgactggggcgcgcaggtggcgtggcacctctgcctgttccggccggaccgggtgcgcgccgccgccgttctaggaataccgtactacgctcgacaagctcaccccatcatggaggtcttcgcggcgtttggcgatggcttttacataaatcagtttcaggagcccggaagagctgaagccgcattcgctcaatacgatgttgcaactgtactaaagaagttctactccattgaaatagatgaactcactgctcctcctggagtggagatcatagactttctcgaggcatctccatcaccacttccttggctcagcgaggaagaactgggccagtacgccgaaaagtttcggaagtctgggttcactggacccctcaactactaccgcatgtgggagacgaattggagacttcttgcaccctggaacgaggccaagattacagtgcccgtcaagttcatagctggtgataaggacatcggtgtccagtcctttggggttgagaagtacatcaagagtggggaattcaagtccactgtcccagatcttgaagtcgcggtcattgaaggccaccattttctccagcaagaacaggccgagagggtgaattcggagataatttcctacctcgtcaggtttactagccaggaggcatcatcttgatgctttgctcccagttgaacctgaccagaaaaaaaatgatgtgcgatgggactccatttctttctgaactgaaaaggtcttgaattgccgaataaagtgtgagtagagttgaaaagggatggaagtcccgtccgtactgttttccacatttgacccgtccgttttcgtatttgtggaaaaatctagaaata

SEQ ID NO: 31509 - DNA, 4466 bp, Zea Mays
gcaaatcacgccggccccacaagacccaagctgcaaaactatccagccaccattcacccctccgcactccgcctccgccgcctccctgccctcaactccacgcccggcagggtggccgctcgccggcagccaaaccctaggcgatcgcggaggccaaccacgcttcgggcgcgatcagccgccgccatgcagggcttccccggcggcgcccccgatccgcagcagctacaggccaccatgctcgccatcgagcaggcctgctccctcatccagctgcacatgaatccatctgaagcggaaaaagtgataacttcgctgcattcgtctctcatgccttatcaagtatgcagattcattcttgagacatcccaaaaaccaaatgcaagattccaagctgctggtgcaattggtgatgctgcggtaagggagtggggagttcttacagatgacaataaaaggagcctaataatatattgtttaaactatgttatggagcatgcaagttctcctgatggctatgtgcaatcgaaagtttccgctgtggcagctagattactgaaaagaggctggttgagcaatctatccggggcatccatgggcctaatcgacagtttgctgcaatcaatttcttggaaaccttgaattctccccttcaactgcttctgctatgagcctgcctaaggaatttcacgaacaatgtgaatactcactcgaagtgcagtttttgaagatactaagttggaatttcaaacatactgtggagcacgagagttcagatgctaagataaatttcggcttaaggattgatacgataaatctgaagaagtttgaacgttcgttggtgaagccagggtctatgtggagagagattctaatatcaagtggacaccctacctgggttttaaacttctataccaccttgcgccaaaagtactcatatgatacactgtggggtgattctccaattgctgtctcttgcagacagcttatagtgcagttatgctccttggcaggctctgtgtttcctaatgataatggggatgcacagattaaacaccttatgctgatattatctgctgttgttctatggattgaacctcctgatgtaatcacagcatcaatccgaaatgggggaagtgaaaggttctctcaggatccatctttgcaatcttgatttaacccgagaaaaaacttgagaaatgctgatgagcgagatattcattgtgttgcagtgagttcatagatggttgccatgccttgctttcaatcgcatctttaactactggctcactttttgacaacctcctaaaatctataaggccctatggtacagttaatctgctttctgctttgacgtcagaagctgtcaagtcggttctgaataaccagagtgaagaggaaacctggggcatagattcccttgatattttgttagaaacatggaatgttcttttgggggacgtagatgccgataaaaatccaatctcaaccgatggagcacttgcatcttcaagtttgtttaagatgattgtggagtcacacttgaaggctgctgctgattctgcgttcgaggatactgatgatactgaatattttcatgtttctgtttcaagtatgcttaaattcccgacagttcatctgttctagtatctctacctcttttggattcatcaaataataatgaagtacttcttccagaacgtgatgaacagttagccttgtatgctctaatagcacgggcttctgcaaatactactattccatttcttgcacagttgttttcagaacgatttgcccggctaaatcaggtcttcttgttatcttgtaatttacctgagttattaagaaaggagaagctactaagctatactgcttcagtagccttgtacattctactgttttgtggtggtgtatttttacagttaacatttaatagatttttctaagcagagaaatggtgaaagtgatcctactcaaacactggaagagctctattggctgttgttggttactagtcatgtcctaactgactctggcgaaggagaaacactacttatccctgaagcattacaggctggattccctaatgtgattgaagcagcacatcatcctgttgttacactctcctggtctataataaatttttccaggcagtgtttagatccaggaattagggcaaaatacttcagtccacgactaatggaggctgtgatctggttcttggccagatgggttgcaacctatttagtgccacttgacgtgagtagaggaaaagtaagcagagaaattgataatgtgggtacaaatggatcccaacattccagaaaactgctaaacagttttgcttgggaaaataaccaaggagagcttgttcttgattttgttgttctcatttcaatgttagctcttactacctatcagggagaaaatgagttgcagacactgacatgccagaagctacttgctacagtcgttcgccggaaacacacatgcacttatcttgttcaactggattcatggcgtgatcttacaagagcttttgcaagtggacggtctttgctttcattgagtggacgtttacaaaggtctctagcagaaacacttgcctctgcagcttcctgcatcaaagatcctgaagcatctgcacagtacctgagggatctcatgggaccagtggcagggtgcctggtagaaaatgctagcaggagtgatctaaaatctgtggcacagcaagcagatgttatttacatggtctgttgcctattggaacgactaagaggcgctgctagagctactcaaccccgaactcaaaaagttctatttgagatggctcatactgtgatgaacccacttttgactcttctggaggtctacaaaaatcattccacagtcgtatacatgatactcaagtttgtggtggactttgttgatggtcaagctgtattcctggatgctaaagagacatcagctttggtgagcttttgcttgcaactactccagatatactcctctcataacattgggaaggtaatgctctctctttcttcaagtctgcgtaatgagtcacaagcagaaaaatataaggatctgcgagctttgcttcgtcttctgacaaatatatgttcgaaggatttggttggctttctgtctgattgtggcggtgaaggttcacctgatatcgcagaggttatctacattggtcttgatattgtgacccccttgatatctttggatcttctgaaataccctaaacttagtcgtgattattttgtgcttatatcgcacttgttggaactgtacccggaaaaggttgctcacttaaatagtgatgcttttacaaggattattggaagtcttgacttcgggctccgtaatcaggatagcgatgttgttgagaggtgcctggcagcagtaaatgctcttgcttcatacaatttcaaagaaagattaggagggagaggaagactgaactcgcagctcatggaatctgaaggatctaatggcaaactgcaggaaagcatatcaagtcacttcttgagacttctgttgcaaatacttctttttgaagatttcagatcggagttagcaggttatgctgccgatgctttgcttcctttattgttctgtgaacaggagctatatcagaggttggtccatgagttgttggataaacagcagaatccgaccgtaaaatcaaggctggcaactgcgttccataaccttacaagttcaaacaatctctcaagctcactcgaccggccaaacaggcagagattcaggaaaaacctccttagcttcatggcggatgtatcgggcttcatgcagatcaagtagatgcgatggcagggaacaggtgatgtttgaccggtcaattaaaccccgaggaagcactgcaccactgtggtaggggtgcatgtgggcaccacatgtctgtggattgatgagagcgaagactgccacgacaagtctagtagatcttgaagagctagtgtcaccagaaaagacagggagatgagctagtcttagggttggcattcatagcgcatttgctggacaagatggaggcgtccctggccacgagatcgtcgtgtaaatgcgtttgttagacgcacagaaacggtggggattttgtggtggcgactcgttttgttcaattcccacaggcagaaggtagagatgttaagttgatgtaaataccgtttgatttaaacatgccttattcgtaggagaaagcgacacggcttgctgtaacttagggtttattactctttctcgtggcataggatccccaaagaagtctttgctggggtatttgcagccaaacgatgaccagtatgattgcgagaggttttcaatcttttgtaccaaatttggcctgcagttatgatgacactgagtgccgatacaggcatgaggcattccaaaattggcgggcaccacatgtgtctgtctgctgtctcagtggg

SEQ ID NO: 31510 - DNA, 1067 bp, Zea Mays
gccgcccccgcccgaaccgaactcatctcctttccgtttgggcgccaaaacagcatccgccgcgcgacgcgtctcgtcagcgccgccagccccgtcagaatgtctaagaagagggggctttcgttggaggagaaacgggagcaaatgcttcaaatattttatgagagccaggaattctttctgcttaaggagctagagaaaatgggtcctaaaaagggagtgattagtcagtctgtgaaagatgtggtgcaaagcctggtggatgatgatcttgtcttgaaggataaaattgggacttctgtgtacttttggagtcttccaagttgtgctgggaaccagctgaggaatacttacaacaagctggaatctgacctttcaaactctagaaagcgttacatggaccttgttgaacacagagataacttgaaaagaggccgggaagactctgaagagagggaagctgctttggaggagctgaagactgtagaactacaccataagaaactcaaggaggaactggctgcatatgcagatagtgatccagctgcagtagaagcaatgaaggatgctactgatattgctcattcagcagctaacaggtggacagacaacattttcactttgcaacaatggtgttcaaccacattcccagaagcaaaagaacaactggaacatatgtacagggaggttgggatcacagaagattttgagtatttgcagtgatgtccaacagcctattacagcgtcgaaaatgtgccacggaatgttggatcgatcacagatgcaagtttatcatgttggtgctggactacttttcctagatgctaccaagtggctagactataccgaaggctcctgctatgcttgaaaactttaccgaaggctcgattttattggatgtagtggctagactatatcatgaaatgtatatttctttgctgatggaaagaacaacaatagcttggcatctggaaataaaaatactgccctaaaaatagctgaaaataataataccagaacctatagaaactaagggttttgaagagcatatgagaagggcatttctg

SEQ ID NO: 31511 - DNA, 3439 bp, Zea Mays
cgttttagtagtcgttttggacatcatttcacataccaaggtactgcttagtcagtcacacagatttagagcgcttgttctgcttggaagatttcttgacatggggccatgggcagttgatttggccctgtctgtcggaatatttccttatgtactcaaactgcttccaacaaatacaatagagttacgtcaaattttagtgtttatatggacaaaaattctctctcttgataagtcttgtcaggttgacttggttaaagatggaggacatacatattttattaggtttcttgacagtttggatgctttcccagaacagcgtgcaatggccgcttttgttatagcagtcatcgtggatgggcataggatgggtcaagaggcttgtatgaatgcagggcttatagatgtttgcctgagacatctgcaacctgagaatcttcatgcacaaacagaacctttgcttttgcagtggctttgtttatgccttgggaaactctgggaagatttccctgaggctcagttacttggtctgcaaacaaatgcaccagaaactgtaatatgcttattgtcggagcctcgacctgaggtcagagctgctgctgtttttgcacttgggaatcttactacattatcaaattgccctgatgatgattctgatgatgatgaaaaggtgaaagctgaaataaatgtagttcgaagccttctccagatatcttcagatggtagtccccttgttagatctgaggttgctatagcgcttactcactttgcgttgggtcacaacaaaaatctcaaatctgttgctgcggagtattggaaacctcaatccaaatcgttgctgaagtcattaccatcattggcaaatataaataatccaagcaatgtttacagtcccaataatattctccaaggcagcattggtcctgtgctgagggttggcagtgatagcggtgccgctggtcgtgatggacacatttctacaagtagcccaattgcagcaagtagcatcatgcatggctctccccagtcagatgattcttcccaacactctgattcaggcatattactgagggagaatgcaagtaatggtggtctcagctacactaggtcgaggcctgttgataatgtcatttattctcaatttatatcaactatgtgttctgtttctaaagatcctgacccaagaattgcaactattggttggagagcactgacccttataggtgttgaacaagtggccatgaaaagtactcgatttaacagtggaggtctacaccgaggagagacatctgcgtcaacctttggaatggcacactcttcttcttggagagatatgaattctggaagcaactcgatgaaatttatgacccctcctgttagccctcctcagcatgattatcttctactaggattgcgccgagtgtgttctatggagtttggacagcatcctataaattcacctgatggctttgctaatctccttttaagctctgctacaggtcccagtaatgcagaactaaagaaacttcccgaatcaacaatttacaactggagttgtggtcacttctctaggccacttttaactgcctctgatgataatgaagaaaccaatgctagaagagaagagagagaacggattgcactagatttcatcactaagtgccagcgctcctcagcctgcaagattacaagccaaattgctagttgggatacaagatttgagttggggacaaaggcagctttattattgccattttctccgattgtcgtagcagctgatgaaaatgaaaaaataaggtgatggaaatgtacgcatatggaaaaattttgcttgtaagggagggcagaaacttgtaactgctttttcatcagttcagggacatcgagctgctggtcgcagtattgtgattgactggcagcagcaatcttgttatctgtacgcatctggtgacatgtcttccatcttggtatgggatcttgacaaggaacaacttctcaacaccattccgtcatccgctgatagtgccatttctgccctgtctgcatctcaggtccgctctggatactttgctgctggttttgctgatggttctgtcaggatatatgatgtttgctctcctgatagtaggcctgtctatgtggccaggccgcatgccccaagaacagaaaaggttgtgggcatagggtttcagcctgggtttgatccatacgagattgtaagtgcatctcaagctggagacattcagtttcttgatgttagaatggcagcagaaccctacctgactattgaggcacacaggggttcacttacagcattagcggttcatcggcatgccccagttgttgctagttcagccaagcagatgattaaagtgtttagtcttgaaggagaacagttgaggataattcgctacctgccatcttttatgggccaaagaacaggcagtgtaaattgcctttcttttcacccatacaaatcactcctggctgccggtgctggtcataatgctcttgtctctatctatgctgaggaaaattacaagtaagatcgaggcctatatctcatgctcatgataatgcagacacagtgcgatcgacaggccttacatttttggccaagtgatgctccacagcatggtgcagcttcaagatccaagatgatggtaagctttgtcacagagaaggtgttgatggctccatggctttcggtgcatattgcctgttggacggcgtgtgcaatttgtatgatacagtcaagaactcaagattcattaggcctccttgcattgtgaaccctaccctgatcctgccgttgaacttggaggccccatcaacaaattaatcatacctaagttaaccaaaatgtaaatagccagtgcattcgggttgtactttgtcagcattaatccctttttcaagtgtaaaaaggtctgaaggtgcttgatatgataaacatggcttggtagtggctgctgactgggcaagtggggttgtgcatatgggcctggtcgcacatttctgctcacagatgatgttgaatagatagatgtctgctcacagatgaggttgaatagatagatgtctgctcacagatgttgttgaatagatagatgcatttgtccagctaatatagcgctagatgggggtagcgttggcctgcatgaatgaaggaaagttgtcgagtgaggagtgaccttcattgccattctgtgccgcaacaagtctccatgtgttatcagatggccctgtagataatacatatatttgtagatgtgttttgttcggtgaattgtgctgaccgctgagtaaaatgtattgtgaacgttgttgataaatgctattgtaatgaatttgcaacaagaaaaaattatatgctattgtagtgtatatcacaactctggttgctttttatttttatttttttaaaaaaagatctttc

SEQ ID NO: 31512 - DNA, 221 bp, Zea Mays
ttcgccgtttgttgtgtgtgccgcgtcgtgcgattgggggcctgaccgtgggtgccatcttcgtcgggttcttcggccgccactgctgggcggaaggaagaccctcgtcgagaaccgaaaacctgcgcgtgggagagggccgccaacctcgatctcgcgatgggccgatgctgggttgcggcatgcttctctgatggacggtgacttctcgtcggagcgcg

SEQ ID NO: 31513 - DNA, 3038 bp, Zea Mays
tcgccaccgccaccgccaccgccggtgtcgtctatcctgaccccgacacctcgccgcccggtgccacctcaccgccggattcacatcgcccagtcgccccaccagccagaacctcgtcgcctcgcccgccttgctccgcaggttaggcagccagtacccccaaaccctagcatcctcggcgctgtcggtcgtagaagagcactgggggcgtgagagagggagtcaccagccctcgagacctcctcccgcttctaccactcagccgacgctcccaaaaggggcatctcaaatcccacctcactcccttcgacctctgagatgtcgatatgaatggagacctgtaacttgtatatatattagggcttagttttcttgtttcagtatctgtttggagttagaagcaagggttctcatggcatctccacaagaatccaattctctgtgcttgaagcgaaagcttgttgatgactgcctgtcaaaagactgcaaatctcgccgtgtcaaatctgagaatgagccctcatctgattcatttgctaaacgctgcaactgttgctgcactcgacctaatcttgccaatgattgtgtgaatttcctgaagagtggagcgccaaaccgtgtcatgtattacaaaaaaggttcgtggcacaattttccagagcaaataatgaattccctcatcgatgaatttaaaggaaataaatcaagtgttgtctctgtgatggatgatgaaccaatccttgttgatttcttatcaatgaccctggtcaacctgaaaaccagaaagcagcggtctgttgcctggtttgatgacactggcaagcgtttctttccttctctgttctttgatgaggaaagtgatgaaatgcccaaacaggattctggcaatgttaataacactgcacaaggaataatgttagataaggtcacgagttctccacctgaagtggtcaagcaagttgttcttgaatctagtccaccagtccctcaaaaaccttcaactgtggatgtcttgcgcaagaagatcacatctgtggaaagaggtagcgaagggtttctatttgtccaggacctttttctctctggtatgaacccgtttgcaacaccaaataacatacttcatgtccaccgctactctccaaacgatatcaccgcacaatgtagatttgaagcttttgaaagacagatgaagtcaactaaagaagcacgtggtgatgcaaatgttaagtatggctggctaggatctaggaagagtgacatagttaggattctcattaatggtttgggtactactgcaaatcctgttgagaaagctggtttgagtgctggtgtatatctttcacctgaaaatcgagcctttaccagtgtcggtctttgtgatgttgacgaaaaaggagtgcagtatatgttgctgtgccgtatgatattgggcaatgtagaagctgttgaacctggatcccaagagtcttttccaagcagtgagatatatgattctggtgttgatgattgttcaaaccccaagtgttatgtgatgtggccatcacatctaagcactcacatccgtttagaatatcttgttagtttcaagcttgccccaaaagttcgaagaaagcataattacccgtgaagaaatggtgaagaaaatgataattgtagttggagagaaagtacttttggaggccttgaagaagcttcattactgtccatcattatggtacaggccttctgttgaagcagtgtctagtgattctgtaatggcagcaccaggaaaattatccttggataaggcagttcttagcaccaaaggatgtgaaacccttgcagcggatatggtgcccaatggtcaagattgtccggcaccaagtggtgtgccagaaacatctagttctgctgttgccatgcgtggggcttctacaagtgtggaacccaagcgcagagatcctcctgtacagattgtgccacctggaagctctgcaaccccatgtgccaaaaatcaagattcttttgtaggaagagtgacacctatagctcgtgatgggcttttgaggacaatttgtggaagctcttcatctcctggcggttatgcttctctagcgcaagctaatacctcccaaaccaatggagtttctgccccaggtgtcactcctaggggctatgaatctgctgtaccaagcttgtcacttggaaattccgaaagtacaggcgtgaaacaagtaaattctgcaccaagaatgacacctgaaggccagaagttcctttcgctgggtattgcgccacgaagcccagcactgcgtgatttagtaaaatgccaggccagttcgacactcgttgccatgcctccagcgggcctgggaaaatcacggtccatgaagatcgagggccatgattctctggcaccgagtgtgaaggagccaaaaggcaatggtggtctagcaccaagtaaaacgccaaagctgcatgaacctgtgatagctgatatgagcatcaagagctgtgattctctagcactgggtatcgcaccaaatggccatacccatgatggtccagcatcaggaagtggggaggccaagaaagagcaggcagcactagtaactggctcgcagagtaaatcatctgtaccaagtcttgacgctagcagccatgttaccggggcagcgagcgcccttgtcgcactatcaactctgcgggagaagggcgggcgttagaggagcagcagcagcagcagtgtagttcccgttggatcagatcctttttctctactgtacatgtttctatgtacaggaatcatccccgtcgactctgatccccagtgcgtacggttgctgttggtggccagtcccctatatgttgcttggcagcaaatgttttggttaataattagtttttataaaaggaatattcacccttgttatgttctctacatgtaaattatctgaggtatacttgcattattatgagtgctataatcttttcttttactacatgctctaaactgtatcgtgtattcaataataaaatgttaatttactccctccatt

SEQ ID NO: 31514 - DNA, 1074 bp, Zea Mays
tactaggtgttacgaaggatccttgtgaaacacattatttctgtttccttagttctggattgattatttttcaaagcaacagaaatggtccatccccagcaaaatgatacaacaaatagtccggttatgttgcctgcggaacctgcagaagaagaaccaatatatgtcaatgcaaaacaataccatgcaatccttaggaggaggcagacacgtgctaaactggaggcgcagaacaagatggtgaaaggccggaagccataccttcatgagtctcgacaccgtcatgccatgaagcgggcccgtggctcaggagggcggttcctcaacacaaagcagcagccccaggagcagaaccagcagtaccaggcgtcgagtggttcaatgtgctcaaagaccattggcaacagcgtaatctcccaaagtggccccatttgcacgccctcttctgacgctgcaggtgcttcagcagccagccaggaccgcggctgcttgccctcggtgggcttccgccccacagccaacttcagtgagcaaggtggaggcggctcgaagctggtcgtgaacggcatgcagcagcgtgtttccaccataaggtgaagagaagtgggcacgacaccattcccaggcgcgcactgcctgtggcaactcatccttggcttttgaaactatggatatgcaatggacatgtagcttcgagttcctcagaataaccaaacgtgaagaatatgcaaagtccttttgagatttgctgtagctgaaagaactgtggttaggttatgagtttcttcctggagactgatccatacatgacatgctacctcgtgctgagtttctgaggtgaagccatcgaaacatgaccgtgtggttcagtacccttgctgccttcagtgtctgataagctagctctccagtttgcagtttctctgaattccagcatgtctagtctctgcttatcttttgcatgtaacgtgatggtgacttagcatacacatctattcatccatctatgttctcaaagcagcactgcagagatgttaggagtgaacagaaataattatgctcacgctgggaact

SEQ ID NO: 31515 - DNA, 4166 bp, Zea Mays
ctagccttcgggactcgccatctcccagccgcacgctcttctcgcccacgcacacacgattccttctcgcgctctcgagattcttcccacacgcacacggaagattcccgcctcctcccctctgtcgccgctgctgccaacgctagcaccgatgccacctcttggttcccaggttgtgtcttgcctctttccatccaccgtcatcgccgctacctatggcttccccgtcgggtcgtctcttgcctcattctgttccccgccgctgctctcgccacccactatcggaggcattgtgtccagaaacatggttaagagggtatgctgtctgagcgccagggagatccgaacggtgatgccctctactcgcttcccattgtcctagagtcaggcaaatggaggaacatgagtcagtggggctgccatagttggagaatgcggcgtaagcaggccgacgacggcgagttcctcaacatgtactccgccatatgcgtgatgacagctcctccgtcattaccatttgttttatggtagcgagatgcgcgtgaagacatttggattcgtccaccaccacatcactagtctcactctcacctgtaatatatctgcacccaacgagcaggtaccaagcaattagcaagagaaacacaaggtcgaggtggtgaggtatggagctcgccttgggggccatgaccagcttggcccttaagctaggcgacctgctcatggaggagtatgtcgtgcagaagggcctcaagcccgacatcgagtctctctccagggagcttgtgatgatgaacgccgctctcatcgacgcgtcccgggttccacctgaccagctcaccgaggtggaaaagctttgggcacgcaaggtccgggacctgtcgtatgacatggaggacgccgtcgacgatttcatcctgcgtgtggctggtggtgacgactctgccgccgactcaaaattcttcaagaagacccttgccatggtcaaggacgtgatgtcgatgaagaagttcaaggatcggcgccagatctccgacaaggtcaaagacatcaagaaactctccaacgagttagctgaacttcgtgccaagtacacggtaaggggtgtgggcgctgatctcgccgcgagcaccggcatcgaccctcgtgtcatcaatctgtacaagaaagagacagatctcgttggcatcaagaagtcaaggaacaaagtcattaggatgctgtctatggagaccaaagatgatgatgcacttgagtcccatcaggctctaaagatagtgtctatagtcggggttggaggactaggtaagactactctagccaaaacagtgcatgacatgcttaagaagcaattcgactgttctgcttttatttctattggtagaactcctaatctgaataggacattcgagaagatgctattgaaacttgatcgtgagtataaacaagttgacatggccagatgggatctagaacaatttaaaaacgaactggatgaattcttgaaggacaagaggtacttgatcgttgttgatgacatatgggatgttgactcatgggaagcaatcagatatgccttgaaggacaataattgtggaagtagaataatcatgactactcgtaattttgggattgtcacgaaattagaagaggtttatagattaaaacctctttctaatgcaaactccaagaaattgttctacaaaagaatagagagtcaggaaggagaaagccttgatggtgaactctctagtaaaatcatacataaatgtggcggcataccattggctatcattgcaatagctagtttgttggttgaaagatcacgtgaggagtggtcagaagtgtacgacaagattggtcttgggaatgaagacaatacaacaaagataatgtcatacagctactatgatctgcctccttatctcaagccatgtctgctgcaactaagcatatatccagaagactgtatcattgatacaaactctaccatatggaagtggataggtgaaggtctagttcatcttgagaaagaagagggtagcctatttaaggttggagaaagatacttcaaggagcttgtgaatagaagcatgatccagccgacagaggacaaaaatgatcggtttgtagaagggttccgtattcacgacattgtgtttgatctcatctgtaagttgtccaaggatgaagacttcattaccattagcgggcaacattcatctcgggatagtttaagaagagagaagaaaacatgtgtgcctcgctcagactgcaagctacgtcggctggccgtccgaaatcaacgtgtgcagcgcttccctgaagaaaccatcgacatgccagaggtgttgagatcacttagcattatagattgtaatattgaggttatggccccaattgatagcttcagggtttgccgtgtgctgcatctggggaagagctacgtacccatcagcctaaagcatctggggaagctgttgcatctcaagttcctagagatagtatacacgcctattgatgagctccctaaggaaattgggcatctgaggtctcttcagacactgatattagaccgtactggactagacgagctgccaccggttgtttgctcgcttacacggttgatgtgcctgatagcccaggggttcgaaaggttgccagctgacaggatggggaacctaacgtccctggaggagctacgactacgtagggtagttggccggagtgccacccaagccctagtggcagagcttggcaagctgacgaggttgagggtggtcgacatcaccttttcagagcagctagaggagagcttgcaagaagcattggtgcaatctctgtccaatctgcggggactccaggaactaacgcttttgtttaaaatgacacggtggggaagcgatatgtggggagactgggagccaccaaggcagctccggcgcctgattattgaaggcatcatcgtcttctcacgacagcctcgatggatcaaccgctcctgtctgccacgcctctgctacttatctctgatggtgcacactcttgaagcacaggacctagataatctagcgaggttgccagagctccagtacctcacgctagatggtctcagctggcctccaaggtatactgttggcccagacgacttcaggaatctgaggttctgcaaagtgggcacaacgttcgagtttcgtaagggcgccatgccaaggctcgaagtgctgcaatttagagtttttgcagggtactattgttgggcatacaatggtgtgccgttcgagcagttcccaacgaaggatcttgacttggacctggataacgtccttttacttcagcaagtaatagtcaaagtcaactgcgtaggtgctactgtcacacaagtggaggaggtggaggccgtggtcatgcgtgccgtggaaaatcatgccaaccgtccaaccataaaaatgaatcgagcatatgaaatagctatcctatccgacgaagggcgggaggctctgcttcggcgacacattgaaaaggattgctgcgtgcgcacgatgaaggataaatctgatgctttcttcatcagccagctgcggaggtatcgacatcttcagaaagccattattttcatcgactgttcgggtgccagcatgtgtgaggtgcagaaagtggaagcagcttttagacatgcagccgaggttcatcctaaccatccaagtattgaacttatcagaacaaacaccgacggaatggcctcctcctcatctgaccatcccaacacagagcccaggaattgatggctcggtttgtcagatccttccaacccaggagcaggtaaatgtgagttgcttaagtaccaaagagagaggtcctgttcagcaagatgattagaagcattggcaattggcatggcttgttaattagattcgtggttcttagtctaaaatcacattgaagagggagacggacccaagtgatgcagttcatgtgttatctgtatcagtctctgtttttataagctgtcatatattttctcgaaactatcttgtgttgattttgtgtgaagtgtacttttaatggcacgggccattgtgtatttgcttgaaagataaggatggtattatctttgtatttgaactctaaatgcttaaatgaagtgatcattctggatggagata

SEQ ID NO: 31516 - DNA, 1475 bp, Zea Mays
cgaatccgatccgtcaaccgacgggaggagtacgccgtttgcgccatcgttacgtccaccagaaggaaaacccaagccaacgacgacggcacggccaagaaacggggagtgccttccaaggcgaccgccccctctcgcgctccatacgtccatccgtcggcccagagccacaagataacgcagccaagaacaagagacaccgccgagcgagcgaggcggggagaagcaggtccaggaccaggagaaaggaaaaggaagcccagctctctctagcctggagccgagaagccgagggggcgaaggagcagcaaggcatggaggagcccgttccggctgatccccccaggattttctggaagtcaaggagttcagccaatggccggagcctgcaacaagagcctgacaaagacgctaccgaggaaactaacgagcaggctcaagaggaacccatgaagaccgacgacgcaacggacacagcagcagcagcagcagctacagctgagccgtacccgaaagctaacctatccgagaagcggaaggctctcttcgagcctctcgagccgatcaacggcaagcgcggcgctgctgagacgctgctcccaccgccggactttgagcccgcgtcgtaccccaaggggtggctggtgggcaagaaacgcaagctcgtcaacgtagacgtcgtggagagcatgcggaggattgcgatccaggaaatgaacagaaaggttcatgcataatcacatctttctagtggtcatgcaatgctgtttcttcactcgatcgtaaatgcatcgatgtgttcagttcaggttgacacatttgaaaaaaatatatcctcaaatgttgttggcttctgtttttaatctgtgataaagagaccgtgagatcaatgggctgaacgagcagctagaggaagactcccgcgtgctggagcttctgcagaagcagctggctgacgagcgcaggaagcggacagagatcgagaaggagaactccatgctccatgagcaggtcaccatgctgatgaacatgctcgacgagaacgagggtttcgacgaggacggagaggccccgccgcccgattccttcgattaagcgttgttacagtactatatccgttttctttttcccgtcagtgtgaaatcatacgtctctaggtgctggtttcagagtatccgagagatatgggctagctgtgtagtaggatttcattggtggtcgtattccattacatggctttggcttctgtagataaagggtgcattgcatgtctgttgtactgtactgtacctactccttttctaggcttcaaaagtgtatgtgagaaactagcaacatgttatgtttgaatcgaagtgtatgtacatgttacttaaaattcttccttgctatgccaaaattgcaggaaatgtaaacaagatgtgatttcccaatgttgcatgcgtgtggtgtttctcgatcggcgcggatgaggc

SEQ ID NO: 31517 - DNA, 1184 bp, Zea Mays
gcatagtctcagcactataatcaggattcaggagtatagaagaagccatcacctctcacagataatatgacaattgatccttttacatgcactctaagcaatcaagctttcttggtagcactaatttttaactctcgtagcaacgcacgggcacataatgtgagcaggaattgtggaattgtctctagatgtgctcggtgcgggaacattgccatttgacatggctgagaaggaggaaacaaagggccgctgccctgcctgccacacacgttatgacaaggatatgatcgtcaagatggccgccacttgtgacaggacagtggcagataaaaatgcggagaagaagcaaaaggcccaaagggttaagccaaaggcagcaccaacagcaacaacaacatcaaccgtagaatctaagaagcatcttgctactatcagggttatccagagaaatctggtgtacataattgggctacctgcgcatttatgcaatgagagcgtacttgagcgtagggagtactttggtcattatgggaaagttttgaaggttttagtttcccgtccgactgggcctccctctcagcaggcatcagcaaacagcagtattagtgtggttaaggcttgccttggttattacttccccagacccgactcatgcgggagccgtcagcattgggtctgttcttttactgatttgttgcgggtctagacaaatatgagctcataatgtattatctttcaggagatatacgtggagcgtcagaattatatgtgcatctacaagaacagttacaacaattctccatcaggttgatgttcatacatctcagatataaatgtgggggagacggtgcctcatcaatgatgagtaggttgattctcatctagcggcaccattgctcactacaactggtttgcttgagcaacttaatgtcactctcaagaggaccctcctttcgaccgacaccctgaagcaccacacaagctttagaaaagtcggaattgtacttcgtatacataaattacatgatattatatgttcatgtaattctatgttgattctttagaaataatatatatgatattgtaatgtgtgttcgacatcaatttattttatttgagttcgccgtgcgtacgtttggggttgtttctccctcgcttcttcctggcggcgaaagatagagaag

SEQ ID NO: 31518 - DNA, 972 bp, Zea Mays
ttttatgattttttgaataagacaaatagttaaagttagggttaaaaaagtcaaacaaattatattttgaatcgaagggagtacaatataaactctattttttttcaagatccacttctagagcggttaggcaaaaccgcgcgccatttggccagagcccaccgcccagccagcgaggaatcctgatttggagcactggacgggacgcgttgccattagctgtcgcgtcagttacgttttgcttgccctgttctcgttcggccttgacaacccggaaatcctccagccctctagtccccaacgacgcaggaagcaggatcgagccgaatcctccggaactcgccgccggggccaaccgacctcacactattgatcgaggatgtcgtacgcctacctcttcaagtacatcatcatcggcgacacaggcgtggggaagtcatgcctgctgctgcagttcaccatcggcgttgaatttggcgcccgcatgatcaccatcgacaacaagcccatcaaactccagatttgggacacggctggccaagaatcattcagatctattactaggtcatactacagaggagctgctggagcccttttggtttatgatatcactaggagggagaccttcaatcatctcgcaagttggctagaagatgccaggcaacatgcaaatgctaacatgacagtgatgctgattggaaacaaatgtgacctttctcataggcgtgctgtcagctatgaggaaggcgaacagtttgccaaggagcatggtctggtttttatggaggcatctgctaaaactgcacaaaacgtcgaggaggcattcattaagaccgctggtacaatatacaagaaaatccaagatggcatatttgatgtatcaaatgagttcgggatggagggagtgcatgtcttccgtatgaattgtccaggggcagggttgtaccgtgctatccttttttgtatttgttc

SEQ ID NO: 31519 - DNA, 246 bp, Zea Mays
cacccctctctcttccactcttgcagccgccccaatccctctccttcttccccaagtgattgcagctccacccctcaaccctagccgccaccccacctcttcctctccaaggtggagcctccccgcttggtgtccgtcgtgtgggtgcgagtcttccatgggagtttggagggaggaagaaggaagaaaagaaggaggaaaggaggaacccaaggtgattttcgtgatcattttgttgtatttgtg

SEQ ID NO: 31520 - DNA, 3261 bp, Zea Mays
ccgcccgtgatgcgcgccgtctcctcccccgcgcgacccctcccgtgatggccgccgccgcctaccccgcgcgacaccagccgccacctaccccgcgcgacaacgcccgtgatgcccgccgccgcctaccccgcgcgacaccaccaatggtgcccttccttccccggcacccgcaacccgccagctccgcgcgagccgccggcgggatacccgcctcccccgcgcccccgccagctccgcgcgaggcgccagctccgcgcgtccgccgcagtgatgccgcgcgatgaaggccgcacgggagagacgctgggaaagccgctccttccggcgttgcagtgggggcgtccacagctgtgccatgcccccgccccgtccgagacgccgaccacgacccaggattctcgcttcccgtccacgtccgtgattttcccagcgaagctgaccacgcctccctgtacgcacctcccgacatcctcgccgacatgctcgcactcctgtccccgtctgagatcctcgcgtcggcgccttcggtggaagtccggaatcgcccggctctcctccaccgcgccgccagcctcactgagaagagttcatctgcctcctcctcaacgcttgaccccaccgccgctggatccaacaccctgccctcgtccttcttctccgacctactcaccagtgacgacgtgggcaccctggccagacgcacgccatggacagcaggtgggcaggaacaccttctacgtggatcctcttctcccgtgctcctcgacgcacgagagcgagctcggactggatcctctcctaccgctccatgcaggtgctcctccgcccgatcccaatgtaaaacctacagttttgttagatgttgctgccactgtttggagaagactcgcgctagaaagcggtactgggtgaaaactgcagagcgatctagagctcgcaagcctgccattgctctctgtagcaatagaaatcccccaacccacccacccacacaagttgcaattgccctcttacatctattttttggtggaacaactaaattgacattgaagaagttttttggagtgtgctcgttctgcaattagaagacttctggagagttctataattattctggtttgtagtccgtgaatttatagtggattgcttgagatactgggtaacaggaatgcatgtttatgattttcgttttgaccttgcattgcatctacaatgaccagaggatgcagtctatggatccagttaatgtgtatggaaatccaatggaaggtgacatgattacaacagggacacctcttgttgtcccaccacttattgacatgattagcaatgacccaatttttgcccattgctgaagatgggatgcaggaggcctctatcaagtaggtcaattacctcattaacagggacacctcttgttgccccaccacttattgatatgattagcaatgacccaattttttgctcattgctgaagcatgggatgcaggaggcctctatcaagtaggtcaatttcctcactagaatgtttggttagagtggaatgtaaaggtctggacactctatgaattcgatgatctcgagagcatcattgataggacactaaagcgcgattttgacaccgaggaagcactctggttgcttaagataggtcttgtgtgcatcccggatagccctaagatcaagccctccatgtcaatggttgccaagatgctgcaaggtgagtgtgctgtgagtgacaggatcatgaggcctggcctgatcacagacgtcatggacctgaaagtcaggatggtagagccgatttagttcagcttgacatcatgctcgagcactgccgcaccggaccttgttggggatttcctcgattaaaatataagctccttgatatggttctgtaacatagttctgcaatgctcctttatttagttctttactttttttgttaagatatgaggtgtagcgatacaatatgtctactaacagcgtttgtgttcttgatagttcatttaggattgaatgaagttactggtatgaccttgtcgagactgaagtaaggagggatagagctaaaaactctcttggcacaactataaagttcaagctatatgggcgtgtttggatggcagcctcccatgcaactgcctggcaggcaaatgatcctagccacaccacaggcataggaaatcgaacggtcggcattgtttcctgggccagctgataaaatccattgaagtgcaagaggccgataaacttaggcgtatagtgctggatgctccatccactggacatacacttaagcttctgtcagtttctgattggattgaaatgttccttactttgagcattaaggacacatgaggtgtagctattgggcctctaacttggttatcatggttttgggccgtgggtagagcaggcaatgcaagtgcagtctggcacaatcctggtggtttggcattgagttatgttttcttttacttgataaaacaatcttgttccatcacttagtcaatagctcaatatgtccaccagttctgatgatccatgtctgcgcagtgtttcttttcacagtttgcgcttgcgaacatccgaaccccgttttcatcttgaattcaacttatgatgtatatcggacagttccaccacattctggcgccgccttcgtctgatcctggaggcaattggagccgctgcaagtcggatcctggtggatgcagcgcaacacagatcgcaaccctccaaggactgagaagtggaatgttgacatctctgagacagtctgaaagcaaaccgaaggcaggggtgttcatcaactcctgcttcgcgcattgctagagtgagctacaggacacatggttcgcaccaaattctccatccatatataacaagaaaattgcagaggtggtaggtgattggtactttgaaagaggagctgacgtggagattgactgcgcctatccctgtgattcacagtcttgtcgcaaccttataccaattgataaggctgaccatcctagattaaacttcaaagaccggtaccctgagccatacagagattctcatccgactgcccccgttgctgtgcatggatgtcaggtgtcattactgtaatgtagtggtgaaataggtagattaaaacaatgaaatttatatgtggctaggatcataaatgaattgcaaaattttttctcagaacagtataacacatatttgtacataagttgttgtgttattatatgtttccgttgcaacgca

SEQ ID NO: 31521 - DNA, 1215 bp, Zea Mays
cggctgtgtcctgaccagctgcttccgaccacgccccggccatagcctccacgcctccaccacaccctggcccgatcctccgtggtccgcgctgatgcgcctccgcctaggcaactcgcccacgccccggcagccacgcggcgccgagctcctcctagcacgccgcgcctacgcgcaactcctagtttgatagaggttttgtttttcgaggaaggagagcctaagattgatggtgaacctggcgatttgaagttcaggatccgaacagcaccacacgaccgcttcaggcgagatggcaatgacctgcatgcaacagttacaataaccctgctgcaagctctggttggtttcgagaagaccattaaccatcttgataaccatctggtagaaattggcaccaagggcattaccaaacccaaggagatcaggaagttcaaaggtgaaggcatgccactataccaaagcaacaagaaaggtgacctgtatgtgacattcgaggtgttattcccaaaaaccctaaccgatgagcagaagggcaagcttaaggatgttctcgtgtagaccattgtttctcacatctatgctgctgataatttgaggcgagagcgcctcgaggaaatttttctcagtagcttgcataggaagaagctactgctgcgtttcatgtatgtgattttgcattgcaaatactagcagcctgcctggtcttctttttctttcccttttggttttgtcatgcgcccttaacagctcagtgtagttttagaaagcacaacaaaattgtaccagaatatttgtacttacggaattctgaatacatagattgtagaacagctcggttgcttgcatgttctatgcccaatggccgctgctaccggtgtagggatggcaacagggaattccccgccggggaatagctccccgtccccgcgacgaaaaaacttccccgcggggatccccacgaacgcttgcggggagcatttttttcccatccccgttccccgcggggataaatccccaacggggatccccatccccatttaaattacaattaatacatacatactttgctattaatgttaaatattgtcacttatacacattatcagatataagaaatcattatgcatacatcaaaatgaacacatttgtacaattagtggtctcttgataaggtaattatttatttttgtcgttaactagtacacaaaaaca

SEQ ID NO: 31522 - DNA, 1205 bp, Zea Mays
atcccagcagcaggtagcagcagcgcatgactttgtatctgcaactcgtttcgactagcctgcacgccgggagccctcgtctcgcccttctccacctccgaagatcctgcgagttcaacccgcgagtgagcatgtcgtcctactccccgccgccgccgccgccgcgggaccagtccatggacaccgaggcacccaacgcgcccatcaccagggagcggaggctcaaccccgatctgcaggagcagctccccaagccatatctcgcgagagctctcgaggcggtggacccgagccacccgcaggggaccaaggggcgcgacccccgcggcatgagcgtgcttcagcagcacgccgccttcttcgaccgcaatggcgacggcgtcatctacccctgggagacgtttcaaggactgcgagcgataggatgtggactcactgtatcattcgcgttctccatactgatcaacctcttcctcagttatcccactcagccggtaacgttctctcggcctcctgtactgtacgtgcatgcttctggacgttcagctctggaagagtcttgggttggccgctgccggtgaatggctcttactctacagcttggcgaaagacaaggatggcctcttgcagcgcgaaactgtccgtggtctatttgatgggagcctatttgagcgactggaagacgacaacaacaagaagaaatcgtcctgaatgctgagcagccttgtacagctcagggaagtgctgtcagtacaaaactaccagatataccattggtcgtgttcaaataacaaatgcttcggctttgttcatccgtcattaactatgagtgctgggatttgtttgtatgtgtgtcgtgctaccagtttcttctcctgtcgtctcacacaggtactgtattacgcatgtgttttctagtgtccgtgcggaagctgtattataagctgaaatatgtgcgtttgaaatttactagttaggcctagtttgggtactcttgattgaagtggtttggagggattgaagagtgtttaaatcctcaatagatcaaaaactctcccaatacatctcaatccacttcaatctgtctcattcctagagtatccaaaccaagccttaagggtgcgcgccctgcgcgcgtgtattgtatgcttaaaatatattgacagatgtgtgcgtttgaaatttactagccctttaggtttcac

SEQ ID NO: 31523 - DNA, 1937 bp, Zea Mays
cctgactccctcgtggctcgtcccattcccgcaccatctcgacaaaccacaccaactgtcatcggacggcccaaaactgtgccgcgtgttccgttcaacggctatttcagcccgcagaacgcacatcagaagggtaaagccacgaaccccccggtccgcgcctgcgccgccttccctctcctgccttctccgcttcaaatttgcgtagcgttgatttcacgcccggatctcacaacgctcaatccaaacgctagccgcaaccctaaccctagcaaccggtgagtaatggcgcgccctaggggcaagaagcgcacggcgccccgggcggccgccactgattctgtccagccggaggcggcggcgacggagacagcggcggcggagccggcaaatcgggggcggtggaagcgcgtcaaggcgccgcccaagcccaagcccgagacggattacttcgccgagaaaagaaatctggaggatctatggttatctgcttttcctgtcggtactgagtgggaaaacattgataagataaaggagttcaactggagctttgaaaatttagagaaagccttagaagaagggggcgagcttcatggtaaaacagtttatctgtttggaagcactgagccccaactattggatgttaatggcgaatcaaagatagtgcttattccaatcgtagttgctgtagactgccctttccctccatcagacaaaattggcataaactctgtccaaagggaaaatgaggaaatagtgccaatgaaggcgatgaagatggcatgggtgccttatgttccccttgaggaccggcttagcaggattgacagtttgaaaacaaaaatattcactctcggatgcacgcagcggaggtctgcactgaagcatctcaaaattgagagagtcaagaagtttgactactgcatgccttactatatgccgctgcaacctcttgaagacgagaatgacactgttatcagtttcttatatcctctagaacccccggtaagattccttatttatttcagtgaggagtattacctaatcggtgcaaactgaaatgtaaggttggggctgtttgaagttttcctctattttgtgagattatctgctcactgcctcactgtagttttcacttcaaaatttttattagtttctccttccaacattattgtatttgatgcttcctaattgatgcatgcattttgatttcatataggtgtagattgttgtcatgcatcactgtgtttactttctactgcttgttgcagatagtagatgagtttgactgggaaatggacgattacgaggattttgctgatcagaaagttcaagaaggtggcctgccagaggatgagaaagaaaaattcaaggagttcctgaaggagaaggttagagaaaggaagagagagcttaaacaggctaaagaagccaggaggaaagctattgatgatatggatcctaaggtgaaagaggcattcgagaacatcaaattttacaaattttatcctgtgaaaaccccagacacgcctgatgtaaacaatgtaaaggcgaggtacatcaacagatactacaggaatgcccattatctgatgtgatggctttccttatcgcacgtgcttggcgagcttgtcacttgagaggagttgatatgaaaacagttcggtgttgtactagagttggccccagtttttcaccccccctgggcatcttttgctctccggtgtatacaatcctgaggatagattattgtgtagcactaagaggggcaaagtagtttgagactaaacaaatcattaaggaacaatttgttcccttttcatcatctattttgtggttgttttaacatctacaacgcgcaagctgtacaacacgatgtgatgtgcagagaatggtgaggcaatcatagacactctggtgaagcgacatgatacaga

SEQ ID NO: 31524 - DNA, 2660 bp, Zea Mays
ggtgaacgcgacctgaccctgtttccttctctggtagtctggtctctcgcttttctgttccgcgcagcaacgacgcggttgcttctccccacggcggcatctcctgcgcggcggcgccgcccccgcgagagccgcgacggcgcactaggcgagttactggacacgggagcgatgggggacggcgccagcggccgcggcggtcgaagcggcgccgggcgccgggtgggggagtacgagctgctgcgaccgattgggtcgggagcctactcgcaggtgtggctgggacggcaccgggtgcggggcacggaggtggcggtgaaggagatcgccatggaacgtctcagcaaaaagctccgcgagagcctcctctccgaggtcgacatccttcgtcgcatccgacacgataacgtcatcgcactccacgactccgtcaaggatcatgggagtatatatctcatactggagtattgtcgaggtggtgacttacatgcataccttcaacgtcataaaagagtttctgaaaaggttgctaagcacttcatccgtcagttagcatctggtctgaaaatgcttcgcgataataacgtggttcaccgagacctaaaacctcagaacattcttcttgttgaaaataatgaaaatactctgttgaagattgccgactttggatttgcaaagatcttttagggcgattgcaagtagcgatctttctgaagtctctggcatttgtaaacgtagctaaacaaagatttttgcaaccctttgccctagccgaaacactttgtggttcaccactttacatggctccagaagtcatgcaaggtcagaagtatgatgcaaaggcagatctgtggagtgttggtgtcattctatatcaacttgttactggaataccaccttttaatggggacaatcagatacagttgcttaaaaatatactcaggacgcatgaaatacgattaccatctgattgtgaattgagccatgactgcatcgacttgtgcagaaagttgctgcggctcaattcagtggagcggcttacagttgaagaatttgtgcaccacccatttctttctgaacatgctccagagaggaccttgagccggacattatctgaaataagagatggctttccaataaataatatcagtccaacaaggccttcaagccaaagttcacaagaagattgtatgccttttcctttggatgatgagtcaagtggacaggatgagggtccaattcctgacagtatgtcttgggaaataatcatgcacctagtagccaacaccatggccatactgataaaatgaccaaggaaagcaagattcatgaagtgcaaggtccaaaaggtgtttatccagaagatcaggaatatgtatttgtgtctggaccacacccagagggatcatcgtcttcaacaaatgcttctcagcagcttaacttaccggcaaaatatgataatttatctgtttcaccaccgaagttaactttcttgagtgcaccaatgccgataaacggtttgccgattaatagacaacaatctgctgggactggtagcttcgacagccactattctcctgcatctgtcatttcacagggatctgcggatataagtgatgccatggatcagcccccatctgattatctgacgaggattagattgttagagcaatatgcatcagccatagcagggttggtcagggatgagatcaaaggtggcaggcacttggtggcgttctctattcagctaattgttcttgcaacctggaagcaagcaattcatttatgcaatacctttgtagcttcacttgcaagggagagtccctcacaggatatccatatgaaggggcttagtgctgatgcttcgcatttgcttgcgaactcaaagctagctgatgatgtctgcgtgcagatagagaaacagtttctctccgaagttgaatatgcggaagaactagccagcactgtgggacagatagctgatggtacagagatgccagatgcaatcgaaatgatatttcagtctgctttacttacaggaaggcgaggcggtgttgatgagatgtttgggaaagcagcggatgccatgactgggtatacgagggcggtatccatgctgcggtttctcctgatcgaggcaccatcacttgccctcaaccctcctttgactctgacaagatccgatcggcatcgacttcgcacatacattgaagctctcaacaccaggctctgtcagatgcagagccagaggcattgactgctgccatgtgtcctcaaatcttgttcaggttgagggacggtagacttgtgcaatattttttcatttgtaaatatatttgttggcccaagataggacatgtaagatgtcagaaatttggaactaggcagagcagcgaaaatctattataactcgaccagactactattatgatatggaattaggtggagtgtacgtgttaggttcattctgtgtgaattcaggcagaagcttgaaaacgaaatgaccaatcatggtcacttgtggaaatgtaaactacttcgtagattctttattagtactctatttcgttcttttttatttgttgtggtttagttaaaaaaatgaattagctttcgacaaatattcgagaaaggatagtatatgttatggtgtgttccaa

SEQ ID NO: 31525 - DNA, 5839 bp, Zea Mays
ccgcattctcgacaattaaaacctccgccccacccctcctcccctctaatccgcccgccattactttcgcagacgccgctcttcgctcgctcaccgccgcttccttccacgggccatttcgtctccgtcgcccatgctcacctccttcaactctgtgaacccgcgatccgacgtgtagtgccgccgtactgcgcggcgacggcccaccggcgaggagccgccgacctatgcccctcggccagtccggcattggctaacccccaaatgcctcccgccgctaactagccgcagcctgtacatacacagacagacagacatacacaccgtaccggaggttgaagcggagaatcgatcccgacgcttcgccgccgctgtctcgtcgccggagaggagttttagcctcaaaggcgtgattttttgccttgttattttctagcttttttctttcgtgatttttggaccgtgttctcgcgatcgcgccggagagatgggagttgtggacttctcggtgctgggcgctctgcagaaggtcagatccttcgtcgccggcgccacgccggctgaagccgcagacggccggctgcccgccacgccgaggtcgcgcagcggggggccctccccagagaactcgcccccgcccgcggcgacgagatccggaggcaggcgcgccatcgccctgcgccggcagatatcctcgccggagctgctccgctgccgcgctgtcaggcgagcagatgatgaggatgatgatgagcccggggttcagtttttcacccatgggaatgacttcttacatgacttctcagatacagaatctgttagtgttagtacccctaatgatatcaaccgctccctgaccccaagccccttggagagcccgacttggatggtgaagcagaacgacagctcaccaatatccaggaagaatggccgtttcagcccggattctcctggatatggtacaaaggcaagtttaggatctgatggttcgccgcaacagataaatggtagcgtcactgacagtggtgacggaagcaaaactcagtatcctgttgaatttggtgccaatatatggtgcccaccaccaccagaagatgagggcgatgatatcgaatcgaggttatttggattccaggacgaggatgatgaggctggggactcaagcgggcttcttgtttctggtagctttagtgctaacaaaatagctgctattgacgaggtcacaaacactgctcaggaagagtgtctgaagactgcggtgctcggccatttccgagctcttgtggctcaattactgaaggcagaaggcattgatatgggaaaggatgatgggtccaaaggttggcttgatattgtgtcatccttaacttggcaagctgcaagctatgtgaggccagataccaagaaaggaggcagcatggatcctactgattatgtgaaggtcaaatgtatagcatcaggggatccaagagatagtaattttgttcgaggagttgtttgctccaagaatgtaaaacacaagcgcatggtctctgagcataggaatgcaaaattgctcattttagggggcgcacttgagtaccacagggttcctaataaattggcatctattggcaggatacttgaacaggagaaggagcacatgaaaatgattgttggaaagattgagtcccggcgacctaatgttgtgctaggtatcaaggtgcacaggggcacaaattgcttcatcagctgacagtattgcttcagtacggctaggtcaatgtgaagcgttcaaggtgcaaaaagttacagaattcccatcagctaaacagacaaataggagatcaagcaagacactgatgttctttgaaggctgcccttggcgtttgggttgcacggttctactgagagggtcatgtcgggaggagctcaagaggattaagcgtgctgtacaacttgcagtctttgctgcttatcacctttctcttgaaacatcattctttgcagatgaaggtgcaacacttcctaaattgccctcgagacatgtggtagttgatccagatacaaggaattgtacaaatagcaattcagctgcattgaccaatgttggtatgcctcatggacgtaaatcagaacatgacaaactctcacagactgctatggtcaacattatgtttgaaaatacccctgtgtcacctagttcattgccatcgaatggagaaggccacatgtttgtgggtgcatgtcagcataaagaaactgaatattctgttgatcataagaactcttgtgaacattgtgtatcccgtgcaactggttcatgcaacgggtatgaaacatctttatgttcatcagataatgattcaatgacacagaatcaaaatttgcagaactctgcaaagcttacatcaaatgctcaccaatatgagtttccagcaaaggaatgtcaacaagtagaccactgggatagacaaccacatgatgatcaatcagtagatcagcgggacctgaataaattttctggtgaatactttcctggttctgacaatcatcagagcatattagtttcgttgtccagtacgtgtatcccaaaaggcttggtatgcgagcgctcccatcttttccgcatcaagttttatggtagctttgataagccacttggtagatacctccgggacgacttatttgatgaggcatatcgctgtcagtcatgcaaagagccatcagaatcacatattaggcgttatactcaccagcatggtagcttaacaattagtgttcggaggcttcaatctcgaaagttgcctggtgagcgtgacggaaggatatggatgtggcacaggtgcctcaagtgcaaacctaaggatggtgttccacctgccacacggaggataatcatgtcagatgctgcctggggtctgtcgcttgggaaattcctagagctaagtttctcaaaccatgcttctgccaaccgagttgcaagctgtggacattcactccagagggactgccttcgtttttatgggtatggaaacatggtggcattcttcagatattctcctgttgacattctctcagttaaccttcctccaccagtactggacttcaattgttgtagtacacaagagtggctaaaaagggtggcagttgagatatttggcaaaatggaatccttgcatgtggaggtgtctgaatttcttcactgtactgaaaagaacattgtaactgaggatgaacctgtgagggaatgtgttcaaaggcagattatcgagatgaaggattggcttaaaatgcaaagaaatgaatatgagatgttgcttttaccagtcatgagggaaagcaatcaccccatgcagacatcaattgatattctggagctcaaccgcttgcggcgtggtcttcttcttgatgcttacatttgggatcggaggctatgccatatagactcggttcttaatacacatggccatatttcaaaaaccaatccagataatcttgatattctcctatgcaccagactgaaggagtggaaagctgatttgctttgtggggatactgagattgaaaaatctttagggagtccaaagaaatctttgttatccagagagggccatttgaatgataatgagtacagtgttgctgatacaaatttagagatttgtttggagggtcatcctgtggatgatgcagatgatcttgacaaagtctacaacaaattcagtggagtaaagaagcggcctactgctgaacctactgatggcttggaacctgttgagaggttaccctcacttgcatccattttctctgatactattgatttggcatggactgggtcttgtgatttgcagcatgatcttccacaagctttcaccaaaattgatgaaaatgtatcctttaatttggacagtccgaagtacagcaatttagtaacccctgttagaattcactcgtttagttctacgctggggttgcggcagagagaacgaactggattagttccagcttctttgcatctatcatcattcaaatctgctgagtacttcggagctatgagaagcatcctgaaggacccaatgccaaatatgcgaaggtcctgttctcaaaggtctcctgggacgatagagaaattaaatgttgttcttgcacgtaaacccacatatatctcatctacttcaaatattatcaatgatggggcacggctactgttaccccagactggatatgaacatgatgtcgttgttgcagtatacgaggatgagcccaccagtattatatcatatgccatgacatcagaagaatatgtagaacaagtaacacacagactgaattccagtttgagtttttctcatcaaccaaatactaatgggattagcagccatggacttgaggcgtcctctccatctcaaggagaccatttgcattccaagggaactcattttaagttatccttcgatgatgactcaccgatttctccagataaaacaaagttctctgtgatttgctattttgcaaagcattttgctgcgctgagaaagaaatgctgtcccaaagatattgattacatacgttctctaagtcgctgcaagagatggaacgcgcagggtggaaaaagcaatgtttactttgcaaagacactggatgaaaggttcataatcaaacaagtcacgagaacagagctggagtcttttgtagagtttgctcctcagtacttcaagtatttaatggaatccttggcttctggtagcccaacctgcctggccaaaatagtagggttatatcaggttggcgtcaagagcttgaaaactgggaaggaagtgaggatggatctgatggtgatggaaaatgttttctttgaaaggaagatatctcgggtgtatgacctaaagggttcattgcgctcacgctacacggctggggacagcaaagtcctcttggatgcaaacctcatagaggcattgcatacgaagcctatatttttggggagcaaggcaaaacgaagattggaaagagctgtctggaatgatacttcattccttgcgttggcggatgtgatggactactctctccttgttggcatcgacgaggagaagaaagagctcgtcatcggcatcatcgactacttgcgccaatacacctgggacaagcagctggagacgtgggtgaaggcctcgggcattcttggtggccccaagaacgaatcccccaccgtcatatctccaatgcagtacaagaagaggttcaggaaagccatgtccaagtacttcctcaccgtcccggaccagtggtcctcttgacggcctggctagctaacaagaattgtccgccttaaccagaagcgtttgccgtgccatgccatgccatgccatagtacatgtccgtcattctttctgtgcctagaccctagagagagagagagagagagagagaggtagtcaaattcattttgtgtccgcctgtaccatctgtagcagccatagataggggatcatcctccgactggggatgctggatgccaagcatatggtcactgcagtgtccagccacagatagagaggcttggtccatgactcccatctccatgtacattacggccagcatataatatgtctgaggagaaaaaaaaaggaaatctgtcgacgaaatgcagagaattcttttgatgcctttgtggcatgtatgcagactgtgaaggctattgcaatgtgtcacccccccgtaatttcgttgggagtagttgcggttcacctgccgtgagagtgaaagctattgcatgtatcactgagctcttgacggttcttgtcaaatactcctagttaagtttcacgcaacaatcagacatcatcttcttcgagtaata

SEQ ID NO: 31526 - DNA, 1912 bp, Zea Mays
cccggctggggtcgttccagcgtgcgccgaggctgtacgcgctctgcgtcagcctgctggcctggaacaccgtcgtctactcgctcacgttcctgagtgctgcatctgccttgcgtagtacggggagaaggaggaggttcggcagctgccgtgcacacacgtgtttcatctcaagtgcatatacagttccagctaacaagggaaatcaaggaagaattgatctttatattagcaggcggatgcaatcactaatcaaaaccacgatgcaaggtaacctaaatggattttaaattttattttggattgttaaatctttatttctgactactattgttttatgtcgtggatgccctcgtgaggttctacgccgacgccttcaggagggattcacagaggccatggtgaggatggccagcttgagtcggctcaccgggagcagcgcgagatccgctacaactaaatgataggaggtattttctagaaattacaaccccacctctgtcaggccttctgttgagtgaatttggtttgcacaccctcaccctgcacgctcttaccggactaccgctcctagcacccactcacacgagattgcaccccgctcgccatgccaccatagatccagctagggcgacatcattgtgggcaatcctgtgcgagagaatgtgaaattgttgtaggattgataatgaccaggggtttctccgcccacatgcaccaggtttcgctgccatttgcagcgactgtgttccagttcgaccgtttggggaaaaggtgagtcctcccatttcatgtagatgcatgggttgataaacatttgggagaaatgtcccctctttaattcgaaaaatagttgtgtatttgttcgacttatctgcggcgatgtacctttgtacgcgtacaaacatctatagacaaaaacaaaatgacacttcatggatgtagcaagagcgggctacgagaaactagcagatcatgcctaaaattcaattagcattagggtcagacaaaatactacattttctggattacaataatgtataggtgcatgaaaaaaacttgattccaatgtgtgacaaagtgtgaagatgaaagtgcactttcacgctgtcataacgcggatttgttttccttgctcatggaatgtgcatttgtgtgtttgcgtctactgtgcggctacaggcaaggaaacaggatctgtcacggaaggcgattcccatttctcagtgatgtcgatgtcctgtactcctgtatatttggattcaacaatatgccattagtgcattggtgccacaacactggatgagtataggaagcatatagagaaagatcctgccttggaaagaaggtttcaaccagttaaggttccagagcctactatggatgaaacaatacagatcttaagaggacttcgtgagagatatgaacttcatcacaaactgagatacacagatgatgctttaattgctgctgcacagctgtcttatcagtatatcagcgatcgttttctgcctgacaaagccattgacttgattgatgaagctggatctcgtgttaggctgaggcatgcgcagctccctgatgaagccaaagagctggacaaagagctgcggcagataagcaagcagaaaaatgaggctgtacgtggccaagattttgagaaggtatactgttgtttggcacagcggtgacaaagccgatccgctcccacctctctagcaacgtcgatatggttaataccaagcattatgttgtttccttttgagataaatattttgttactgattttaccttttgtctcctcttcttgttttttgttctagaatctgtagcaaatggctaacgatgaggatatccattactttgtttatgacaataaaactgatatgttcaagattccgtagcaacgcac

SEQ ID NO: 31527 - DNA, 2983 bp, Zea Mays
gtctccacttgtgtgtcgttcattctcaaatcaaacctttcgttgttgggaaaattacgtttatgttcgaacgaaattcgaacaagacagggcatttctgtccaagcaccgaccgtcagagaggagagagggggaggcagcgatttattacccgatatatctcgcgttttctcgtcagttaacagatctgatccgacccctgaggccagggagaaaggtcacgtccaaccgccgcgaactgcgcatgtgaactgtgcccgacgaggcgcgctgcggcacgggtgaggggagctgcgccggagcaccagccctagggttttcaccgccctgccgcgagatggacgtccgggacctgcaccagcagccgcagcagcagcaggctccgccgcgcgtgggatccccgccgcaggccggcgccggcggtgtcatgatgcagcatgccgccgcgttcggcgcggcgccgccgccgtccgggttgccgcaggcctcggcggccaacgttatgcacgggatgtcccttgcctttaaccctatggcttcgccggacgcctcgtcacccataagcagcatgaagattgtggacatgccgctggggtctatgtaccgccctgattccggcgcgacgggcttgcagcagcagcagcccggctccggtggcgttggtgccagcggtggtgctatcgtcgccgtcagcggcggggaccttgtgaagaagaagagggggaggccgaggaagtacggcccagatgggagcatcggcttgggactcaagaccgccgcggcgggggtcactgaagcgacgggtgcccagtccggtggaggcgggtctacccctaaccccgacggcaagcgtagagggcgtcctcctgggtcaggcaaaaagaaacagctggatgctttgggatcttcggggacgtcgtttactccccacataataactgtgaagcccaatgaggatgttgcgtccaaaataatggctttttcccaacaaggcccgcgcactacatgcataatttcggcaaatggtgctctgtgcacggcaacactgcggcaaccagcaacctctggtgggatagtgacatatgaggtacattcaggttcaactgcccagagcgcagggtgatgcttttattttactgctgggtcatttttgaagcaacaacacatgtttaaaattgaagctgatttatttctgttttcttacattttttgctagacaaaactactattttttttttttctgttagcatgtttttcctgggatgccaatcgagtaaagcatgactgtgcaattgagtagggtcggagtcaggacctttttgtgctgtcacttgacagcattagattctacgaattcatggctatattactgttgagctaacagaaaacaatgataataatcatgtttcttacactggtgacatcaataattatcaactctggatccgccctgcagttgaccatggagaggccttgcaactatcagcaatctattttcagttgcattgtgccctagtaaaatttctatgaagttaattaccgtatagcattatccacttgcatattttcattatttttctcttggctatacatgtttacatttgtctgcattcttccttttttaaaataaaaatatgccctgctttttaggaaaacacatataaggtagcttgcctgctttctttgtcaacttggtttggcaaatatatggctgtatttgttatcagttttcatctcatctaggcaggataaaacagggaacttaggagcgcatattcgttgatgcctgagtgcaatgtgcaagagcacgtcacctactgaattttacatatttctattagttttctctttgggggttccatttgacttcaatcgttgtcgacttgatttctgatgaaaggaagaatgactatgttatattataagctttccttctcagctaggaagataatacaaaaaaaaaactgaaaagaaaggtttggatagcctcttactctgattcattgcaagtaactaaatgcgatgcaacagttcatttgtgaatcaacgatgacagactgcaaaacccatccacaatattgaaacttttattttcagaatgtcgtgataaatttattcattcacatgatatgaatccttttatggtgacttggtgcagggccacttcgatatactctctctttcgggctcattcttgcttgcagaggatggtgacactcgcagcagaacaggtggtttgagcgtggcactggctggaagtgatggacgcatagttggaggttgtgttgctggaatgctgatggcagcgacacctgtgcaggttgtagttggcagtttcattgctgaagctaaaaagccaaaagaagagcaacccaaacgtgagccaacatcggtgccaccgcacacagctgtctttggggcggcctcgactgccagccccccatcggatggcacatcaagtgagcactccgatgatcccgggagccccatgggaccaaacggcagtgcattcaccagcgcggggcttcccctgcactccacatatgctgcagttggttggtcactatcagaggaccaaagccgttatgatccagatctaaagatgatgaccgactgatgggtgccgtttcgcagcttccttgttagcagttgacttagctgagtaggctcaataactaaggaatcctgagagtggtaaaaccttcaggaaggagtagatcacgagtaataattagtaccagtgcatgcctttgtcttgttatatcgtagttagcagtttgtatttgtatggtttcactgtcagaaagtctatgcagcattccttctggtttccatctgtatccacgtagtgcaacaattctcatccatggattggtattgctcaccccacatcatcgtatgcttgtattgcaattctcctcttgggttcacaaaaaagccaatttgcctttgtattagatagactacattaaaccgggtgcaa

SEQ ID NO: 31528 - DNA, 1527 bp, Zea Mays
cggctgcgtcacatgacaagacacaacatatcgaagtcgctcgccgtcgtcctccgcgcccgcatgcagcccaatcccatctcctccccgcctccgccgacccctccgccgccgcccacggaccccgaccccgccgccccgcttgtggcttccgtcagccactggctccacgtatctgcctccgccgcctccccgccccccgcggcgctcgacagcttctccgatgggtaccgctccctcgaccttgtcgggcgccgcgaggtcctccgttccctcgccgtcgactacgatgtgccccgcgcgcgtgtccgggatctcatgaaacagtacatgagcgtcacctccgccgaaccatcaggcgtggatgacgtggaggcggaggaggggaaggagggcgccgcgtcggccctgtaccggatggagagggggctccgggatgcactccggccccggtacgccggattccttgaggccatgaacgcgcagccaggtgggctcaagctcctcgccgtgctccgtgccgatctcctcgccttgctgggagaggagaacgtttcagcgctgcgggctctggactcgtacttgaaggagaaactggtgacttggcttagtcctgctgcattgacgctccaccagataacctgggatgatcctgcctcgttgctagagaagattgtggcatatgaagccgtacatccaatcaggaatctgatagacttgaagagaagattgggcattggtcgccgatgctttgggtacttccatccagcaataccaggaggtcttgtgggatgaccccccaactcctgaatctgaagctagttgtgcactattttactcaatatcgtcaacccagccgggtttatcaggtattaatctagggaagtttcttctcaagcgtgtgattgacatgttgagaagagatatgccatcagtacagaattttgcaacacttagcccaatccctggtttgatgcaatggcttcttgctaagctggcctcccaaataaaattatcagaggcagaatcacgggaggggaattcactaggagcctgttctactttcaaagaatccatccttcttcctgatgaagagagaatgattcatgatgccatcgaacaagctgatggaaaacaagggattgaactattgcaagatatactgaaatcaagacagtgggtaaagtctgacaaattatctgctgcattaaaatcacctcttatgcgtttatgtgcaaggtatcttgccagagagaagaagcgaggaaaagctctagacgctgttgcaaattttcacttgcaaaatggagcaatgattgagagaattaattggatggctgaccaatcagagaagggcattcaacaaagtggaggtatcatggtcaattatctttacagattagagaacatagaagagtatgcattgtcatattcgagtacagggctcatccattcttcacctagcctgtctgagtatcttgagccgaaggatttatgagacaaaatatttctggaacggacttttgc

SEQ ID NO: 31529 - DNA, 195 bp, Zea Mays
cacaggtcaagaacatgtaccataggatgagggttatggaggatgatgcgatgtgttcgtgagaggtctaggtcgtcgtctcctagtcaactttgggttgcaggatcgttgtctcctttcgatgtaattaattatttattttttatagaactcctattatataataaagatttgacatttatttctgtaccatga

SEQ ID NO: 31530 - DNA, 1774 bp, Zea Mays
cacattttaaaaaatggctcatcgtggactacacatcgcatggttgcagttttcaacagactacactacatgttctttgaaaagtttacggcatggaaagacaccgatgccagtggctccaggccatgtcacgccgctgatggagctctcccacctcctggtcgaccaaggcttcgaggtcaccttcgtcaacaccgacgtggaccgcgcggccgtggtagccgcgctggaggcctccggcggcgtggcggcgctgggcggcggcatccacctggcgtccatcccggacgggctggccgacgacgaggaccgcaaggacatcagcaagctcgtcgacgcctacacgcgccacatgccgggctacctggagcgcctcctcgccgacatggaggccgccgggcggcccagggccaagtggctcgttgccgacaccaacatgggctggtcgttcgaggtcgccaagaagctcggcatccgggtcgtgtccttctggccggcggccaccgcgtgcttagccttcatgctcaagatccccaagctcatacaggacgggctcctcgacgataaggggctgccagtccgtcaggagacgttccagctcgccccggggatgccgccgctgcactcgtcgcagctgtcgtggaacaacgccggcgagcccgaggggcagcacatcatcttcgagctggtgacccggaacaacaagctgaacgatgagctggcggagatggtggtgagcaactccttctacgaggccgaggccggcgcgttcaagcttttcccgggcatcctgcccatcggcccgctgtccgccgacggggcgttccggaagcccgtgggccactacctgccggaggacgagcggtgcgtcaagtggctggacgcgcatccggacgcgtcgtccgtcgtgtacgtggccttcggcagcataaccatcttcagcgcgcgccagttcgaggagctggccgagggcctggagctcaccggccgcccgttcctgtgggtggtgcggccggacttcacccccggcctcagcaaggcgtggctccacgagttccagcggcgcgtcgccggcaggggcatgatcgtcagctggtgttcccagcaacaggtcctggcgcaccgtgcggtggcgtgcttcgtgtcgcactgcgggtggaactcgaccatggagggtctgaggaacggcgtgccgttcctgtgctggccctacttctgcgaccagtacctgaaccggagctacatcgtcaacgtgtggaggaccgggctggcggtgacgcccgacgcggacggaatcgtaggcagggaggagctgaggagcaaggtggagcaggtcgtcggcgacgccgacatcaaggacagggcgcgggtgctcaaggacgaagcccaccggtgcgtcgccgaaggagggtcctcgaacgacaacttcaaaaagctcgtgaatctgctcagtgaatgatgagaaccgggagactgggagcatcgtgtccagtgtcctggcgttgtaaatgttggtgcacttagggcttgtttggtttgatggctaacttgtcatattttacctaacttttgtgtctaaagttagttcttcaattcgaacgactaaccttaggtaaagtgtgacacatttagctacgaaccaaatagccccttaatctccttgattgtaaacagtggtggagcacctcttacggttaggggtgctaattgatcgcaatctaaattcttcttgacaaaatggtaaattttaaataaattttattttaaaaaataa

SEQ ID NO: 31531 - DNA, 3177 bp, Zea Mays
ggtggccagtagcgtgcaacagcagcgcagagcgcagcgccgtgccactccgcaacgacgcagcagtagcagcgccccacaccctggtgcggcggtgccccacggcaaaaggaaacagcccgtccaatccatcccctcaccccattgcctctccctctccctcacccgcacctcaccactcctcggcctcacttcttcacaagttcacatcagcagcagctcacgaaacaggagcgtcataaagacatggtcgtcgcaggatagcctcagacccagcgacgcagcggcagcgacccaggaagcaacagcgaccggcatcgatcgcggcagccgaggcggggggacgggaggagggagggagcggtcgccgcaggagcagagcggcacggcatggggtcctgagtgactgactgactgacgactgagtgtctgactgagaaggagatggctggagcgcgacggccccggagccattaatggggcgctcatcctcctcgtcctcccactcctcgcctcccccccgccaggtcgcggtcggctccgctttttaaccggcttgtcctggagcggggcgaacggcgaacctcacgggcgccggaacacgaaccggaaccctagtggtggtggtggtggcgcgccccatgggcatcgacctcaacatggcggacggcgagagccaggagcgccgcccgccgccggcggtgtgccgggagctgtggcacgcgtgcgcggggcccgtggttgcgctaccgcggcggggcagcctggtcgtgtacctgccgcaaggccacctagccgcggccggcggcggcaacgtcgctgtggacctgccgccgcacgtggcgtgccgcgtcgcggatgtcgagttatgcgcggatgcggcgacggacgaggtgtacgcgcggctggcgctggtcgcggagggcgaggcatttgggagaaatctgcgtggtggtggagtcgatggggacgatgacatggaggattttgatgttgaaaggaagtcccggatgttgcacatgttctgcaaaacgcttacagcctctgacacaagcacacatggagggttctctgttcctcgtcgtgctgctgaggactgtttcccgcctctggattataatcagctcaggccttctcaagagctggttgccaaggatttgcatggagccaagtggaaatttcgtcatatatataggggtcagcctcgtaggcatctcttgactactggatggagttcatttgtcaataaaaagaaactggtttctggggatgcggtcttatttctccgaggtgatgatggtgaactaaggctgggcgtacggagggccattcagcttaaaaatgaggccctttttgacgatttcagttgcgacagtacaaaacggcatacattgttggctgtagctgattccttgaagcacaaaagtgtttttcacatttcttacaatccaagagctactgcttcagaatatattataccacaccataagttcctgaagagcctaaatcttccattctgtattggagcaaggatcaacttacagtgccataatgaagatgttagtgaaaggcgatctggaatggttgttcatgtcagtgaaatagatcccatgaaatggccaggctcgaagtggagaagcctgctggtaagatgggaggatggtgttgaatgtaacggccaagatagagtatctccatgggagattgagatagctggtggctctgtctctgttgctcattctgtgtccgcatctagctctaaaagaaccaagttgtgtcctcagggaaatttggacgttccaacaatgtatgttacagggaatgggaatggttgtactgactccgtggaaactggaaagtttcccagggtcttgcaaggtcaagatttgatgagttttaggactcgtcatgttccgtctgctcctcaaactgttgaggctgcaaaacttcaatcttctggtgctagcttcaatgaatctattggattctcagaggtcttgcaaggtcaagaaatttctcgggcagttcctatgttccaaggaatgatgtctgaggcttgttcactaaaaggaggatatgggctgcatagttatatgcgtaccccagttgctgttactggattgtcagccacaactcaagagtgttctctcacactatctactccgccaggagcacaagttccttctgtctaccctgataatatttttaaccgaactgtggttcgacagcttggactggcaagcaagtttgatggtggagctacaaatgcccagcagtctgtcccatttgataggccgagggaaatttggagcaagccacagcatgaaatatctgatcaaacgaaaatggatcactttgagactagaagagcttcagcacctggagatgatgctgctaagcatgggtctggtggagaggtggttcgcaaaactagctgcagactttttggtttctcgttgactgagaagatcttgccagcagatgatgatggcatcaaggaagtgacctatgagcctgagtgccagaatccacggatgctggacctgttcgggtacaactgctcagccccaagtgctgctcttccagctctgtgtgctgccccctttggaatgtgatgctacttcaataacgctgctgagtatttccatgtactcttagaagttttactttcctaatacccaagtgtatgtcataagctgccttttgacatcattccccctgttggtctgcctcaagcgaagcagtcatttgcacaagtaaacaaaggatcgttgatgatccacttctcgccatgcctcaccctatcgctaagatattgtaattagtcttaggatacgaagaggcagtacattgtaactgactaacttctgtggctgatccttcagaaaagttgtgcgatgaagcaaacaattttctttagaagttcttcgctggcagattttagattcatgtggggaggtttgtcagctcagctttaatgtactggttatgtatctttaaatcagctgctgtacgactttttttttagctccaagccctggttgcagtcgcctaggccgtgtgattgtatcagtatgtaagacatgctatattttaatattcttatcgatatttattctgatgcattgtgtgtgaatattctgttcttcatcgcatgcaatgcaagtcatgtcttct

SEQ ID NO: 31532 - DNA, 463 bp, Zea Mays
cttttttgtttggtttatggagttgaataggttcatctgccaccaccctatcccttgcaaactaataattagtacaaacatgagggatgtactcattggttggttcctcaaaatacattcgaagtgcacccaccccaatagctgtggcaatgcccatttctcctttgagactctctaagaaggcatttttagatgttcgaactgatataggtttgaaaagttttcctagctgaaaattacaattgacggcttattgacagttatcatgtgcgcatggggctgcaaaattacagatagcgtactgctggttttacagttacatgtctttagagtctcaacattcttacaaagaaagaaacatgtggattgtactaaagtataataactcaacctttacttgctcatgaaataatttttatttttcgaagttccaatttctgtacaagtaaactcaaagaatggg

SEQ ID NO: 31533 - DNA, 727 bp, Zea Mays
aaagccaccctgcaacggtccgatagaagcgggcaaaacaccgcttccgtagaaaagctgggctagttgggcatcagcgcagccctctcgcgcgtgctagggtttccccggtccatgtcgcctcgaactgctcctgtctcgcctcccaggcggagctaggattcttctcgacgacgacgatgagactccaagttcttctcgacgattcgtaaactgaactaccacaaacaccatattggtgtggcaactgtacctaaagcatatgacaacttacagtctccgaggaagaagagagactcttgcagaggaagggattgtaagagacataatcagggaccaagaaggtgtaattttaaaatgttgcaacataatggtagcaccaatagcaataccaattgttgtggcaatgaaaaaggcaaaggcgatgcaagtgtctcaaggaatgtcagcgaaggttgtttcatgtatggatcttagcagtactagtctcaccaatgtagcaatgagaaacatctcattgatatgtattagaagtggaagaaacgctaaaactcagaggctcactttgtccacatgcatgtaaatgtcaagactgaatagcccatccttgagccacctaaggctgttaaacaatgtagtcatgccaacatggatattgatgccactgctgatagcaatgccctattagacaatgatgatttcaacttagataatgatgatctcctag

SEQ ID NO: 31534 - DNA, 3131 bp, Zea Mays
gtatcaccccacctcgtctcgtcgcctaccctcccaacccgcattcgcggcgcgggcgccttggaaccctagtcacccgcgccccccctccactgtccactcaacccccgtcccctccctcggcggcggcggcatcggcgtcaaccaagatgtcgggcggcttcttccgggggacgtccgctgaccaggacacgcgcttctcgaataagcaagccaagctgctcaagacgcaaaagttcgcgcccgagcttgaccatctggtggatacgtcaaaggtaaagatggacgtgatgaagccctggattgctaagcgggtcactgagctccttgggttcgaggacgaagttctcatcaacttcatttatggcctcctcgaggagaaggaagccgatggaaagaagattcagatccagctgacagggttcatggagaagaacacagtgaagttcatgagggagctctggaccctccttctcagtgcacagcagaatgccagtggggtgcctcaacagtttctggatgaaaaagaggctgagatacagcagaaaaaggcagaggatgataggattgcacaggagattcaaaagaagcgagagatggaggaaaatgattcagaactggtaaagaacaaagtgatggatggggatgctggtaactcaagatcctatggcgatccagttggctctgctttaaatagtacaaatttcaataccgaggaagaaaagaacaatgatttcaagcgtagcttaagagcaaagaacaggggaagtcgcagatccaggagcatatctttgtcgccacgtgctaggcaaagatccatctctcctagaaataattctcgttctcctcctaggcgttcccactctattgatagacaccatagatcatcatggcgttcaacttcacctagacgttctatttctccccgaaggcattctccaagaagtaccccttcaatttctagaaggagatcaccttactcaaggagagggtcgccttccttgtcaagatatccatccccatttacacgccggagatctcctcttcgcagaaaatcaccatcatctgggccactaaggtcactttctcctcgccatcgccgctcaccagctcgtgtaccaaggaggtcaccatctcctgcaagtcgaaggtctcctgttcgacgcagattctcaccaggtagacgtacatctccatctccagtaaggcgcaggccaaggtctccatcacctgggaggcgtaggccaaggtctccatcacctgggaggcgtaggccaaggtccccatccccaagaaggcgtaggccaaggtccccatccccaggaaggcgcaggccacggtccccatccccaggaaggcgcaggctacggtccccatctccaggaaggcgcaggccacggtccccatccccaggaaggcgcaggccacggtccccatccccaggaaggcgcaggccacggtccccatccccaggaagacgcagaccacgatccccatcgcctggaaggcgcaggccatggtctcggtctccaataagacgtcagtccccatctccaaaacgccagaggacatcaccaagttcaccgaagactcgttctgcaaatcgacctttatcgccagagggaaggaggagtaccagtccgtacaatagcaggagtcctaatcgctctcgccagagtttaagtaaagatactgagaaagaaacaaatggcaccccttccgttaaggacagagttgtgcactcaagggggcaagaacaaaaatcagatgataataatagggatggtgcaaggattgttggcaataattccccagattctgagcatagattgtcaaagtccttgaggcctcctaactatgaagaaaggaattccacacgtgacagttcttacaagaactcagacaaacctatacctagtcagggcagcacagatacaagtggagatgaggaacacagtcgtgctagagaaaatgcccggaaagcaaattcatgtcgtaggaaaacaaaggatctctcggcaggtctgcaacctaagaaaatcagtgctggtgactcaagccccagagacaaatctccattcattttacaacagagtggcaaggtcgtccaaaagaaacaccccgatcaattgtcagaatcatcagaagatgagcttgctggtagaagaacaaagcatcaaactgattcacctgatgattctcgtcgaaaacagcattccccgactagaattgaaaatgatgagtcttattcaaagggtggtagaaacagtgagcatgtcatgagaggtttgcgtgatgattctgatgatgctattgatacaaagaaatatttgtctaaagtcaatgaggactcccaatcggacgatggaagtcctttgaaaaaaactaagaaaaaaacagatggtaataggcacattgattctggtagttcagggtctgaagagcctgacaaacatagaacccactcggagaagcgaaggcacaagaaaactcataagcataagaaacagtatgatgatagttccgagtctgattctgagccagatggcaaagacgcaaagaggaggaggaggaaggaagagaagaggctaagaaaagaggaaagacgtcgaagacgtgaagaacgacaccgcagaagggcagaacgccatgccagcaaacgaaaattaaagaacaccgatactgttacaatgccttcagactctgagaaggatcgggattctgattcagatggtgatgttaggaaaagagtttcaaacgctggaagagaagagtctgatcagaagaaactagaaattgaactccgtgagaaggcccttgaatctcttagagcaaagaaagccatcaacaactagactgagaatttttttgtgacacatttgagtttctattttcaagtggaagtgtccttatatgatactatttaatgttctgtgtgtttatgtggcagttgatctgatgattcctgagctgtttacttgatgcagctgaattcaggcttagcagccagttatctgctccatgtgcacaagctttttatgttcctcaggatgatatgatcaacgcctcaacaaaaacaagttggtaacatattgattggaaaatctgctaaagcattccttcttagtttc

SEQ ID NO: 31535 - DNA, 1384 bp, Zea Mays
ccttatctaacatagtatgtttgcgttagttgcttcaattagcactcatttggactgcggaggaactagtgtaaaaaatcctttgttttttgagaatccatgcagctatgactcgtttgatgctgctgttgcccttcatgcttctcgttatcaagcatcagagcagtcagcccatgctccccattcaaccatatggggagcagaagagacatgtgatgagttcatctttaatttgtcagcctccaggaagcaagaaggttcaaacactcttagcagctctcctgatactaacaatggagttcatccctcaaattctgaaggatttaaaggttttcttgaggacttggctggagaggctgatgctgataatcattataataatgatgatgccaaagacgaggagttttatgccaaatcaccacctcgaaatgatgaaactaatgagttgaaggatcaatctttagctgacatatattggcctgattcactcggaccactggacttggacataccgtctgtgagatacgaagccgatgacatacttataggggacagtcaaaatagttggaaccgtctaatggcaaatagcctcgacgcatttcgaaacctgtcattcttctcagataaaaatgactctattccatcgatcatgtagaactggggatgttagggcttccacgatttgttttggtaaggaaggaacctccaatctgccattcccggaagagggagctttatattgcccaagtgagctgtttgctgctgatacgggtatccaacagatgcggatttgatgcatatgagaggggctcgtgctgttgtaagataacataacggatgtgctaacctgtactccatgtaaatgtgttgcccttgtacataaagcacatacaagcacttgggtacaggtaaagcttcctggggccgagtataagataagtttgcctaatgaccatcaaatgattgtgcacttcattcttccggtttacatctaatatgtccacgtgggttatctcaaggcaatcagatcggagaattgtgacaatggaggacttctgttgagtagtttagttactttgacacgaaggatttctgtaagattcagtttttttttacgagagcctttagaacataggattgcaaagggaaggatccaatgtaatcctttcttagaatatagggttgcaaagggtccaatgctctttcctatgcctcacggaaagaaatcctacgtcgagagtaagcaccctcgcatgcaggaggcttatgtataccgagactttcgtgttctatcatgcacggtttttaggtgagatcaatcgatacatactctttacattctagattgtgcttcattttagatcttttagacatgtaactgttg

SEQ ID NO: 31536 - DNA, 2153 bp, Zea Mays
tcactcactcgcatccgaacgccggaacgcgaagctggctgacagacggccccatacgagtcggacccacacgaatccgctacccgggacggcgggacgcacttcggctccgttccattcgtcggttcctcctcctcggttcctccccttccgccccgcttgtacggttgatccaacctgaaccacccaaccggtaaacgcctcctcgccgcccccgcgtccaatgccaccgccaccgccgccgccggccgggagttcgcctgcaagtccattgccaaacggaagctgatcacggaggaggatgtcgaagacgtgcgccgcgagatacagatcatgcaccacctcgcgggtcatgccaacgtcgtctccatcgttggcgcatacgaggacgccgtcgccgtgcagctcgtcatggagctctgcgccggtggggaactcttcgacaggatcatcaagagggggcactattccgagaaggcggccgcgcagctggccagggtgatcgtcggcgtcgtcgagtcgtgccactcgctcggcgtcatgcacagggatcttaagccggagaatttcttgtttgtcaatcaaaaggaggactcgcccctgatgaccatcgattttggactgtccatcttcttcaagccaggcgagatgtttacagatgtcgttggaagcccatattatgttgcacctgaggttctgctaaaatactatggccgtgaggttgatgtctggagcgctggtgtcataatatatatcctgttgagtggagtccctcctttctgggatgaaagtgaacaaggaatatttgaacaagttttgagaggtgacctggacttttcgtcggagccctggcctagcatctcagagagtgcaaaggatttggtcaggaaaatgcttattcgtgacccaaagaagagattaactgcccatgaagccttatgtcacccttgggtttgtgttgatggtgttgctcctgacaagcctcttgattctgctgttctaagccggttgaaacaattttctgcaatgaataaactgaagaaaatggccctgagggttattgctgagagtttatctgaggaagaaattgcaggattaaaagaaatgttcaaaatgattgacactgacaacagtggccatatcacattggaggaactaaaaactggcttgcagagagttggcgctaatttgatggactcagaaatcaatgctctgatggaagcagcggatatcgacaatagtggcacaattgattatggggagttcattgctgcaactttgcatataaacaaagttgagaaggaggataagctctttgctgctttctcatactttgacaaagacggcagcggttacataactcaagatgagctccaaaaggcatgtgaggagtttggtataggggatacccgacttgaggatattatcggggacatcgatcaggacaatgatggacggatcgactacaatgagtttgttgcaatgatgcagaagggagataatcctctggggagaaagggataccaaagtaatggtaatttcggtcttggagatgcacttaagcttcggtaaaataggagcagatgtttcccgttatagcaaacgtagcattcagcaactaagaaatttggaccaaacaacagctccaaaagcttgtaccatgccagtacactggtcaccaagattcaatgacgccctatcaaaatccggggtcgctgaagcaatctaggaagtgtgaacttttgccggaacgcatcaacctcacagaatgaacaatagggtcctcatgctcaacatgtcatattctgatatccctcctttctagtttacatgtagtggcagtgaaaccagccgactgtgtatctgcgctgtaatttaagcaagcatgagagtaggtgagattgcttttatctgccccctttattcttccattgggaatcaatgacaggaagagagtgaaccatcctgcgtctgcattccaagactaatgtttcagttatgttcgtccatgttggataggtgtagttcttagtgcctgtaagaatataagattatattgttgtaggagtctgaccaatgaagcaattcttctgtgttgattttcctttgttaccaaaacatggtgaatgattacgggagccgctttgtgtcct

SEQ ID NO: 31537 - DNA, 2741 bp, Zea Mays
gggccggggcccgaatcaagtttagtcctcgggagccctcgcgtgcgctctcttttcctgtgtctgctgccgacgaaagggcggccgccgccagacctccatcttcgtgaccttcgtaggcggcgagcacccaccaggagaaggcatggcttcacgcatgacaccttccaagaggccttttcagagaagatcttcagactacgatggccggggcaagtggcagaagacgaagcacccttctccacataaatctcagttcaaaatcgagcctggtgttcccattttccgtattctctgcccggcttcaaaatctggtaatgtgattggcaaaggaggtgccattattgcaaagatacgtcaagaaaccaggatgagaatcagggttgatagggcagcccccggctgtgacgagagagtcatcttcataactgctgccaacaaggatgaagaagctggcagcgagcaaggcggagagaatgacggaggtgctgctgcttctactggtggtgaccatgagaaggataaagataacaacagcaaggagcaaaacgttgatccagaggagaacaactgcaacgagcagaatgatgattcagagaaaggaagtggtaaggaagaaatagatggtttcgagaaagaccatggtacggaagaaaagaatgattcagagaaagaacacaataagggagaaaaggatgatcccttggttgcgaaagttacaaagttagaaccagagagggtaataccgttggcactgaaggccgtttcacttgtattcgataggatttttgcaactgaaggtaataatgaaactgggaacgcatctgctgcaagcgctcctgtttcgttgcgaatgttggtgctatacagccaagcaggttggctcctggggaagggcggtagtgtggttaagcaaatggcagcagataacggctgtgaaatccgtgttttgaaagacaaccttccgtcatgtgctctgttgaatgacaaactttgccagatcactggagagattgactcagtaaggaaaggtctcaatgctgtatctgaagtgctcttagctcatccacccaaggaaactgatgcagttgctgatgttcattcttctggatcatcgtcacgttctttgttcagccagcctgatggtcttccctctggaatgcaatctaacttccatatacctttgcaaggcccgccatcccaagccaatggaccttttgatatagttgatcttcaacctccaatacatggtcatgcctcagtggctatagaatccctctcctttaggatgctgtgtccacaagacaaggttggcagtataataggcaagggtggaaatattgttaaaaccattcaaaatgatacaggctgtgaaattaaagttcttgacactgttccaaaaacagatgatcgcatcataagtatatctggacctgcgcatccgagtgatggaatctcccctgcacagaatgccattctgcatgtgcagcgtaaaattatgttacctagctctgataagaaggaaggtcctgcaacgtgtaggctgatcgtttctggaaaccaagttggttgtgttctcggcaagggtggtagtatcatagctgaaatgaggaagctgtcaggagcatttatagtagtgttgagcaaagacaagattccaaggggtgtcccagagcatgatgaagttatccagataaacggaagttgtgaagctattcaagaagctctaatgcaggttacagctaggcttcgtaaccatcttttccgggacagaatgcctgcagtggggcctaatatgcggccaccttttggtttgttagatccccagtttggtccattttcgggaaaccatgaatcatcatccctgtttcataaagatttcatgggacgaccattggatgggattgctgctccttggacagtgaagggcatgcgggatctcagcgatccagtgtcaatatccgatatccctggagcagggcatagagaagctggtggatttccaggtcctggtcagccatctatgatgccaaacttgactgcagaggtcttggttccaagattagttatccctgttctctgcggtgaggatggaggttgtttggacaggatccgtgagttttctgaagctaagataactgtcgctgagcctacagccgatgcgatggacactgctgttttgatatctggcacaccagagcagatgcatgcagcccgaagtctcgttgaagcattcgttatgagcgaatcttttggcccatgacatgtccagagtgaagctagcgatcatatgtgggttcatgtttgtgaatatgcgtcccagtctgtctgcagagtgacatatgctccaagtggctaattaggctgaatattcgactggagtcctctttctgtctgcagagtggcaaatgctccaggttgctagttatatataatcttccaaagtcgtcactttgactctgagatacggagcacattttgagtagccgcagaactatgttgcttatgcaaggaagtattgtttggacccggaaaggctctaactttatttttgttgtactgatgttgtgagatgtaccaccattgtctgtatttcagtccggctttatatctgtattttatggtattgctaccatagttaatatgacggtaaggcagcgaaaaggcgtaagccggggaatattaaatagtagaaatctttatctttatatatactaatataatgaagcagatgcaaactc

SEQ ID NO: 31538 - DNA, 1722 bp, Zea Mays
gcctttcgaaccgtgctcaatccaaaacgccaaacggcccacgtgcgccgcgtttcctccatctccatccggccatcccacctccgcttcctcctccgcgccggcctacgcgactgcttccctctctctctcgagtctcgactctcgactgcgccgctacagcctgacgcgatggcctcgtcggcgacgagagaggttctcatgcttgaggcgcctccgccgtccgaccccgctgcggggccctggcgcgcggtgccggacgcggaggccattgacgcgctgccctacatcgacggcgactacggcgatgcggcggtgaagcgggaggtcgatcgcctcgtcgaggaggagatgcgccgagggaagcgcaagcctgcagacttcctccgggacctgccccctgttcccaccgccggattcgagaatcatcctatgctttctaaagaatatgaacgtgttagggctggcaaacctccttttatgctagatatgtctcgctatggtttggagccacctccaatgaacaagaggaatgatgttggcgcttggaggcaggctctacggaatgctcagagccagttgcagcatcaaattataaggatagagaatctcgagcttatgctgaaatatggcgtagatgtttggaagctccagaacagacaaatggaatcagttctgtctagcttcggcgtcggaggctggagccggagttgcaccaaacagccaggagaggagaaacgcttctgcacctgtggaagaggaactggggctgttttacatgtatggatgcgaagctggtttccggggctcccgctccggcaacagagtgcctgcggaggaaccgcactaaatgtgcccttagtttggtttacggattgcactatcagttattgggaagcgacaaaaaatgatgtatctaaatcatattttgttgatcttatgtgtgatatgtcagtgatagtgcgagcttagatgtccactgaagcactctacatgttttataggtttaaaatattaccaatcagtgtcacacttatatggatttgagacatgatctgccatcttatatgcaggatgcaaaagatggctgtagaatacaatgaaaggatagaaaatgtcaatcgcgagaggaagttccaccagcaaaatactggaggacagctgcatgccctgaaaatggaatggcaggagctgtgtcaaaaaaatatagctattcaggctgcttgtgttgacctgcagaatcatattgatcagcttaaacttgaagcaaaagaactgggaatgcccatggacgacaactcaggaaccgacccacaagcatcatgaggatttgagatacagaggtggcaaggaagaagctacgcttcatttgagtctggcagctggacgtttcattagccattgtgattacctgtcctgcaattgtcatatgggacagtctgtttgatattgaaaacaatgtggactgtgcctagcaatcccatgacctgtgctcctgaaaacacctcgcagaggaagaatctaaattcgtgtattgttgtccgttgaagtgccctaacttgtggcaagagaaatgcagctgatgtatgcagactctccagttgacattgagttcttacatgaagcttttctgtttgattttctgcttgtttctgaaaataccttgtgctttgccctcttctgaacacgcttacaagtgtttgcagacagtgcatttcaaaa

SEQ ID NO: 31539 - DNA, 1135 bp, Zea Mays
aacagatatggtctctgctgggcataaaaagatagggaagtaaactcacgtttggaagaatcgtgagcaggaggagaagtgtcttttatcccccattgcataacacctgttttgcccttttgactagcatacatgggaatgaggacacttaagctttgtgatgaggtgaggtgagaaatgggagttgagagacagacttgagagggagagatgcaaagagcagaacaaaatgggcagcaatattggctatggaactgaagcacgagcacatggtaggttgccttgggttgaagccagagagtctgtgtggtgcacatgagtgtggcatgaccgtccagcaagcaatgcaaagcaacgcagagtgtcacctatttaagtccagtccccacccaaggtccattccagtgagtgttgttcccttccctttataaaccagagaacctgcagtgcagtgcaggcagagtactccgtctgatctcggtgatctgtctccacgacaaggagtgcactgtcagctctagcttgctgcagaacaagggcaagatggcaagaggtggtcggctactgatcctctccctggggcttgtgctcctctacttcgtctcaggtgagctgcggcgtgatccagaagggcgggccgtgctactacccggacaacctggtgtcgcgcgccgccgtcgccatgaacctctactatgccgccaatggcaggcacccctggaactgctacttcaacaactcggcgctcgtggtgcagtccgatcccagctatggatcctgcacctactactgatgtctgtctgatgctcttttgtagcagagatcggtcgatgaaaggaaatataatccctgtgtatgctgtgctgtgttgtgtctagagatgacaatagggacctgattcccccgtggggaatttcctattgctatccctagttgcgtcctagtagaagtgtctcttgttccatccagttgatatgcatgataacatttggagatgcatgcatgtgattttgtattcgaggatatggtgtgatcgcaaatgaacaaagtgatgcaaggcagcaatcattcataaatttgtcattctcagattaatcatgagcaaataaagccgagtaagtgtctctgagtgcca

SEQ ID NO: 31540 - DNA, 4757 bp, Zea Mays
tccataacagcttctgcattgccatcaaccatagaatgagaaagaccgtcttcctcatcaactacgcgccgacgcgcggacgctcccgtccccatcgcgacccgtgcgccgggtccacgctgaaccctttcaccggggcggcgaaagatatcagccgcgacgccgacgggctcgagcgccggtgagcgctcgcgcacccgggccaataaactggcaccggctcctcctctcgcgtcgcagagcctagcctcgggatgacgtggcgtaccacaacaccaccacacctcactcagccctgcgggtctccgaccaaccatttctagaagcctccaaaccctagcgcaggaggaagaggagttaggaggagctccagggatggcgaaggcgaggaagcagaagggtgacggtgccagtacgggaggaggcgccaccgtgctccaccagaagctctgcctctccatcgacatggagaaccagctgatctacgggtacactgagataaaagttctagctgaaaacaacagatttgctctacatgctgacaatatgacgattcagagcatttgatggatggtgcaactgttgagtttgactattcccctcattggaaaaatgaaagtgatcaaccgaattggtcttcagtatcatgtttgaagactgctgctgatgctgcatgttcaatgtatactttgtctctaaatcgagaagctacaccaaatcttattgtgtcatctgagagatcagtcaagtcaatgactgaacagcagttagatgaaaacagtgaaaagcatgaagaaaatagtggaaggcttgaagaacatggtggaaatcctgttcaaacttcctatgatcaaattgttaatggctgcagtggaagagggaatagaaaattctgcagtggaagaaggaaaggaaaaggaaaatgataaggaaaaagaagaggaaaatggaaatgagaagagcaaggaaactggaaatgagactgaatatgaaaaggtgaagaacataaaactggttcacatagattatattttggagaaggctgaaactggcgttcagttcgttggcaatgtcatgcgtagcagtagtcagacaaggcgggcacactgttggtttccttgtgttgatagtgccacagaacgctgtccatttgacctagaatttacagttagcatggatttcattgctgtcagcaatggtgacttgctttaccagttagtccacagtggatatccttggttgttggcccacttgaagttcttcctgacagaatcacagaaatgacataaatgtctcacacatatgtttattccctgctttggcaaagcttcagaacactattgcatttttccacaatgcatacaggtgctgatcaatcttttttttttctgtgaaaagtgcttagattggtgttgattttattagtatctcaataagcttattttttaattgatttctgaaatttgcatttcttttgcagctgttatgaagactatctttctgcaccatttcccttaggtttatacaatcacatttttcttccatctgaaatgacaatattaccagcaagcttaggagcctccacatgcatcctcagttctgatatcttgcatgatgagaaagttatatagatcaggtgcgtttgtttctcttattttactaccctgtcccctctgatctagaccaatgatttgacaccatactttttaatgagatccgaatgcgtggctgctatagcatgtgcttatcaattgtgcttattctttattaaactatttttcatatcagctgttgttttgaagccctcctttcactgagagcatttagtgtcagtaagcaatccatgaatgcataatttctgctccagtatttgtgttttaactaagttagattctggtttagatgcctatatgacactacattcttgttaagttgatcatttaattagtttggtacctccagcaaatactgtaaatatgtttatggaatatgttaaatacttctgtatgtttgcttgccttatattttgtattttttctgtatagggctttgtaaacctgtcatcctttggataggagtgcatgaaaatctgcaatccatgtgtctgaatcatgacctgctattacttttactttatcttcctaagcattaaccttgcttctttgtatccccttaactggtggcttgataacactttgtattatgcattaaccttgcttctttgtatccccttaattagtggctcttggtaatgctttgtacacctgcattacattatagtcaagtattatgtttcataccttgcagtctgcactaacttgtaaaatagttcagataattggcacaagaacgaaactggcttatgcccttgcaaagcaatggtttggaatatacacaagtgcagaggagtccagtgacggctaactgctcagtatgtgaatctgatgttagtggtgcaactgctttgagctctactgctgcttcaagtgatttatatggaactcaagcaatcggttcatatgggaaagttcgttcattgaaagctgtagctgttttcaaatgttggagaagcagatgggaccagactcatttcggaagattttgcaggtgatagtggctccaagtcgtgcataaaatctaggcatgagcttcctagcctctcttctcaagcaaattgatcggttcttgcaatttgacaactttatgcctggttataatggggtcttgactgtcagctgcattcgtacccttgtacgaatagcaaagaaggtgccatcttttgtatgccttgatcacatttttgaattggttgcccctttccgcaacatggacaaaccatggaaagttcgaattgaagctagcaggattcttattgatcttgagttacaccataaaggactcgatgcagctcttttgttgttcttgaaatatgtggacgaagaaaagtctttgcgaggttggattgctagagtactttttgatggttttgtatgctttgctatcttttgacatggaagctgttgaaggagcgacaaagttggctgttcatgtcttgcgtatatgtcaaacaagtattgttcctcacgccaatgatcaaataaattttggcaactctagttaggggtggtaacgggccatttaatttagcctagcaaatttacggatcgaatcaagttagggccggatcataaaacaatacaattttgaactaacaaaattaagggctttgttggtttgtgaagcaagtattagggtcatgatccattaccacccctaactctagttggtcttcttcatctgcttgctggcacaaaggcatacaataacatatttcttcgtcatcaagtgttctgcatattgcaagttgctgctggaaggtccccaacgttatttggtgttccaaaggtcctcacaccccctctggtggtcaactacatcttcagtgatcaacacactaaagatgattcctcaattcctcaaccatcatagtctcaggaaccttccactagcactcctagtgtccgggaggtcttaccgacctctggacccactcaagatgctgataattatcttactgcagtgaaagaaggaatgtggtcaaaattagggtgaagcttactgcatcttccagtaaagcatctgatgctgaccatagaggccattctgatggcgcaagaaatgaaaatgaaccgggtcaatgcagctcaatgtcaatggatgcccccatggctggagcagcaaatgaaccattaaatgtaagcaatcataacattgaggaacaaaactcatgtcacgaccttggatcaaggatgtcggcaagtgttagcaatgctaaactaatggacagacatgatatttccaaggagctacagtgcactgctgattccaggctggatactgttcccaaggatcagttctctcctgccattaatccgccggaagttttagacaaacctggcagtcagcttgaaggtgtctccaactatgatgtaaaccaagctccagagactgaacggagtggaaacagaagagagagaaaaaaacaagaaagataaaaagctgaaacgtgacgaaaaactagataaaaaaatatgacccagagtatctagagaaaagctccttaataagaaggaaaagaaagagttggccagaaagcagctagaaggtgaagagctacccctgaacagcggagagcagtgaacccttcaggttcacaggaagttttgccttcaaggccaccagctccagttctaagtgttgaaacacctgttcgaatctctgaaccccaggtatcaagcaaggaaacagctgtagatactgcacgtgcagcagccaaaccaaggataaagatcagagtcaagcccttggtaagaaaatctgaagggaattaaaaaagattgtagaattgtggccagtctgccatcatttgtaaggattactgtacagcaggaaaaatgcgggtttagttattttgtgaatggctgatgtatcctgtaaaaaaacattgctctgctctagtaatttctggggtaatcgaaatctgagttctagggtagtccatattttctgctgcagttgctttagtatctcagcgcttattatctcacaggttttaagtgtttgttcgatttgctgggcctaaaactaaaactgaaggatcgctgtgctcaatttgtagctgttgatgcattcatttcagatttgaggaggcttgacggaattaactgctgagcttgctcaaacatttttatgacgct

SEQ ID NO: 31541 - DNA, 396 bp, Zea Mays
cgcgacaacagtgatcgacgacacacattatgcctttcagcaagaaacaagtggctgcttggtcccagttcaccttggtcttgctccttgtctcgcgcgcggcggtggtgtcagtggcgttatgcgaggcagcagtagggaccttttctgctaataaactggattgccaaagctactgcacacagaaaggctacaagagcggccatcccacatgccagtgtagcaatgggctgcatggggtatcaccggggacgaccagccattgcttgagaggccgtcacccacgagacgatgctggcgaaggggtgggaatactgttagaattataggcattttccgtatcattttaattccataaattaatattatgatgatgacatataaaagataattaac

SEQ ID NO: 31542 - DNA, 3066 bp, Zea Mays
acagccctagctccaccgataaaaccccacctcctcccgtaacccgcgcctcccttcccttctcctctcttccccgaaagagaggtcgcggacggaacccttccaccctcacctcatcccacaaccttcgattccttcacgatcttacctcgcgcgctcgccgattcctcgatcgagtcccgcgcgattcgctttctggtcggattctctcccccgaagcatgcagccggaccagcctgtgatcagcttgcgccccggcggcggcggcggcccgcgcgccggccgcctcttctcccccgccttcgccacctccgtctctggagacttcctccgcccgcacggcgggggcgcctccggcatctccaagatcggagattcacattttgagccacgtgagcgtgttcgatacacaagagatcaacttctcgagctgcgtgagattgttgatgtgtctgaggaaattttaagaatcaagcaagagattgatgtagagcttcatggtgaagaccagagctgggttcgcaatgattcaactgttcaaggacaagcacaagctcaaacacaagcacagaatcgctatgctgagactgatagccgtgattggcgtgcacggtctgcacagctgactccgactaatgaagaaaaatcttgggacaacataagggaggctaaagaagcctatgcctctagcggtaggcagcaagagcaagctaacaggcaagatcagttaagctcccagtttgcttcgaaagctcaggttggccctacccctgctcttattaaggctgaagtgccctggtcagcccgaagaggcaatctctcggagaaagaaagagtcttgaaaacggtgaaaggggtcaactaatggaagctggaattactactgctgatatattgaaggatgttatatctctcatatttgagaaggcagtttttgagcccactttctgtccaatgtatgctcaactttgttctgatctcaatgaaaagcttccgacattcccttctgaagagccaggtggcaaagagatcacattcaagcgcgtgatattgaacaattgtcaggaagcctttgaaggtgctagcaacttaagagctgagatttctaaattaactggccctgaccaagggatggaaagaagagacaaagaacggttggtcaaacttagaacacttggaaatattcggctaattggtgagctactcaagcaaaaaatggttcctgagaagatagttcatcacattgttatggagctattggggtctgggactgataaaaaaccatgccctgaagaggaagatgttgaggctatctgtcatttcttcaatacgattggtaaacagcttgacgagaacacaaagtctcggcggatcaatgacacatacttcatccagatgaaggagctaacaatgaatccccagcttgcaccacgtttgaggtttatggttcgtgatgtgattgatctccggtcaaataactgggtgcctcgacgtgaggagattaaggccaagacaatcagtgaaattcactctgaggcagaaaagaatcttggattacgtcctggagcagcatctgtcattaggaatggccgtagctcaccaggagggccactttcacctggagggggatttccaatgaatcggccaggaactggaggcatgatgcctgggatgcctggttcaagaaagatgcctggaatgcctggtttggacaatgataactgggaagttccccgttctaaatcaatgccaagaggtgactcgattcgcaaccagggattgttgcttaataaaccatcaacagttcacaagacatcatctattaacacgaggcttcttcctcaaggcagtggtgcggcactaataggcaagagtgcacttttgggaaccggtgtctcagcatctcgtcctctcagctttacgcctgggcccacaccagctcaaactacaccaaaaccaatacgtgcagcaccagctgttgtccctgctcctgataaacaggccagtgctcccaaggggaacactgctgagcttcagaagaaaacaatagctcttcttgaggagtattttggcatacgtattttagatgaagcccatcaatgtatcgtggagctgcagagtcctgattactacccagaaattgttaaagaagctgtcaatcttgccctagataaaggcaccaattttgttgatcctcttgttaggctactggagcatttgtacacaaagaaaattttcaagactcaagacctggaatccggttgcttgttatatggtactctgctggatgacattggcattgaccttcctaaagctccagcacaatttggtgagatcattgctcgcctgactttgttgggtgccttgagatttgaagctctggaggttattttaaagaaaatggaggatacctacaaccgcaaagcagtttctaatgctttcatgaaaaccttggaagcaaacccatcaggtcaggctatcttaggctcacctgctgctgctgcagtaatagacgcttgcaacagccttttggaataatcttcctagcagctttggcctatcaaccttttcagattctgtatcttgcgaaagacggtctcgtgtactctctatagtttaggtgtcaaggaattgaggaacagacaattttgagctgtataattttgcgagatcagatgagtgttgattgttattgtttcggccaagaaggaaagaaagaagccatgaattttggtcttgggcgaccaacttaatttgcaggagtcctagatgaacaaggctaaatatgttgttactatgtccacctaaaatgttgttagttattttcctgtgactacacatttttgtaacgttgtactatgattttggaatgttttattgggtacaatatattgtgttatttaggagtcaaaactatctctaggtcctggtttaccctgttgctgccgtgatgttggctccctaattcctttgggcgacttagcgtatgttggctccaattcgtttgggctttgtatttccatgctgtttgactggatatttgatgggtctctttgtttgggtttg

SEQ ID NO: 31543 - DNA, 2124 bp, Zea Mays
gtagcctttctctatgacacgtgccccttcccccctcttaagctaagggacccttgggcagcccggcatcttctccaccctctgcccctctcgatttcttcttcccatctcccaatccatcgcaacccaaaccctactccaggcagatctccgtctccgccgccgctgccggcgtgagcacagcatcagatccgctgtgatggcgttccgccgcatcctatccaccgcggtgcgccgccgctcggccgtggccgccgcggcggccgggaacgcgcgcgaggcctccacggccgtcgctgcggcgccaggtgtgctcgcccccgatgcgaccgcggtgcgcgctcccgtgatgccgtatgaccgcatcgccgacgccgtcaacgccaggctccggcggctcgagcacccagacccgcgcttcctccgctacgccagccccgtgccgtcccacgcggaccacatggccatccttgcggcgccagagacccgggtcaccacactgcccaacggcctgcgcatcgccacggagtcttccctcgccgcgcgcacggctacggtcggcgtgtggatcgatgcgggcagcaggtacgagaacgaggaggcggtcggcgtcgcgcattttgtcgagcacatgctgttcaagggcacggggaagcgcagcgccgcgcagctggagctggagatcgaggacatgggtggccaccttaatgcgtacacgtcgcgggagcagacgacctactacgccaaggtgcttgacaaggacgtgccccgtgcgatggaggtcctctcggacatcctccagaactctaatctcgaccaggcccgcattgaacgtgagcgcgaagtgatcctacgagagatgggggaggttgagggacagtctgaggaagttatatttgatcatctccatgcaactgcattccaatatacatctcttggcagaccaatcttgggttctgcagagaatgtcaagtcaatcaccaaagaggaccttgagaactacattgcaactcattatacagctcctagaatggttatcacagctgcaggcaatgtgaaacatgaagacattgttgagcaggcaaagaagttgttcaataagctatcaactgaccctacaacaacaaacatgttggtcgctaagcaaccagcctctttcacgggttctgaggttcgaatcattgacgatgacatgccccttgctcaatttgctgttgctttcaatggagcatcatgggtagatcctgattctgttgcactgatggttatgcaatcaatgcttggttcatggaacaagagtgctggtggaggaaagcacatgggttcggagcttgtacagaaagcagcaatcaatgacattgctgagagtgtaatgtcattcaacatgaattacaaggacactggtctttttggtgtctatgctgttgctaaggctgattgcttggatgatttggcttttgcaattatgcatgagatgagcaaattgtcataccgggttacagaggaagatgttatccgtgcacgtaatcagctgaagtcctcaatccaactccaccttgatggttcaactgctgttgtcgaggacattggccgccagctgctgacctatggacgaagaattcctaccccagagctttttgcaagaatagatgctgttgatgcaagcactgtgaagcgtgttgcaaaccgcttcatctttgatcaggatgttgctattgctgcgatgggaccgatccaaggacttccagactacaactggttcagacgccggacctacatgctccgttactaagatcaatctgccggtgtaccatgtttacggtgtgcaaggacaaagataaaatttgcctctttcggcgtctgtatatcaaggcctcagcactgcacatcgcttgctgcgatagaggttattacaaagagcagataactgttgcgagaactaagcagtttgtactgctcccaacccttgtaaaccaagtgacgtgcacgttccccacttgcaactggccgacggacgtggtgtacatgcgggatccaatggcctcctcgccatgactcgactcttcacttgtatatatatatgatgggaatgcaataaagaaacagtgccctcgcgttcattta

SEQ ID NO: 31544 - DNA, 2392 bp, Zea Mays
gtcccgtcccgttctgcctccacacgccgccagaacgagaatccccctccccgtcccggcgtccccggctcccgagctccccctccagcctccccttccccggctcggccgcaccccgtccccggttcgttagagcgcgagcgcgcggcagccggccagccccaggcagccggcgccccgcggccaggttggctctcgctctcccctccggcacacctcgtccccggttgtccggctccggctccggatcagcagcgccccgagcacgagcgggaacgcgcgaacgccgggacgcggcagggtgcggcggggcggggcagctaggctctgaggcacggcagacggcttgcagtcaagatctctcaccagctgaattgccgattcacacatccagccatctcgacaacttgggtacacacgggacttcatcttaagagaatttagaacaaaaaagagagcatgtcagacctgcttcctgaagatgtacttgtcaacatcattggtcgtcttgcaccacgctaccttgccatatcccggtctcatacaattccaacttagaccctgcaatagaggaattggaatggccaccttcgccttgcatcgtacaagtgttgtcatcaaggacaaagttgtgggaggagaggttgtttgttcgagaaggagaggctgcaggtaatgtcgctgacattcggttggattttcaagctgttcaggagaatgctgtctattggcggggagtactttatgtaaattaccaatccaaatttattatgaggatatcattgtcaaatgataaataccaagtaatcaagccacctgtagattttgaatggtttgaatttgaaaatgaatccaggctatccaaaaacctttatttgggaaaatcagagaaaggggtgtactgtgctttgcgttatccgtcaaccgtttccttttcgatttacattctcgatgaatctgacggcaaaacggagtggataatgaagcctcactattatctcgggagtcaaggaattgacgggcctggaccctggactctacaagatatcaactataactgggacacccagtatgaagacagtatggaggaaaagttcgagtgggactccgacagcgataatgttgtcgagaacagaagcaacggtggatatccttgccttcctcgtatagaacttcttgggtttcacccctacaaggatgttgtcttcttgagcgacacgctgagacgaggattggcctatcacctagacagctcaaagatccaagacctgggtaacctccatccaacatattatggaactgaacaggggattcagccatttctactgacggctttcccatacacaccctggaggggatggtttccagaagacacataatggtacatacagagtaccgaacgtaagacataaagaaggcattagctgatctgaaaccgaagttctgaccgggcatggcgaaggtccctccttcacggtttcctgatgctgctgccgctctggatcgacagacttcagcttgagagtagtttagccagctgcttagcgccgtggacgtggggatggacacgtcgcattgcgcgcttagtggctggttttgtgcgttgtttggctaagtttttttttttttggttagaataaaagggagaagagaaaacactccagttgcgcagcaccaaaaccggttcaccactctcttgtcatttgttttgtttgttctcatcggggcgtgccaaaattttgctttctggcagctagcctagcggacccaatggtagattcatccttggggaggatggcagttagggaaaggttgtgctatgcgaccgtggagcgtggatgtggatgatgctggtaggcagaaaaaggtttcggagggcgattgggatcggttgcgagcgaccagattttgatgcgcaccccagcagcatctcagggcagcgtagtcggtctccgcccaaggcgatgcgatggtatttagggtcctaacgaattctgaacaagtatttgaatcataattcattaccacgtctagttctatccctccaactgaacaagacatatgctaagggaggtgcttggggccttcatctctgatagattcgagccttcaaccacagggtaaggtataaaatatcgatggatacattctcaaattggtgggatatcatgcttcaggaagggaagtagtagtagtagtcgagaagaagcggcctcaagacgacggtggtggaagagaattagatggaaatgtaccagcagttgacatagccattaaaattttcattttgcagcgcaatgtgatcccactgtcaccatggtctagcactctagctagtgcagggattagcagcgttgccatgccatcaccatcaatccatcatcatcatcat

SEQ ID NO: 31545 - DNA, 4730 bp, Zea Mays
taatctctctcaaatacccccacttttttcttcttctttattttagcttcaagtcttcaacattcctctgcagcagccagcagccaccagtgaggccgtgagggtgagtcgagtcgagtccaccaccaccaccaccaccaccaaatagccaaacacgcagtggtgctgctctctagtcctcccttcttccactccgctaaccccccgtcgcaagcacgcacgcgcgcgctcatcggattcggctacgcgccggcgagatccgggccgccgcagcacggtccggcagacgccgccgaaggcgcaagccgcgatcttgtcgccgcgggagctgcattggcgccccacgcggccgttccggcgtttcttgggaggttgcggcggcgggaggagttcgtgtccgggatccgccagatccgtgctcgccggcggcggcagcagtggtggtggccgccatggaggccgatgcgccgctcgacctcgcgctcttccagctatcccctcggcgtcagcggtgcgagctagtggtgtgcggcaatgggcggacggagaagatcgcgtcagggtcggtgaagccgttcgtggcgcacctgcgggctgcggaggaacaggcgtcggctcagccaccgccgctggccatccggctgcagctggagcggcccgccccgtggtttagcaagggcacccttgagaggttcgtgcgcttcgtgagcacaccggaggtgctggagttggcgaacacctatgatctggagatgtcgcagctggaaggggccaggaagatttatgcgcagggaggtactggagatgctacttcaggtggagctgctgaaaatgttacagcctcagcggcagcggcggcagatattacaaagaaagaacttcttagggcaattgatgtgcgtctaagttcccttaaacaagatctggccgcagcttgttctcgagcatcctctgctgggttcaatcctatcagtgtatctgagcttattctttttgctaaccattttggtgccagtcggctgagcgaagcatgcacaaagttcatgtcactttgccagcggcgtcctgacatcagtcctcaaactgcacagccagcagtttcatcacactggaaggtctttgacgatgggaatgtccgtggttcttcgagttcagacatgtctatagatgaaccactagttgatctcagtgaatccaagaacaaatctacagtcagtggaagtggctctcaggtccacagactaagcaacatccaaggtttagaatctgctgcagcacagcaacccaagccaaccatccaacaagcagtagataaacaagaagcagaaacagatgcgtctcctgcaccttctaaaggagagctttcaaggcggctgagtgtgaaggacaggataaacatgtttgagagccagaaaaaggagcagactccaagttctggtaacagcaactctgccggtactggtagagtggttccagggaaaggtgagcaccgcagggttccttctggcgcctccatggagaagttagttagaaggtggagcagtgttagcgacatgagtattgacctcagcaacaatgagagtagtagcttaaatgacaaaaaggataatggaactcctgccgggactccaacatctactgatttggaggccgactctaaagtaagagctaatgaggactctaatggacagaaggattcaatcacgtcacactcttggccttgtcaaaaggataatgtaccaatggatctggccaccacagatttgtgcccaccctcaattttaagtaatacacttgctcctcataaagagagtatatatggtgatggtgcagaaaacgacatggttatgaactctagcattgaaagtgaagcatcctttgggaaagaaccgggggttattcaaggacacacaaggatgtcaaatcatgctacttcaaatgtttccactcaagaccgtctaaaatcttctgcaaagtcagttgaagaagccttgctgaaaaataaagttattgtaactagtgcatcgtcagaggagcatgtctgcatgatagacaaggaaatcacagctgttgctcatgaagtaccagttgcaagtgaacagattccccagaatgatattagaggtctccatacaaaagatattcacactgaagcagaagtgactggaaggaaggatcagccttcacgatcatttggaagggtatctggtggtgttaatcctaaaccaaaagcctcatccaattcccgagctaatgctaaaggctcatctgttagggatgcgattgcctctacagaaactgagttccgtgacgttagtttgcagcggaatcgtctaccacggaagtcagaagatgtagggaaaaaggttacagctggttctgattcagattgctctggtcgtcagggaaaaaatttgagcaggcaatcatccattaccgatcaggaactaaacttgcaggctagagtgacaagaccaggaaaagggaaccaagatcggcatggtgaattgcaaatgaaggccaatgagttggagaaattatttgctgaacacaagttaacatcctcccgacgaggtaaacctacagatgtgcaggttgaaagcacacctatggtgagtgaggtaaagccgacaatggttcttcatgagacaattcatacaaaacaagttgtaaaggagagtataactgtcaatgattttgatgccggtgagcttctgaagatggtgaataatcaagaatttaacattagcacaccacaaaaacttggcattctaagtttagaagagtcgagagggaagttttatgagcattatatgcagaagagggatgcaaaactgaaggaaggctggaagctgcagagagaggagaaggaagcaatgttaaaggctatgcatgacagcctagaacggagcaaggctgagttgcttacaaaattctctcggtctgcagatgtccctgactcaacttatgtttcccattgttctcagaagattcctccttcgcgatcagcaagaaaaaataaagatcagggggttggctcattcttggtggaagaggaaatgaatagtgactacctatctggtgatggttcttccaggagtgctgattccagaaagcatttttcaaataaagttgcttctacccaaaatgcatctgctggtcctatccataaacgttcatcaagaaccgcaagctctggttatgctaatcgcaggaatccaccagaaaatcctctcgcacagtctgtccccagtttttctgacttgagaaaagaaaatacaaagccttcacctggagtcagtagagtgagtgcaagagttcagcaaaagtcttttgcccgtagcaagagtattattgaagagtcaaagagcatattgaaagaagatcaatcgaggaggtcacaatctatgaggaagaaccaaattcctgatgagcttaaggacatttcgtcagggaatgatgatatttacaattgggctccctcaagaatttccaagaatcaatcagagggaccttttgcttacagtacccgtagatcgggtccaccaaagccttttcttaggaaaggcaatgggactcaccctgttattggtatagctggatttcaggctgcagctgccatgatggcgaatgccctccagcatggtgacagtggtgattttgaagatcagcaagaggattcccctgatgatgccaaagaagaggaagaatatgaaagcatggaagaaaatcttagagaaagtgactttcctgctgattctgacagtgagaacccaagagtgagtcatgaatttggaaattcagatgacccagggtcagaaaacggtgatgctgattttccaagcaaaacacctgccattggcagtactaagttcactgcttttacaggaaatgttcacaatccagctggtgatgttccagcaccctggagttctcgtcttccacagctgttcccttacacgaatgataattcagatggtgacgcctttgctgattcaccatcgggaagtccatcaccatggaattctcattcactggatgaaataacagatgctgatgtatctcggatgcggaaaaagtggggcagtgcacagatgccttttgctggtgtcaatgcacctcaacagccacgcaaagatgtttccaaaggattgaagaaattgtggaaatttggtaggaagactagaggcggtgacggtttagtaaatgattgggtatctgcctccactgcctcagaatgtgatgatgacatggaagatggacgggatctggtagtaggatcttctgatgatttcagaaagtctcgaatgggttatcttgcttcatatgacggttttgttgagaacgaggttttttctgaacaaggtatttgactttctaattctgtaaaaggtcttctcgttgtcattaaattagttagtatgcttctcaaaatactattcccacaatttatttgcactagataaagtttaaagaaatgggcctttctaatatggtcatcacactcctaaaattcaaaaaaaagtatctgaaggttccaaccatgtctatgagttggcaaacaatttaattgataacttaagatttctgttctccatctacccgaacaaaattgaaactgttggaacagctattctgagcattactcattctcgatgaggtattcctaggatataacctcttattcttggctgatgttatgcgcactaaccctgggccattggttctgc

SEQ ID NO: 31546 - DNA, 4163 bp, Zea Mays
ggagtgttcgccgggagtctagaaggccgtggaaacgagaggaaacaagcgacgggacaggtgacgaagcggcgagagggcgccagagggttctatgacatgtgggccgtaataatcatggaccgttggattgttgacgaagtgctcccgatgtgtgaaacatggcgcggctgttcggtgtcggccatggtggcgttccagtagtctctggaatgtggggtagggatctctgtaagccgtctgtgccatgggcccacgagccatccacgaaaccagatttgtggcatctagattctagcacgtgacagctctgaactggagtagtcatgcaacgatgaggtgtcaatgctccagactggtagcgcacggtgaatcgaacggttcagactgcgctcagtacgagcgtcaaatctgagccgtttccctcgcatcgttatcacatcacatcctgcccggcagcccgggtgcacacccaggctcctcacctcaccaccgcggccgcctgcccaaagcagcccaccactcgggcgcagcaattcgtcgagcatccgccgcgctcgacggccaccggcccaccagggcaccatggcgtccgccacgcgtgctctgggggcgctcctccacagggcctcgtctctgtcttcctccgctcccgctctccggggagcctcgctcctccgcggggacgggcctattggaagcgccggactgttccggaggcatgcggcgaggcggcggatttcgtcgttccagccgctctgcatgggaagacgctcctgcaaaatcgctggaaggaaggtgatgttctcttgccatgatgcacaatgtcacattaacgaagttcgggacggctggctgtgcatattctggttggcaaagccgtggaaatatcccgtgcaatcaatcatgttgtgcatgcgtgcaatcaagcaatcaaattcccaatgaaaatccaatagtaactgctagtttacatttaactccttccgcgtgaaaccagcaacattgtacttatttttatatttaatcccatttcatatgaaaccgttagatctagattggattcctggatgatttgattgcatgcttgcaccaaatgtgtgattacagtggatatatccccggcaaagcctccatttggaataatagaaatggatgcaacaacaaatatcattgtgtttcgaattttcggttctcttgaggatctgagctagcttttgctgctaagtagttgttcgcttcggattaaagccgactgtttagactgctgcagctgtaatctatagagacaaaaacattgtagaaacagtagaagccggtacggattaaaaccaagcgaataagctcggtccattagcgtaattgagaatggaaaaactgaaaacagaaagtagctttagtttcttgtttataaaatgtagttagctttaacgtctcaatatgtatcctcagagcaactccaacagccttactaaattgaacaaaatcagtaaaaaaaagaaaagcctggttaaaaacgcatccaacaggctagctttctacctctcttctccatccggctcgtcatctactcccctcgctaggcatctttgccgagggcgtacggctcgccatttccttttatcgcgcccaactgccctcccgccgtcacggcaaattccagctcccgcgaccgcgacattgcaccctcgccaccgcgaccagcccgtgcctccacattcatccgtcgccatgtacaaacctgtacggccccattcgttgaacaagtgaagaaactggattgtggaatgctcctctttctcagtgttcgccaggaaggatagatccggaggcgcatcgtacgggtggagatttggaccaatccactgtaggattgatgcaccggcgtttgcttcctcctacaagcttcgaaggcctaatgtcagcaaatctgtcccatgccaatcgaataaacagggatgaatcctacacaggtgagatgctggtggcaattgctcatatttttttggtactttttcaagactagacagttttttgaaccaaagcagattttggaaccggaaggcatatgtggaccagaacacttatgtgcagattgaagtggatttttgccagacaaatctctctgcttgcatgattgaagtgcatatgtggcccaatacacttatatgctcttattcctcactgccatctcatttctaaagttggaaagattgaactgaaccttgctctgaacttttttccttctttgttttcttattgttgcagggaggcaatcctttggatttcaaaatgtagttgatctaattcatgcatatgctgccaaagctgttactgaacaactagaccaaaatgagaaccttgtatcagtcaatgcagatgtctgcaatttctgggaaaaggatgttatgccgatgcttttctgtaggagttgcagatttttttttaaaaaaaaaacttcagccgaaacaggatgttatatcgaaacattgaattagcagtggatcgtgttcagaaagttgggttcattgtagggatcagcttccaggggttggttcgttgcaggatcaattgccaacctaccactgagtctaaatttagagtctgttggttacccacccttcaggaagttctatattttataaagccatctccaaaactctaaaattagctaggaattatagctatgctgttggagttgctctcagttccttacaccagttgtttctttaattcaggatgcccagaacttgaagaagatgaagcgcaacagcaaaattggaaaagaaattgttgcggcgtaggtgttgctggacactgtgaacttgcactatcattttaacagcttggtatttcattgatttcataatttggattattttgagcatatggttaatccaacatgctgtcatctgctagtatatgttgacataagatgttttacctttttggccgtttaaacttaaatcattggacatctgttcccgtgctacagtgtctatatattctcagtctgtagcgtttcatgttattatgttgtgaaggtattgcggttgtatttagtaattagacattgcctgcttaatatctctgaagtgaatggcactatcttacccaagtggtaggccttgttaaaatgaaaaaaaagcaactgacaacaagaccaagcatcagactatcagagttctagtgccattcatttaaattaattaatctggtccgtttctggatatcacacagcatcaagaagggtggcccaaacccttcatccaacacaactttatcagctatactagagaaagcaagggaacttgatgtccctagagaaattttggagcgcaacatcaaaagggcatcagaaaagggacaagatacttacacagaaaaggtttatgagattcagacaagctcgagtggtgaacataaaagttactgatgcagataaggaccaactgctcaccgttgcgttagatgctggtgctgatgacgtccttgaaccaaattttgatgatgatgactctgaagaagaagcagaaaggttctacaagatagttactacatcagaaaactacccagttttgctatcgaagcttcaagaagaaggattgaagtttgaaactgataatggctacgaacttgttcctctgaacccaattgaggtggacgacgaggccgtggaactaaacaaggaacttgtttcaaatttgctagagcttgatgacgttgatgccgtctatacagaccaaaaatgagtgaattcatgagctacagctctcaattcaagacgcgctcggccaatggactttgttcgagtatattcacttttcattgatgggaaaaaaatgttaggtctttttatgaagcctggttgagcaccatcggctctacccaaaaacttaacctagttatccagcatctttttgatactttggcatttcgcaagctcatgtctataccttggtttcttcccagcccatcgtgttgggatggtttgatacatgttcagaaagcagatgtgagaaaccatagtaaaataatacgttgatgctgatccatttttgggtcttgttaaattgcaatggaaatgctatgattttggtaagcattgaaatgaaaatgctttggctctctgaataaatgaatgtgctcttcgctcctataag

SEQ ID NO: 31547 - DNA, 1738 bp, Zea Mays
atatattcacctgagccaggtcgctgtttcatcatcgtgcttgactgcagtctgcagggggtgtggccgcgctgcagcctgcctgtcaatctcgatcgatcaaggggtggcgtgccgagatggcggaccggccgtcgcttcctgctctcattattgctatcgccgttcttgctggcagttactgccgcgtggcgagctcggcctcgccggcggtggaagatgagctgcgcggtggaggaggagccggcggtccgacgacgatgcggcggcgcgcggcgtcggtgatggtgcccatcaccatcctcaagtccgctgttagcgacggagctgtgtgcatggatggaacgccacctgcttaccacttggatcctggctccggagcgggcagcagaagctggattgtgaacttagagggaggtgcgtggtgcaacagcgccaagacatgccggctcaccaggagctccggccgtggctcgtcggaccacatggacaaagagatccccttcaccggcatcatgagcagtagccgtgccgtgaatcctgatttctacaactggaaccgggtcaaggttcgctactgtgacggtggatcttttgccggcgaggccttcgacaaggacactgggatctacttccgagggcagcgcatctggaacgcggtcatccggcacctcctctccattgggatggccaacgctgaccaggtgctgctcgccggctgctcctcgggcggtctggcggtgatactgcactgcgaccagctccgcgccttcttcccgtccggctccaccgtcgtcaagtgcatctccgacggcggcctctacctcgacgccgtggacgtctccgggggccgcagcctgagatcctacttcggagacattgtggccatgcaaggaatagctcagaacctgccgccggcttgcaccgcccgcctcgacgccacctcgaacataatcgacggcgttaaaaccccactgttcctgctaaatgccgcatacgacttcattcagattgtgctcagcctggcgccagacagagctgacccaagcggcgcttggcgagcctgcaagtccaaccgcacggcctgcagcgcatcccagatgagtttcctgcaagatttcagggaccagatggtagcgtccgtcaaaggcttctccggttccaggagcaacggggtcttcctaagctcctgcttcgcgcactgccagtccgagcagctgggcacctggaacaccaaaccaggtggctcccccaccattcaaaacaaggggatttcaaaatccgttggcgactggtactttgatcgagctgaggtgaaggcggtcgactgccgctatccctgcgacaacacttgccaccacattatatgagaggatccacgtttttttattattttatgcatagggaagaacattcgctctctcaacgaagtgtacatcgtatttgattttgggaatgcaattggatacagccatcaaatgaacacaacacgcgaaaataaatggtaatggcgtgttccagtaagacaattgagtgattcaacagctgttgtttagcatttgatccatgcaatggagttcctctgtattatcattctagtcagttggcactgctaccagcaaatatcttctactagtacattcggaattctgcgtgcctgttcatgctaatcctgcaaaaactgaaggattgagctttcagtaatcagtgccgataagaatgaattacattattatac

SEQ ID NO: 31548 - DNA, 585 bp, Zea Mays
acgacgatggggtgcctttgcggccatgtctggctgccaggcgtcctgctggcgacgggcttcggcgcgatcaccggcgccgtgctgggatctgaggtggcggaccactggtaccagctctacgagatggacaagcagggggccaacctcaggttcatctactggtgggaggacaaggtctcaggccaccgtacatagtgatcctggtgttacccatgtaatggcacgatagtgtattctcttcaaagtacaggatggagctgtgatagcttcagccagaagagctgaaccacatcgagtgatgcctattctactgagcacaccagcgtgacaacaaaacattgacgtctctcatgccgagttcttagtttttctttcctagttttctctaataagtgtggaattggttgaggaagccaactggacaatgcatttttcatctccgtcatgggttatgttcatccatggtcaatctggtgtaaacagcaaatcctatccgttttcgagatatgttttctcaaactactgatggagtttagagtgttcattccacctctgctacaaaactgtagctattgctgtatc

SEQ ID NO: 31549 - DNA, 1566 bp, Zea Mays
gaaaatggaaaagagtgcattatgagcacggcggctctatcagagcgtgatacattcacaagctgaagagggctcggtcatccggaccggaattcgtaaaggcattagtgcattagcatcgtcaccactcgcgccgtcgtactacctcgccgactccctcgcttcgcagatcgcactaaagggaacacatggatctagcttgattttgtaccaaattcagagcaactgatcgtggggattcgattctccatagtttatttgcggggccgttccgatcagcgatggtgaagaggctcaggcgcaagggcgacgtctcctccgcgccgccgcctaaggccgccgcatctcggtcaaccaatcccgacaaatttaaaaagaagggggtcaaaaccgatccggagaaattgaaggcggcctgcactgaatccgcaaacattgctgaggcgtctgcttcagcgcagacacccaccccgaaaccagtcaagacgagtccggcggccgccgccgccgcagagattgcagatgatcgggtcgcccagagcaaaacggaggacggaaagtttagtaggaaggagacgatgaagggaagagaggagcagaagggagaaggggccagtgatggggtcacccagaccaagactgaggatatgaatgtgactaggaaggaaacgatgaaggggggagagaggaagggggacgggagtaggaaggagatgatgaaggggagggaagagcgtgtgaaaacggaagagaagacagggaaggaaaaggaggaggaaaagagtggctcaggattcatattcatgtgcagtgcaaggacgaagccagaatgctaccagaacggcgtgtttggccttcccagggggaagatggatgtggtggagaagatccagcgagggacgaagctgttcttgtatgattttgacctcaagctactgtatggggtgtacaaggcagatacaaggggaggattggatcttgtgcgtcacgcctttgatggcaaattccctgcacaggttaaatttagcgttttcaaggattgtcttcctattcctgagagtagtttcaagcatgccattaaggagaactacagctcaaagggcaggttcacccaagagctcaacactaaacaagttcaaagactattggcactgttcaagcctatcagcctttctaaaccagctccacaacatattgaggatattcgaaaaccaagtgattatgaagaaagaagacagttgcaacatattgaagaaagggctgcacctattaatgtccacgcacatcctcttgaagatcggtacaagatgacacggtcattacatccgccactttttgatgagcctcgacgtggtttggtgctaaatccttatcatatgcaagagcctcaacatgttcctcttaattactatcaccaagtggctactaggtctccataccatcaacctcatatggatattatgcacgaaagttcaactatgtcgacaaccatgttcaaccattgccttttgattcgtcattaggaaagccaagctcactcacttattggcttgcagttagctaaca

SEQ ID NO: 31550 - DNA, 1979 bp, Zea Mays
caggacaggaccaagcccacgcgacccgccgacgcgttggcgtaacggtccaaccaatggccgggttcgcgcgcgccaccgcccccgcgtccccgtcaccggcggcggcgctgctcaccggcgagcgcctcgtggtcttcctcttcgcggcccgcgtggcactcgcggccccggtgcacctcgccgcggcgctcgcggtcctcgtggcggccgccctcgccgtcgagctcgccgtggacggctccggctccgccccgcttcgccgcttcaggaccaggccaggtgcttcgtcaggcatacttcttggcgccactactctgcccagcgtcatgctttctcggttaattcaactgtcaaggctcctaccagctgatcctaatggacctaaagaatttgcatacctggaaatgcagtactgggcagcatcaatcagctgtctcagtgtgctagctttattcctttggcatctacagaagtctcccagcaatgggatctctaaacatttggagtacggctcattgtttatagttttatatctcatgacattctttttgtcctttctactgaagactgatgaaggcttgatggtaacgaccaatatggcgtatatgctctgtcatggagtggctgctgtgatcttaatcaagcatatcctagagaagtttccctcatgcgcatcttttggggaggcgcttttggtgtcaggtggtcttgttctctactttggtgatatgttggcacatacactttcaaagatggagttctccatgtcatcaaaagcattcattcacacacctcaaactagaagcgatatgaccgcaattattcaggattgttaactatatgttcactgattcacatgagcgacttgttttatgtgcatactggatatgtgtaatatatgtatcagttagaaggttctacagtatatcaaagcaaagcaagacagagaggattcttttgcgcaagtattatcatcttgtcgctgttctcattttctctcctgcagttatatttcagcctgctttcttggacttggcatttggtgcagcatttgcagttttcttgatattggagatgttacgaatttgggaaatataccctcttggacgtgttgtgcatcagtttatgaacgcctttactgatcatcgtgattctgagattcttattgtcagccatttttcactcttactgggctgtgcacttccgaaatggatgtcatctggattaaatgaccgaccacttgccccttttgccggaattctcagcttggggataggtgataccatggcatcaatgatagggtacaagtatggcgtgttaagatggagcaagacaggaaagaaaacaatcgagggcacggcagcgggcataacatcggtgctagcagcctgctcgatcctggtgtcactcttggcttccagtgggtacattctttcgcagaattggctatcgctcctgatagctgtcacattgagcgggttattggaggcatacactgcacagctggacaatgccttcatccccctcgtgttctatagtcttctgtgtctataagggtagcatcctgtacatctaactgaccttgatatcctctttttgtttacacgctattagtatatacgtagtgcaatatgttatttcgacattactcacttggtctcctcggcgcatcaactgcctggtgattcagttcaacagatcacattctgtgtaaccctgcctttcggaagttgagaggacgtgctcatggttgagacagtcggtacaggcatatgaccagaagtagaaaaataaaatgttctccagtcgttcagtagagggtgtttttggcggagctgggcagttggatgctgtacataaagttttttttatatgaacctgttgactgttgttgggacgaacagtattgaaacatgctgtgatgctgatcaatttgatcactctatttgctctttctatccatttttaaatacctc

SEQ ID NO: 31551 - DNA, 3090 bp, Zea Mays
gccagcgcgttcttcgtgctctgtcaatctcgcagcagcgccactctcttccccacttccccaccgtggtccccccttccccacccaccggagaccgcgccattccccccttccccaccgcgaccaccagaccggcatggcgcatacctgagattgcgctctccccaccggatccggcttggcgcacaccggagaccacgcccttcacccttccccaccgtggccaccggatcccgcacacgcgcgctccggcatggcgcatccacagcacgaacgcccggaatggagcagcgtgcgtccatgtacccaccggagaccaggccattcaccaccgcagtgcccccaccctcatcatcctcgcgtccccccgtcgctacagccgccaagttggtctgcagggaggtccccccctcaccgcgccacgctcgccgcgcccgccgctcggtcctcgccgcgacatgcgcctaccctcacctacacgatgctcactcctccgcacatcgcaaagccgaaggtccacgccccctccgtgctgtgaccccctcccttgtgtgcccatgatgctggaagggaagtcctaccttgtgccgcgctccctgctaagctcctgcgagatagagacacagtgggcgtacttcgcccacgaggtccacggcggcaagcgcctggcgccggaagactgcgaggtcgaagacctggacaaagctgacgtcggcggcaagcgcagcaagccgccgtctccacagccgcacacgccggacatctccgagggtcgcggctccagccgccatgcctccggttgcggagagcagcagggcactgggagcaaccccatgaattcaatcgaccgtgacctgaccctcaatagcctcctccggactattgaatagggcaaggaagatgtgtgttctggggttttcatggatggcaagttctatgtgatagatggtgtggctaacaacaacaaattgctgactttttgcaggtgacgaaaaggtaaggggtttcgatcggagatggcagcggcggcgaccgcacatagagccagcttcccgttgcgtctgcagtagatccttgctggaagctgcgccgtcgcacctgtggtcaaggtcgagtctgagccgattttgtggggtcctagatccagacgtcggtcgacaggtcgctggcgtcagtggaccacgtcgcctatcgcggttgtggagcggagctgtgagcagatcccaagtccaatgacgaagagggagtctcggtagggtgcgataaggcgcgatgaggtcagacacggagcacggacgtgtcctcagtcgctgttgtcatgtgtcagtggatgcagtcgtcgctatcgcccacaagaaacctcgcttcgtggaaaggtacctctagggctttgcagtctcagctttggttgtgtagatttgtgatttcgtggtctgattaaccacaacttcggttacatcgctgctaccatcttgtacaaattacttccaagctattttgcctgttcctgatgtcaatttgaggcactactaaacagattagtatttaacatttggatgaggaagtcaaggacaccgacctcaagcgctctaccaggaagtccgaggaggccgtcctcgccgacctcgcttggctcggcctcgaatgggaggaaggtgctcataaaagaacacctgtgatgcctagaaggaaccctccaccacctccaagagagcaatctaatagtttttttaccgcatggaagctcaaaggcaggagatgcaccgttagaggtctctctgacacggagatacaaaattcttggaaaagtagagcagaacaacctcaacccgagccaaaatgtgagaaagacccatttaacagctttgttgcagattttgacactcacaatctcaacattgccgttggtaaggcatccgaacttgaacttgaagtctccaatctaaaggagcagttgaagaaaatcacattagaaaaggctgagatgacaaccaagcatgaaaagttatctgcaatctgccgatcacagcgtcaggagatccaagagctgaagctcactcttgttgagccaacgcctccctcaaacaaagtcagctcaaggacacaagattctggatctcaggtgatttatctacatatgtctaatacagcatattcactctcctgaagtttattagcatcttgcatagtatttatactccatgcagcgaaaggaaaagatccaaggcactgtgtgggagcttgaacaagggatgcttgctattgctagcaactcctcatcagccagttctgatgccaaaacatggcaggctttccctgacacaaagactcaggcccgaccaaaggtcgatcatgcaactaatgggagccaaaacataaccaagaacacaacgtcaggtgcttcccccgatgcgtggggttttggtactgataatttcagaacaccagcaacaacattaagagctaccacacagatcaacagggcagctgcccaacggagctcatcccaaagatttaacgctggtgtggccaagagccagtctcggagctgcttccccagggtgaaagtcgtgcacacgtcgctgcagcgggacaacaggtactacgagcgcgaaaacttgctgatggtcatcaagaacaacctgttgtggcaccaccttagcatgggcctgggctatgatgactccaactccaacgatagcggcgtgtcacctagctcggaccgtgcgaacaacatagaggtcgccacagtgtcgccggtgccggcggtcgtcaagaagcaggcgaggttcctggtggcctcacctaggagccccgacgtgaatgagaccatgatggaggagctgcacgagctgtgcgaggcgcgggaggccggcaccgcgttcatcatggagcactcggcatgtggagaccaagcccgggtcgtcactgctcaagaggctgacatgtgaatttgatggacaacatgtatcctcaatgatcgctcgagtgctcagtgagccataatatcgtgaaaattctatgtgcttgtatgtttcgttttctttttataaatcatattgtaatgctatttctataggtggagggtga

SEQ ID NO: 31552 - DNA, 6756 bp, Zea Mays
cgccccttccttaacctcagcgttgctttgctcgtgctgctctctgttccgccgctcgccacaaaacccctctcccctcacgctccccacccacctcctccccctcgaggcaatgccgagcgcccttaacctagcctgagttcgagctcaatccccattccgtcatggatcggccgccgcatctcgtcatcgacctcaacgaggccccgccgccgccgtcgagcgacaccccgccggcgcaggccccgtcgccgccgcaggagttggctccgcccgtccaagctcctcctcctcctcctcctccgccgccgccgccgcagtttcctcctctcctgccgccgcagctgcccctgggtgcgcccaaccaacaggtgcggctccagcaggaggccctcgacgtggtgcttcgggtccaccgccccctcgaactgaggaatacaccttttgggcccatagggaacgtgcccgccggcttgctccctggtctggggctgccgctgctccctctgcagccgccggcgcctcaccctggggaggcgggttggggcaacccgccggccccctgctcgtcctgcggtcgccaggagattctggggggaaccttggtctgcgacgcgtgtgacagggggttccatcccaactgcgtccgcgtctggccgcctctcttccccccgcccccgccacccggcccccctggcgcccggcggccccgtgccgccgccaacgaggactggatctgccctgcgtgtgagaggcgtggcgctcgctccacccgctggaagctaggtgcagttgagcttgacatcaacgctgctccgccagaggaccccgtcacagtcatcgccaatgacatccgcagacaaaatatcaccgatggaccccagttgacagttgccaacttgccacattttgaggggggtcacttgcagaatactactctttatgatggaatgcagtttatgccagcatttgatcttgcccagtgttttggcatgagacaaaattttacttccatggatcaagatttaattgctgatggaaacgtaccacaaagatcagctcatttacgcagaagaagagatcttccacaaacatcaacattacccaaggttgcagtgaaccatgagttaggaagtgctggcacgtctatggatccatcattttttaacaatacaatcaaacaaagtcctagtgaaaacagaagttccttaaagcctccaatatttcttatggagaacagtaatcatcagccacatcatcatacagttgcactacctgttcaatatagtgattttttcattaccagcttgggagaaattgacaatcggacaagttaccacaattcataccagatatggccagttgggtttacgtcttactggcatgatagagttactggttcactgtttgagtgtgaagtgcacgatggagggaattttggacctttgtttaagatgagaaggttaccgtgttcagcattccaacttccggatgcatcaaccacagtgtgcctaaatgttgttaggaacgctgatacaatagaaacgaaggaaggtagtgatttgattgaagatactgccaatgatgctaatgataatatttctatgctcttatcagatttctctgagacgaatcaagatttcttatcatgtctaggtaatgatttggagggtaaagaaagtttagggtgcagtaatgtagaaactaaggatatgacagtgccagatgtgctgtcagatcctggctctttcagttgggcaccgaccaatgatgcaaatatgtatgacaaaattggtgacttcagttatgaaggaacatcaccttcctcagtctggaggatgatttcttgtgctatgatggaagcctgtgaaaaaatgtacaaggagcatggccatttggtattattctgcactcacagtagtgaaaaatctccatttgactatgaaagtggacctcagcgcactgatggtcctttcaatctattggctaagttttgctcatcaaatgggcctaaggtaccacagtttatagaaaaggagaatgatgtgcagtcaacttgtgcattacttaaagaatggctgtatccagacagaatcgggtttgatttggaatttgttcaagaatttgtggaatctcttcctaaatccggggcttgttcacactatcagttcttgtgtaacaggactggaattaactcttcactgacgattgcaagtggcacactggtagctgttaataaaaatagtccaatgcatgcgagacatggatctgtagtgagtgggccgcaggatcatgctcagcctagctcttctagcatccgtgagcttcctccaggaaatcctattagccgcaagcttgcaccagaattggctggggatgttttccagatattggagtttcttggacgatttgctgaaatcatcggcctgaaagaacttccttcaattgagcaagtagaagatgaactcattgacccatggccaatgcatccaaataaaaatgacatccacaactacatggatcacaatccaccgatgaattcacctgctaatgtttcttcatcgtactcgaatggcgaatcaggtgatggaggtatcctgtgtggagctctacccggggttgttggcatggagaaggatgcatcgctacttgcagaggctgaaacattgatatgcaattcttcagcaaatgaagggaataccgtctttatgatggattacaaggatactgatattgtagattctcctgaggagcctgctagtgacactacgttgccagattgggtgaaatcattggagcctgtgagaaaattgccaactaatgtgggaacaagaataaggaagtgtgtttatgaagctttggagagaaaacctccagaatgggcaaggaaaattttggagcactcaatcagtaaagaggtctacaagggtaatgcatctggaccaaccaagaaagctgttttatccgtcttgacagaggcatgccgtacaaaagtaccccagaatacagaaaaaccaagaaaagagagaaatattatctccatctcagaggctgtcctgaaaaagtgccgtattgccctgcggcgtgctatttcctctgatgaatcaaagcagtttgctaatttgcttggaacaactctaacaaattccaatgagaatgaagatgagggcatccttggatttcctggtatggtatcccgccctttggatttccgcacaattgatataaggttggctaagggagcttatcgcggatcttgggaggcttttcttgatgatgtacaagaagtaatttgtaatctgcaaactgcatttgctgatcgacctgaagtgctgataatggttgttgcactgtctgagagttttgagtcattgtataagacagaggtacaagaccttgttgagaaatttgacagatatctaagcaatgaaaatgatagctcagaaatccaccaggagctacaagatgctctcacggcagcaaacaataaactgccgaaagcaccatgggaggatggtgtctgcaaagtctgtggaatcgaccgtgatgacgagagcgttcttctatgtgataattgtgactctgaataccacacttattgcctgaacccaccactggcacgcataccgcttggaaactggtattgtccatcatgtactgcccaaactcatgttgcagtgcaagaacaaaagaagtgccttggggaggaagctcatgtttttattgagaaactcaacaagttagctgttgcgatggatgagaaagagtactgggagctaaccgtagcagagagaatctatttgctaaaatttctatgtgacgaattgcacaacacagctctcatcagagaacatctagatcagtgttcagacaagtcaaatgatctccagcagaaattacgtcacctgaattatgaactgaaagagttaaggtatcgggtagaaataaaaaatccttatgccacacaaagtagatggatgaaaaatgaccaagtaagcaatagttcaggactcgtggagaatcagcagcgtgctatgcccacagcctcagagcatcttgaagaggctgaacaggttaatgttggagttaacctgaacaaccctgctgaaggggttcctgctgcactattggatgtgggtaaaccttgcagtactgacaatggcatatccagcacatctgttattgaaggaaataaatctttggggctttcagaacaaccatcaaagataattactgaccagactgatcgggactctattgccgaaggatccaatagttgcgagaaatcattagttggcaaaagtggtacttgtgatccgaatgtgggagagactcatgctgctacagttatcaatgcaccaaatggagatttacctgatgaaaatgctatgacattgtcccaagataatattgaaacatcgacatctaaactggttgaccatgatgctgatatgaacgaatcaaataatttattggagaggatttcacagttgcatggttcaattagcacagtagagtcacagcttagtatggcatccttgagaggagagtgcctgggtagggattctgttggtcgattgtactgggttacaggaagaccttgtaagcgtcctcgtcttgttgcagatggaagcatgatgatacccaaggacagagacattagcatggttacaagccattctcagtcaacattcgatagaggttggaattcggcatcacttgttatttatgaatctgatgaagaaatgaagtgtcttgttgactggctaagggacattgatccaagggagaaggatctgaaagactctatcttgcactggcaaaagtctatttatcgccaggctagtttccccatcactgatcctccagtgtccaagttttcaaagagtgagccacttatggagcttccaaacaccaatgcttttatagttttggagcaaaagtatggtctgcaaacggatcaggacactagtgagctatccaaaaggagaggaacgaagtcaaggtcgggttctgaagaaagagtatatcgctgcgactgtttagagcctatatggccttctcgacaccattgcttaaattgtcatgaaacttatctcacattgatggaatatgaagggcataatggtggaaaatgcaccagcagtaacgactgtcctaatgaaagtaaagaaattgatgagccgaaactgaagggcagcaagtctgatataaaggaaaaagatcctgtagttcataattgttccgttgaaccatctaacagtggaaaattggagtcatgcccttatgactttgaagaaatttgtagaaaatttaccacaaatgattcaatcaaggagacggtgaaggagattgggctgcttggctcaaatggaattccatcttgtgtaccttcacctgcatatttccttgacccgccagttctgctaaatgaaagtaaaagaaatgacgataaaccaaatgattggacttcctcattgcaggaatgccaagctgtgtctgccaaaatgtcagggcaagagggatctcaagttggccaagatttttctggcaatgcaggtgatgaggagttgccaaaatctaagaagcctgtcagggatagtacttcagccaaggaagcaccttcaacagacatatccacaagattgctaactgttaatgggggattggttccagagtcatcactgatgcctgtaataggcaggaattttcatatcctgaagcagctaaagattaacttgcttgacatagaagcagctttgcctgaggaagcattcagagcctcaaagtctcagcaaataagaagacgttcatggcgtgcttttgtgaaggatgcagaattaatatcatatgtggtattggcaatcaatttcttgcagagcatgataaaagccgagtttctgaagaaagattggtggtactggtcctccttcactgcagctatcaagacaacaactgtatcatcgcttgcgctcaggatttacaccctcgacgactgcatcatgtacacaaaggatccagctccaaacctgcagccagctgacaatgcaaggtctggaaacaaggggaagaggaagaaagacatagattcatgagcatcgtaaccacaatgctcctggcttcccctgtagattctatctatctgcatttagaggcttctcagttctctggcagcataacaacgcggtcaggtagattggagatatagatggtagtggtcaggtagattggagatatagatggtagtgatacaggtcgcaacctatgtgtgacctctttcttactgtacattccagtgtcacagcaagggtgcagccatgatttgcccgtttcagtcttgtcctacttactggcctgccattgcgcgatatctgctgttgctaaggctcaatctctgtaaattctactcgagggatggcaccgggcaagtgctggtgtttaatctgttgcccgatgtgttgatctgttctaggggattagaggaggaatgctaggtcggtaggatttaccccatttctaccctgcttcattttattttagtggtggcagtgggtagtcgtagttttttcttttcttttcttttcagagctgggattgtttgatggatgtcccctgcggcatctgactgctttagggaatttgatacatgacgagtgtaatattttttttgacatagaagttgtaactaaaccgaaactaataatgatgaatgaaaatgaatccctgttcctttccccgtttcttcatgttggctgg

SEQ ID NO: 31553 - DNA, 3062 bp, Zea Mays
gtaatcactctgttatgctccttgttcatgcgttgattccgctggctcccgatgatctgttgctactactgtttgtacttggtctaatggtcattggatcactcatgttgtgttcactttcaagtcgggcaaataataattttttgggtgggacttttggtttaagtacaatgggaacttcgaaagggagggtactgtgtatgttggattgatcttagggcctccacgaagtgtatagctacctcaaacaaattattatttctgaaatgtatttttatggatgtttgcatacatatctagataggggtgcttacggcttaccattatgccttagctctagatgttgttcttgttacccatggtggcagcatcaactgaacgcatctctcacccccctgttgctgaacccagagagtgtgactggtataatcttgagaaatctaaacgtgtgaagtcatttcggtgtggagaatatgatgaatgtatagaaaaagccaaggctctagctcgccagcaaaagaggacacatgctgaagggagatatgttcgcagagaggatgccattttgcatgcccttgaaattgaaaggtcccatttttcaaataactgtgatgattttgaagaggagaccggcaatgatttgtgtgcatcccagaatatgtgttctgcaaaatctataaatataaatgggctcagcaaaaaatctcgtggtgcaaggagtttgtatgatacagaagaaaattcagctcaagagtcatgtcaaacattgacactttataaaaagccacaaaatttatcctcttcgagcactaggtatgcatcgtcaaaaaggaagaagcggaagggacataaaaatcatgaggatgatacagttcaaggattccagcgtatgagagatcttagggagattggaacaaacaatgttcccaagcagaagtctggtgcaggaattgtttcagatgtacctcttcttgaaagtggaccaagctttgactatgatttgtccagtgccaatgggataaaaaagggtaagcagtctcagacatccataaaaaagaaacggtccaatatcgggcaatcctgtgatagtttgagtaagaaagataggcatcaccctctatcaatgttatgtgaagattcagaagtgtctggaacttattatcattgggaccgttcaggccagtcttctagtgagtacctaggaggacagatacccaatttgtttgaatcaagtagggcaaaaactagtctttcaactgatgtaaataattgttcgtatagctcaggcacttcaagtttggagatattattagatacatcacacatcaaacataaaggttcggtaaatgctgttactctcaaggttgctgacccatgcacgactagaattctcaatgatgactgccctgattgtgatgagtttcttgctgccgatactttggagggtgatgttctggaggaaggtaaaggccatttggatacttatggatcttgtgcatccataaaggatcaaatttcaaaactgggtaatcaaagtactggctgtgccataggtggcacaccctcaacttggcataatagaaattccgagaagaaaagcataacgtctgtcaacttgattcctaaagagagccacaagagggataaaaattcactgttgcaatgtgaagggattataaaatcggaaggtactatccttcggcctgctgaacttgaggataatacaaaacataccactcctgagcatgacgagtcctctgaaactataagcaaccattcaaactctgagaagggcacaaaatcattacccaattactttccacttcaagtactaccaccacctggacagcaacctgatctgaaacttccaagatgccctgtaacgagtccaaccaagagaacgagtccgaccaagagagcacacgcaggttatagattatatgatgttgagctgactgtccaaagaagctacaagggtcatcatgtgccccttgtttccctcatcagtaaatggacaggtaaaccaattgtggggtatcctgtcactgtggaggttttggaggatagtcgtcccacaacaagtagaaatgagcatcgcccgccgatgggtagtctcggctccttaccaaagagcagagttgcagaaccaaggcaagcaagatcttcacccgcatcacgatcaaaatcaaaacccagtggacgtaaaaaggcctcagaacatgatttggacaagtcttggcggccccatatcaagaaaccagcatcttcgccgaggaaaatgcggaggctgtcatctttcgccggcagccggagagagagtgcagaccagaagcctgtagttgtgaaggctggcggaccagcagtcgcgtgtgtcccgcttcgacttgttttgagtaggatcaatgaagcactaagcttcccgttgagacaagaaaaccccacctgaggctgtggcagttttgcattgctgagatagaatgtgggcaggcatatacatttgctaggttttctttgtacattagttaccatattatctgaaagcgtattgcctggcatatttatatcagtatattatgatgtaatctgtagccacactaggcaattacgacttacccaccgtgagatatgggccgaacatccaatggtgggaggaaataaaggggcatcagttgctgtgggctgtggcttcatctgacagtggaagcaaaaatggcagcagacctgttcaccataccatacatcatacaaaattttccccgtatttgctggcaacttttagttgatccaggcaagttgctgtatgtaatcagtgattgcaaggattgcagggcttcgtgcaactacttgcagctttgagtgagttgtagattcttttatgtgccaattctctagtgttgatgctggtcactaccaggcatctctagtgttgatgctggtctctacggtgtagatgcttatatatatatgctaattctgtgacatcaccggtgcagtttttttgtcacatcgcataaggtcgaggtatccaaactttggcatgggagagcacttgtgcatttgca

SEQ ID NO: 31554 - DNA, 2370 bp, Zea Mays
cgtctgtaactctgtattacccagtcgaccgtgccgccaaaaaccctgggtctcccctacgcttcgctcgtcatgctgcgccgcctccgcctgcgcttgccggggagggcggcgtcggctgccgccggcgcggccgctgcaatggcgtcgctcaccaacgtcgcctacgccgacggcctcttccgccgccagtccgcgccgtcgaatccaggcgacgaggacaatttgggagcctccgcgttcggccgcgatccggagaccctggagcgcatggcccgagcgctgcgggagatcaacaactcaccgctcgccaagcaggtgtttgaactgatgcggaagcaggaggagacgcgcctcactgagctggaggtcgagaaggtccaatacgccatctatgagaagctgagggacatcgaaaggatgcagaaaaaagctgaagattacagaaatagtttgcaacaagaagcacaagcaaaagctcaagcattacgctttgaggatgaattagctagaaaaagaatgcagacagatcatgctgcacagaggcgacaggatgctgaactcgtgaagatgcaagaggcatctgccctcaggagagaagaagctaggcgtgcaacagaacagaagattttggaagaaatgatacgtactgagaaggaaaaggctgaaatagatcaggaaacaaacagagttaaagctatagctgaagcagaagctcgtgttcatgaagacaagcaatcagaagaagttgttaaaagaatgttattggaacgcatgaagggtgaaaaggaaaagtggctcactgcaataaatacaacattttcgcacattgaaggtggattcaaagcactgttaactgataggagcaaactaatgatgggtattggaggagttactgcactggctgctggagtttatactactagggaaggtgcgagggttacatggagttacataaatagaatcttgggtcagccttcgctgatccgtgagtcatcaatgtcaaagttcccactaccaatgtctaggctactcaaacctagttcagcatctttgtcggagggagcaggctttgagaaagttatcctgcacccttcactaaagcggaggattgaacatcttgcacgagcaactgcaaatacgaagtctcatggtgcaccattccgcaacatgctgttctatggacctcctggaactggcaaaactttagtagccagggagatggctcgcaaatctggcctggactatgccatgatgacgggaggagatgttgcacccttaggatcagaggctgttaccaagatccatcaaatatttgactgggctaagaagtccaaaaaaggcgtaacagtacccatatgagcgaagctcagcggagtgctctcaatgcattattgtttcgaactggcgaccagtccagggatattgtccttgtcctggcaacaaacagaccgggtgaccttgatgctgctatcactgaccgcattgatgaagtcatagagttccccctgcctggggaggaggagaggtttcaactgctcaagctatacttgaaccaatatatactcaaggaagagggcaaaggatcttcttggagtgcattattcaagaagcagcagcggaagattcaggtcaatggcataagcgatgatttgctcagggaagctgcaaggaagatcgacggtttctctggcagggagattgcgaagctggtggctagtgtgcaagctgctgtttatgggcggcctgactgtatattggacccccagttattttcagaggtagttgactacaaagtgactgagcatcaccaacgcatcaagcttgcttcagagggtatggtttgatcagtaagaaatatttacctcccactgactctagtagtgcatgttttggatcccgtgggagtgggacattttgtagcccccgtctattcccaccagttttgttccatgtgctttgcctgcagcaagggttggtcccggatggacatccaaataggccggttgtggtcaattgaatttagggtgtatttggttcagctttctaaattagattcgccgccaaaaacaggaatctcaatcaaacgggaacgacaatagaatagatttatgaaaatttatagattcctctagttctattcaaaatcaccttatttttaggattcctgttatccatgggctatcatgctcttttacagtttgtttcaaacaaaaatattttctctctccacaaccgttagttttcaagggctatcttcaacaatcaacatgacatttttctaccatggctacaatctcatgctcgtctacctcgacatcggtacaaatagctactatcttcaatgaactacttatcagttcatgtcag

SEQ ID NO: 31555 - DNA, 1519 bp, Zea Mays
gaacatggaagggagacaggcgaatagaggacagctgagctgcagcatcccgtccaacagcaggaccagcgagggtgtacctccgcctcgcgagtcgggaccatgtggacgggcagcccgctgctccgggacgttggcgccgccgtgctcacgggagtgggcgcggctgccgtgctccgcttctgggaagagatcgccaaccgcgccctgctggaccaggtcacgcttttcctttgtttttttccccagtttctgtgctccgtataaaatccggtatctattgcttgcgctaacaagtacagtagtaattgaagttttggtttcgattcgttccaaattgccctgaaccccaccctcgatagtcaacccaccaagctctagcagtactgcagcttcactagtcataattataatcaaacttttattagctatcaccttcgaagcctattgatatcattttccctttcaagatgaatctactgattgatctctgtatatgtctttctctgtgcattctagaaactctgcaggaaactggtgcacataactgtaggattagtgtttttccttatgtggcctttgttcagctcagatgatgtgtttgctccatctctcgctccgcttatcatcatcatcaacatcatgaaagtgacagtgattggacttggtttcgtgaaagctgaaggtgtggttaactccatgactaggcatggagaccgcagagaacttctcaagggcccgctgtattatgcctgtgctataactctgacaacaatagttttctggaggacatctcccatctcaatcgcggtgatctgcaatttgtgtgccggagacggtgttgctgacatagctgggagacgattcgggcatgttaagctccctcacaaccctgaaaaatcatatgccgggagcatcgcaatgttcttggcaggtttcatcgcatcagtactgttcatgtgctacttcaacattttcgggtttgttgagaagagctggaccatggttgctgcctttggtgtgatatccctggctgcagcagttgtggagtcactcccgatcagcacacgccttgacgacaatctgacggtttctgtcgcatcagtgctagttggcgcccttgttttctattccattggagccagaaacctgtgctgcatgagcagcgaagtcaggagaagtatcccagcaaccgttggaatggtgtttgcaggcagcagctgaaacatgtagccacagtccaggagcagagttgagcagaaagtgcagagaaaggagttcttcaatcctgatgtgtgtgtatcttgtactgtaaccattttcctgtctaagcagacattcttgtaactttattaagaaagaggtaaagcgagaataagtttattagggaaaacagaggatgagctctcataagcaaatgcaaattacagcgtgaaagttatgcgattggtgaaaagggagatgaaactgagcaaaaagaaatctagaagagaaaggaaaatatataaaaaataaataa

SEQ ID NO: 31556 - DNA, 2852 bp, Zea Mays
caagaccccaaccgaaaaccccagctgccccaaacccccgaatcccgttcgatacttcgatcccaatggtggcctcctccgccaatgcgccaccgggcgccggcgcacggaggccgcgcagccgcccccgcgggagcgtgcgctcgcggagcctgaggtggagcacgcctccgcgcagccccctgccgtcgtcgttgtccgcgtcgccccggcggcattgctcgctccccgcgctggacccgatcacgcccttacctgtcggcaccgaggtcgaggtccgcgtcgacgacgacggcttctacggctcatggttcgaggccaccgtcctcgacttcgcgcccgcgcgcggctaccgccaccctgcgcggtacaccgtcaagtacgtgcacctcctcgccgaggccgacgacgaaggcgtcctcgcggagcccttcgcgccgtcccacatccgcccgcggccgccgctcccgtcttcgccgccgcgcttccgcccccaccacatcgtcgaggcgttccacaacgaggggtggtggtcgggcatcgtcgtgtccgccgccggagccggggtcaccgtcgcgttccccgtcacccgtgaggtcatcgagttcccgtcgggcctcgtccgcccccgctgcgactacgttgacggtgactggatcccgtcccgggtcgcgatggttgtccgccccagccgcaccgtcagggtctacgaggtcggggacaaggtcgaggtggtgaggaaccgggacgtgtacggggactcctggtttcccgccacggtgaaggtcgtcatcgacaacctcagctacgtcgtcgagtactttgatctggaggaggaggagggcgggctggagaaggccaccgagtatctgcattggcggttcatcaggccggcttttgagcatacaccgggggagggtgagttccagctccagcctggtgatgccgtggaggcctactgtgatggggcatggtcaccgggagtcgtccatagggtcgtcagcgagggtgagtatgacatcagtattgttggcaagaaggcggaactgctggtgaccaaggtggtggaattgctcaagccgcggtataagtggaatggcaaccgatggagaattgcaactgctaagattcagttgaagggaaacaagaatttctctagggactttgttttagctttgggcgtctctagggatggcccgactactttatctccagatagactggtgtcaatagggccaaaaaggtgctcaagtacaaaggttcttgcctgtaagaaattggctaagaggagaggatccaaagaactgtgcagtccaaatagctcattggatgtgactaggactgaccagcagggaggaagaaaggaagtggcagaagcaatgaaagaatgttccttagcattggagtgtccgaaatctgatgctcaagggcagcttgacagaactttggaggatgcaaagaatataactgaattatcaaatcaggagaacctcttatccatgctgcctcctggctttaaatcagtgtctaacaggaaaggtactaacatacatgatgctcaacttggggaagaaccagcggttatgaccaacaacagccttattgaaccgaatggaaatgatgacatgtgcacagaccatgctgctactaccaagttagctgaaaactacaatgtgatggaaacagctatcatgtctattgattgtccggctcaacaaccctgtggggaagtggatgagaggtcagttttaggtcttaagaatgctgggagtacacagtgcatcatcgacagttctccatcgagtgagagcttgttgccttcaccgcaggctttgttcgtcaagagctcacctgtgtggcatatagttgaagcaatgcatgtgtttaaagagttacctcaacaaccacatttcattccactccaagaagtccccccgacactacgcgaaggaatggcattaggtatgatggtgtcattcgcggacttggtgaaggttacaatggaagcaagcataggcaacgacatggaatggtttgaggacaagatcaggacaatctcccatctagaggcaaatggatttagtgtgcaatctatacagagcgccatgaccgaaatggtcaaggtcaaaactgagcacaccagttatcattgcgaaatcggcaagctgagttcaaagttagtggagaatatggcttcctcctccagagccggtgcactgcttgatgaaaaagatgaagctgcagcacggctcgaggaagaacttgtgagtattcgccaagaaagccagaaaatcgcaaaggagaaggaaaaaatagatgcagaggtcgtgagtatcaagacagcatgtagcgggtatgaggatttgtgcagcggtgtggaacgcaagtttaaggaagtcttggctgggctgcagcggaagaggctaacctgatgcgcaaggtgttgatgtcatttcgctgcttcaaagttctaattctgaccactgtttctgcttttgggctgtaggtcatctatgtatcacggtaggttcagatcgatgtgctgtgcttagtttgtgcaagtcattcggtaccttttatatatctgtatggtgatcatgatggcttagggagcctgatgaagatcgactcttgataattgttactgctatattagttggaccgtatttatttgcctgcggcataattagtttgagggcaatttgtttccgttcttgtcaactttgattctcctgacttctatcgtctgatgttatttgatccaacttgacataggattgtcttatccgatgtctcgcttgaaacctttgtaacaccctatccctacctcaacagtaattgtgctatgtatc

SEQ ID NO: 31557 - DNA, 1373 bp, Zea Mays
ctccgccggctgctcttcttctcccctctcgctatatccccggggacctcacagccacatctctccactgctccgtccagcgcgtccacctcccaaacccctactcccccaggaagcaatggcttcccccacccagggccaggtcatcacctgcaaagcggcggtggcgtacgagccgaacaagccactcgtgatcgaggacgtgcaggtggcgccgccgcaggccggcgaggtccgcgtcaagatcctattcaccgcgctctgccacaccgaccactacacctggagcggcaaggatcctgagggtcttttcccttgcattcttggccacgaagctgccggaattgtggaaagtgtcggtgaaggagtaactgatgtgcagcctggggatcatgtcattccttgctaccaagcagaatgcaaagaatgcaagttttgcaagagcggaaagaccaacctctgtggtaaggtccggagtgccacaggcgtaggtgtcatgatgaatgatatgaagagcaggttctctgtaaatggaaagcccatttaccatttcatggggacatcaacattcagccaggagatcgccacacgaccattccagctcgtgactgggcgtgtctggaagggaaccgctttcggtggcttcaagagccggacccaggtcccatggcttgttgacaagtacatgaaaaaggaaattaaggtggacgagtacattacgcacaacatgaacctggctgacatcaacgacgccttccacctgctgcacgaaggtggctgtctgcgttgtgtgctggcaatgcagatttgaaattcctaagctaagcagtttttgttttggaactagaactcctttttgcctcgttaggcctggacccgctgtataatgctatgttgtgttggatggctgacgatggttactgctgtgttgctagcaatgtggtacttgatctgtatcacggttgcaaataagtgctgtttctaaaacactccctctcggtgaataaggggttgtttggtttgaggaatcattccatccaaaatgaggtggtgcatcatagatctattcctcaaatttgctcggatgacttcaatccttatattagtactaactaattcactatgaggaatgagatggtgatggatcaactaattccattccacaaaccaaagaaaaaagtgaggtgatgatggactagctcatctttcaaaccaaaacaccctataagtgatctgtatcatatgtggggaagatgtttactatggcagattgtgcgataacaatatggagacaatgtttggaaactgaaccatatattggtgcaaccaggcaaacaagacacaaagatgaaggtggatgaacctccatctta

SEQ ID NO: 31558 - DNA, 3537 bp, Zea Mays
ggcacagcccacccacgggagggaaggtctctccctctttctcttcgtcttcttcctcctccttttggtttccttttgattgattgatctagtagaacacagaaaggagagagaaagagaggagaggcaacacagaaacaagagaagaagaagaagaaggggagatcgagatcgatcacgcaccgggggagcagatccttcgcctcgccatcagggataaggattcatgcgaaatgccacctgaacttggaatgtcttctagaactgttgctggtgctgttgtaaataggaggcctcgccgcctgtttgggagatcatcagagaggaagaacccactcaaccttcagtttgagcgtcaagtagctcgcctcgaggcaaggcagcagcaacagagaagagaaccctgaaacatcgtcctcaccatcgattttgttcctgcaccttaatgctcaagatgtatctcacagaagatggcaggataattcatcaaggctactggaagataagcccacaacatccaatagcatgtctgattcagatttcttagtcaacagctttaccaagccgagtgataatgcaaggccatcaagaaggaagagcaaaaagaaaagcaagaaacacaggcaacgctgtaggaagccgactgatggatctgaagctaaattcagagagggcaatggtgctgcctctgcagctgatgttggtgattgtgaagattcgacactttcgcctaagcatgttggtgacatacgctttgaggaaacttctcccagttcttctgtcaaggaagcttctgaagaggctcctgagagtgatgatgatgagtaccattgctgctcaggtggttcagtttcgagtgcgtcctactgtgatgagatggaactgtccaaatcaacaacttcgtgccctgcattgtgtggacaatgtcctagcagtaacttacagtatttggacaacactcaaaattctgcaccaacaggtccatctcaagaaacttgctatgctggcagtaaagcgaactgtaaccatgataccaagtccctgtttatattcagaaatgaacgtggatctgatccttgtgaggcaacagagttttgcagctctagcagtggatttgatgagaactggatagagaagtttgactatgatagtggcatttgttcgccaaaaagtgttggtacatatggtggagaccaggctgcccacttgtgcagtgacacaactggtgacaatgatttctgtcttgtaatatctagaaagagggccagaaaggagaagaaaatgtcattgtggaagagttatggagcgcatgcatccacacctgcacttgatcgaaataaaaaatatgttggccattcttcaatgcagatgaccaacgaattcaacagtaacgactggtcccatagacaaaatcatgttagcaggatacaccctcagcatggaaatgcactgaaaagctccaccaaaaatttcatgcagaggccaagcattggttgcagggagactcaatatgggtttccagctaaagaatccaagttaggagcaagtctcaatcattctacaggtccaagagaaaaaacttgtggaaaattaactggcggttttgataagacagcacaacagctttatttggacagagacctatccaatgctcttaacagcagtgaatcaatacgttgtgagacgagatcaatttcctcttctgaaccgacaactccaaagtctttaaaaggcaattatacttcagagtctggtgaatcaacagatattacaataggagctcttcccatgcagaaaagaagattgcaggatttagttcgaactgatgatgccagtgaaactatttctgggcgatcatcaccttgttctgagtcatcgacaactgaattaattgctggacatagtacagattcatctattgaagggaaccatggctgtcaagggctctgtaactctagaacacatctagcccagatgctcagggttgtaaacgatgcctgtaaagttcaggttggtgcagatgttctccttgctgctggttatccaatttctgatcttgagaaatttatatgctctgcaactcccgttattggtcgtgcaccttgcatgataagcaacacttgttcattggaccaagtagttagtgactcagtttgtcagcatgacatctctaatgtttccttgaggagaatatgggagtggtatgaagagccagggtgctatggattggaagtaaaagctcttagcaatctcagctctaaaacatccagcagcagcagttcagagttctttgcatactttgtgccttatctatctgctattcagttgtttgggttgtctaggaataacatgcatcacagttttggtgtgcaagggagggaattactgatatcatcaaatactgcaagctctatgagctctcatcctgtgcatgcaaaagcgcatacactgcttgaggaaagtaatgcatgcttgccagagtcatctttagttgtagaagatcctggagaactcatatttgagtactttgaaacagagcaaccttctctccggcctccattatttgaaaagatcaaggagcttgttagcagtgcaaatgtttctgaccaccgggtttttggggacactgaaaaattgcaaaatgcgaaattgtgtgagcttcatccagcttcctggttctgtgttgcctggtatcctgtttatcgtgtgcctcgtgggaatttccgtgcggcatttcttacttatcattcactggggaagttggttcataaaaaatgctccatggatacgaatgacgggcatacacaagtagtttcaccagttgttggtctccagagttacaacgacaagggagagcagtggtttcagctgagatgcccagatttgaagcaattgccaatagaagattctttaaaaaccagtcctgctgaagttcataaagagaggctgaggacgctgaagatgggtgcattggccatggcaagagctgttgtcccaaagggaagtggggagtcggtgaaccaccatcctgattacgagttcttcctgtctcgttgcgcctaggctaagcggttgtgatatgaaggaagaggggcttttctgcttctagctcctgaatgtagtagtgaccatgaaaatgaaaaaaaaacccagagtagtgactaaccagagaccggctatagatacagtttatcttagagagaggagagcctggggtgatgcatatcactgactgtataggagatagactcgaatattagatactctaacctgattccggattaccaatgcaaaccaagttggtgagctgttgaagtatggcagtacccgcgggatgggtgctttattggggctgggggcaaagatgagaagataccacagatgagatgacgctgcaggtgttcatcttttgtacaaagaccacaccagaggagcagcaagaaatttgctaccagcaagaaatttgttaacacatttgcgagcaaacgcaagtgaaagcgtgcgagtaattagaggcgtgcaacctcattgcttctc

SEQ ID NO: 31559 - DNA, 1823 bp, Zea Mays
agttattgtgctgaagaagggcactagagctaaaggaggctagtgcaatcccgtttgctgctttgactgcatggcgcgctttacatgacaaagagttcttgtgattggtggaggaggagcggttggattagctgctgttcaacttgcggtggctgctgggtgtgtggtttctgctacctgtggaacacaaagtattgagcgagttatgggagttggtgctgaacaagctattgactacactgctgaggtaagtagcctttggtgctcttgtccttgtacaatcttttaaggtaataatgttgcatcttgagatattagtttgtgatgcaacagcatacacaggctatttaacattcgtttgcagttgtcgtcttgtaaaatcttgctgcagatgtaagctgtattctttgtctaccctttacagaattatataaaatgatgtattctatattagtgatcatgtgatagctgcatggtattcaatacacttcatgtgatcttcacggccttctttattgctcaagctatattattcttcatggagtagaaggggactctggcgagctctttgccactttgctctatgaagctggcagctgcttgatgctttgcattgtaattcttcatggatgcttccatttcatgacaaacctgtaatattatacttgcagatctgcaggattccacggacacttaaatctgttcccctcctcctaggtttaatgtagctattttttcttcatgtaataagatgaaaatccaatatatatgcacttgttcggggatgccacagatgctcctggaatccattagttttgtgtgctggcttgagttgcacaactatgtggagcaaacttgcaattgaagacccccaggccccaccacaccgcaaaaaaaggaaaaaagaaaatatttaacagaaggcacctaaatctttgcttattcttctggaccagaagtttgcgccagcttccactaatgaataaatggctagtatttatctttaattgcattgcatttttattccccttgcattgggtgctatcttgtttgtcttctatttataacctaccttacaggatactgaagcagcaattaaaggaaagtttgatgctgttttagacaccataggagtacctgagacagaaagaattggcatcaatgttcttaggagaggtggacactatatgacccttcagggagaagcagctgccctagcagataggtatggattggctgtagggcttcctgctgctactgctgttttactaaagaaacagatgcagtatcgttattctcatggaatagagtattggtggacatacatgagagctgacgccgaaggccttcacgagatccaaaggctatctggagctgggaaactacagatacctgtggagaagacctttcccatcagccatgtaagagaagctcatgcggccaaggagaaaaagttggctcctggcaaggtggttctggaattcgattaatgttattaagattttgtccattgggacctgaagggctgtgcgtttgcaaatcatgatagttttttttgtaaaaaaataaatctgaatctctctgccgacttcaggttccattttatcgttccgtttcagtagaaatacggtaaataatcatatcagctatggcctatgggcacgattttcctgatgaaattcttctgtcacagtgtatccatacttgcatcgagatactcgatgtttcgcggtgcatcttcaccacgcccatgctgttccacagtatcaaagcgccacagtgccacgttcaccttcgcaggcaattttagtgctccgtttatt

SEQ ID NO: 31560 - DNA, 569 bp, Zea Mays
tgtgtaaaattacattcatgccctttatatttagtattaacttaagaacaatctgttgaggactaaatagtctcttcctccttaagtcggttcctttatctgctattgagtcgaagcttccttgcgcacggcttcagcactggttcaaccttcgttctgaccctgctttccatattgtatacagcttcatcccatgtccgaaggttcctgcccatatattatgctttgggaaacattgttagtcatgtttttgaggaccttcggaagacaaaggcccccaacacgagaataatcaaaaaagtaattctgattaaccattttctttttcgacgaagagtcttcgtcgttgtcgtcccttggtgaagaagaggaagagtcgctgtcgtagtagatgatgttctttatgcgcctcttcttcttcccatcccttttcttgtgacttgagcctgagttagtgggcttttcgccttttggctcatcgacatagagggtctccttcttcttgtcgttgatcaccatcccctaacctttatgatccatctcttcgagcggttagtccctgaatgaag

SEQ ID NO: 31561 - DNA, 2452 bp, Zea Mays
gtgaacgcgacctgaccctgtttccttctctggtagtctggtctctcgcttttctgttccgcgcagcaacgacgcggttgcttctccccacggcggcatctcctgcgcggcggcgccgcccccgcgagagccgcgacggcgcactaggcgagttactggacacgggagcgatgggggacggcgccagcggccgcggcggtcgaagcggcgccgggcgccgggtgggggagtacgagctgctgcgaccgattgggtcgggagcctactcgcaggtgtggctgggacggcaccgggtgcggggcacggaggtggcggtgaaggagatcgccatggaacgtctcagcaaaaagctccgcgagagcctcctctccgaggtcgacatccttcgtcgcatccgacacgataacgtcatcgcactccacgactccgtcaaggatcatgggagtatatatctcatactggagtattgtcgaggtggtgacttacatgcataccttcaacgtcataaaagagtttctgaaaaggttgctaagcacttcatccgtcagttagcatctggtctgaaaatgcttcgcgataataacgtggttcaccgagacctaaaacctcagaacattcttcttgttgaaaataatgaaaatactctgttgaagattgccgactttggatttgcaaaatttttgcaaccctttgccctagccgaaacactttgtggttcaccactttacatggctccagaagtcatgcaaggtcagaagtatgatgcaaaggcagatctgtggagtgttggtgtcattctatatcaacttgttactggaataccaccttttaatggggacaatcagatacagttgcttaaaaatatactcaggacgcatgaaatacgattaccatctgattgtgaattgagccatgactgcatcgacttgtgcagaaagttgctgcggctcaattcagtggagcggcttacagttgaagaatttgtgcaccacccatttctttctgaacatgctccagagaggaccttgagccggacattatctgaaataagagatggctttccaataaataatatcagtccaacaaggccttcaagccaaagttcacaagaagattgtatgccttttcctttggatgatgagtcaagtggacaggatgagggtccaattcctgacagtaagagtccgatgaaatcttatgggtttcccacaggtaaaagattggataaaacttcaggccagagtccatcaaaacataccagtctgttctccaggtatgtcttgggaaataatcatgcacctagtagccaacaccatggccatactgataaaatgaccaaggaaagcaagattcatgaagtgcaaggtccaaaaggtgtttatccagaagggatctgcggatataagtgatgccatggatcagcccccatctgattatctgacgaggattagattgttagagcaatatgcatcagccatagcagggttggtcagggatgagatcaaaggtggcaggcacttggtggcgttctctattcagctaattgttcttgcaacctggaagcaagcaattcatttatgcaatacctttgtagcttcacttgcaagggagagtccctcacaggatatccatatgaaggggcttagtgctgatgcttcgcatttgcttgcgaactcaaagctagctgatgatgtctgcgtgcagatagagaaacagtttctctccgaagttgaatatgcggaagaactagccagcactgtgggacagatagctgatggtacagagatgccagatgcaatcgaaatgatatttcagtctgctttacttacaggaaggcgaggcggtgttgatgagatgtttgggaaagcagcggatgccatgactgggtatacgagggcggtatccatgctgcggtttctcctgatcgaggcaccatcacttgccctcaaccctcctttgactctgacaagatccgatcggcatcgacttcgcacatacattgaagctctcaacaccaggctctgtcagatgcagagccagaggcattgactgctgccatgtgtcctcaaatcttgttcaggttgagggacggtagacttgtgcaatattttttcatttgtaaatatatttgttggcccaagataggacatgtaagatgtcagaaatttggaactaggcagagcagcgaaaatctattataactcgaccagactactattatgatatggaattaggtggagtgtacgtgttaggttcattctgtgtgaattcaggcagaagcttgaaaacgaaatgaccaatcatggtcacttgtggaaatgtaaactacttcgtagattctttattagtactctatttcgttcttttttatttgttgtggtttagttaaaaaaatgaattagctttcgacaaatattcgagaaaggatagtatatgttatggtgtgttccaa

SEQ ID NO: 31562 - DNA, 2338 bp, Zea Mays
ccagccggtcctgcgctctcgagtcgagactccaccttccattcatttcatctgctccatctccctctctgttcgccggcgtataataagcttcccctttctgcaactgatctgatccgggctgccgtgagctctgctcgtcctgatggagttcaagagggatgtatggagcctgctcctcgtgctgctcctcgggcagctcgtcgccttctccatggccgcctcaagcttcgcctcctccctcattgctaatcttggagtcgatgccccactgacacagtctttcttagcctacctgttgctgaccttagtctatgtaccaatcgtcctgcgtcgacggcagaagctgcaacttggtactggtacctagctctggccttctttgatgtacaggggaactatcttgttgtgaaggcgtaccagtactcatacattaccagtgtgactttgttggattgctggactgttgtatgggtcgtcatgctcacctggtacgcactgggcacaagatactcactctggcagttcgtgggggcagggacctgtgtggcagggctcgcccttgtgctgctttcagatgcaaaatctcaagatgagcaagatccgaaaaaaataccacttctgggggatgcccttgttattgctgggacagttggttttgcatttagcaatgttggggaggaatactgtgtcaagaaaaaggatagagttgaagttgttgcaatgcttggtctctttgggttgctgatcagcacagcgcagatgtatcctcaaaaattcattattagttatataacctgtatagcaaactggcatgatctattggtaatcacatacattgctctatttcgcaaggttaaactcttgccacagttttcctggaacaaaaaagtagtaactgtgtaacccatattaatcttaaaaattagttaaataaactggcatgatctgtcgaatgacatctatatattgtctcccttttgtcaagttaaactaacagcacaattctttggaacaaaagttgtaactataaatatgacccaggttcttgtaatcttttaacttgatgaaccttagacttgtatttgaaaggaagggcctagaagcagttacatggtctccaacaatgataagtctgtttgcaggatttgcagtggcaattttcgtattctacacagttgctcctttcgttcttaaggttaagatctccaacatgtcaggcatgacatgagcttcacaaggaggaggcaacactagaaacttaggccctgtcaaatggttatggtttattaaaaataaacacagaataatggtgatctgtttaaataatagtggttgactaaatattatcagactttttattgtaatttcaatcagttgaataatagtttagctttttttatttttgtgctcttttgcagatgagtggagctacattgttcaacctttcactgctaacatctgacatgtgggcagtcgccattcgagttttattctatcagcaagagataaacaggttgtactacctagcattcgcagttgtggccattggattaatcatctattcgttgaatgatagatcttcagatgatgaaacagctggaagtacagaagcaccggcccaatatcagcaacttccaattgaagacaattcaacaagaattggttctagttcaggtagccaagaaaggacacataaggaagaagttcatatctgttagtgggataataatgtattaatgtacgaagacacttcattgtcaatgcatggatttttaccaaatcaaatatggcatagagatatgcagagtaaaatgctggttgcttcatgtataggaaaacgtttaattggcccaagaagctaagcaagatgaggaagagaatcagaattaattttctttacaagtcagtccagcagattattcacaagagcagacccattgctgaaggctcccgcatcagtgagatctaaggaagggataatacatcgggtcaaaatgatctttgactagggattgtgaacaatcacagctggtctgcaaagcataatagcaacagtatgaacatgtaaagggagttactagtcactaaagctctttcaagaattgtctatgaaggaaaaaaaattctagatagtgtatggatagcttacatgctttactggaatgcagaattatgatttaatgatattttctatattactcattgttaaattctatgagaagtatcatgccccgtgaattggaagctaaaaggggtaacgccccgtttggatcattggaattgaattccattctaataatagtaatttaggtatatatcaattaagctaattcgg

SEQ ID NO: 31563 - DNA, 579 bp, Zea Mays
gagagaggctcgatggcgatcaggatgccggcgctcatcttccgccgccgggcggccgccgcagctccaaagccgatacaacagtacctcgctggtctatccaccgcagtggagcacgttattccagaagataacggtcacattgccggtggggaggagaacaagaagcggtgggtggagcttcctcccttcgcaccactcgacgccaacgccaccgctcgagctatctctcggggagatggtggggaaggagcatgctccaatgccacggctatcaggtgaagaagaatctggtgactgctgatacctcttcaacagacagtattactctgcaactccggttgagaagggtttcagcaaaagatgaacttgtgcctggtgatattctctttctacctgttaacattcaagaatcttctgttaccgagaagaccaagaaatttggtaacaagaatgagattgattttctacgtgaccttgaaatctacaaggatagagccatcattgtgctcaacaaaccacctggaatgccagtacaaggtggtgttggcataaagaatagcattgatatactggccc

SEQ ID NO: 31564 - DNA, 2051 bp, Zea Mays
gtcactactgggctgggcttttgggttcctactgcttgttaggtgctgcctccgtgatccgatttgtgctcaactgattgatgctgagcattgttggtcttaatggagtttcagtagttgtttttagcgacgggcttagggggtgtttgggaacacagttttttacagtattggaacaatactgtggtatttgagaataccatggtataatatacagaaaggtgtttggaaatgtaggtaaaatctctgtatttaaaactaaagtattatcaatactgcagctgtttcaaagtattgtaaactttgctctccaccaaagttttcttctgtaaacaagcttgtgagcgtgcggtaccggcgatggcgtgggaccgagctgggttctgcggacacaatgccgaaaaggctgtcactggtgtacctatcgctcgttccaaacttccaatgctgcacggggctgtatgagtatgacagcttgggtgtacgtacgtgtacccaatggttcagctttcatatgattttagctttattagttgcaataaccaactaccgctagctttagattgtatgatatttgttatctagaaggaagacttcaatttatggaataactcaaccatgcggctgttactaaccttagggaatttagaagataattccaataggggaacagagagcctcacatggtatatactttgttcccaaacacctccatgtattcaaaattgtggtattctaaaactgtggtattgaaaactgagatcatgtcatggcatttgtatactgtggtatttgaaataccatggttttgaaaaactgtgtttccaaacacccccttagtacttgtcagtacattttacatgcttcgaattgagatgcataggaattaggagacgtgcgttttttagtaattggtacctacttgcgcctgagactctagtctaggcaccaaagtcagggaggtgtttctctgagctctgcttcaaaactgtattatctgatgtttgtctgagccacaagtcatgaattttgcctgtagtcaaggatggtgaaggtccaatcatgtgcatatcattggtttcctcttgttatgatgaccaaacttgtatctaatatattgatttgaatatgatgacctctatattgtaagtttctgaatttttgcaacacaggtcatgcatttttcctgtagtcaaggatggtgaaggtccaatcatgtgcatatcattggtttcctcttgttatgatgaagagatctggattcaatacttgatttttcatttgtttttaaatatttgttaactgttatggtgtatgtcaatggaatttgggcattggttgctttgactgtttcttggaatgcagataaactacgcctatgctcgagacaatgaaacactatttgatattattagtgtgaagatgaacctctcaattgacaagcgatgcaggataaataatttgtccacaagcatgattgcattatcctagttctttcgttgcggagatggcagcggcggcggggccgtacaaagagatgctggaagtggtgaacgcgtgcgcgacccggatccggtggcgcctcagtccagcttccaagcgccgcctcctcaacggttgcgtcctgtggtactggtcgactatggtggcacaatgcctcagctacaagaaaatctttgtggcctgctatatcttgcccgacagttcaagctctacaaggttaggtctgttcagtttggctagaaaggcatcccctacctgaacacctacgacgaccgcaccatccgctaccccgaccctctcatcaaggccaacgacaccatcaagatcgatctggagaccaacaagatcatggacttcatcaagttgtatttgccctttcatggacttcatcaagttatatacttagttaggctcaatgttagcacaaacagttgatgagcaagtttaaatttagagtacacttatgtatgagttatttgacaatgcttatttatgagatattgaatattatttatctatattatattaattatagtgttattaaatat

SEQ ID NO: 31565 - DNA, 2864 bp, Zea Mays
accaatgaaaaggaaaagggaaaaccagacggccaaggcagcccccaaccccggccccagccggcagaccatctcgatacgcggccgccgcagacgagatggccgccggggacgcaggccgcgcgccgacggcagcggccgcgcaatcgctggtggagtccttctgcggcgtgacctccgcgaccccccaggaggcggccttctatctcgagagccacaactgggccctcgaatccgccgttcgctcctactacgactccgtggacggtgaagccgacgccgtcgcggccgatccagtgcccccaccaccagctgcaccagccggaggcggggaggataccgaggatgaggattgcgtggtcggcggtggcggtggcggcgacgacgacgaggatgatgaggactacgtcgatggcgacggcagcgatgatgaggacgctgcgctcgcggctgaggccgcggaggaagaggagaggaggaggcctttcaagaggctgaagagaacccacgacgcgcggggtgggagcggtagcagtgccaaggcgcgggggaatgtgaggacgctcgccgatctcgatagtggcaagggaaccgcgggttccgacgagaactccgaagacgatgatgaatggacaccaccgcccgagtacgagacgagagatcgatcaagacgtaaaaacaacacagatgagatcttcaagcaagctaaaaagaagggggctaagcaagagcgtaatgcatcacagccaccagaagaaattacccataacatccacttctggaggaatggcttcacagtaaacgatggtccacttagaagttttgatgatccagcaaatgcaccctttttaaaggtaaagaactctgttctgtgctactgtgcttattagttatcacatttctgattttactatgcctaattttatgttaggcaccacccactttttcttcaaacatatatatatatatatagcctgttcacccttattttcaatccaggatgtagttaatgtttttgtcctgttggcatgtatcctggtactgtgcaatgtgtgtcagactttatattgaaaaatagatttcggagtaacgagtgagaagaatcaaggggtcatatggaacagtattttgtttcacttggaataagtattattacttctctgctggttttcatcataatggttgacaacggttctgtttttagactggtcccctaataattatatatgaatggtgcaggacctgtttggtaggtgtgagagggaagtttttaatagccagtagcttcaaatttcctacaagggggcagattgtttctgttaactcaatctaactcaaaattcgaaataacactttggcctaaattaatcaagttttgtgaatcaaccaattcgagcataggtcaagggatcaagatttaagcaaatgtttaatcgtatcgagttctatatacttattaagcacttacctcatatatgaaggttccaccaggtactcaaagtggagtggaaggagggccatggtattttttttccttaaaacttcttaagtagtgttgcaaactcagggcctcttggctctggactaggcacaaaagccttaaattgtagacagaaggtaaactgtagatggaaggcggatagtgtatgtttcaacattaataagatattttttggtacattgtcgtttactgtcttttattatcccattcagtctgttgttattcttagctttttcttgtttagtttgtggcactgcatgttagtttcttttccccttcatatttctttttactagagcatcaaggattctgactgcccaactgagcttgtgccggctgatgagaaatctatagtgaatgtgaatcttgtccggacggaagaagaatttactgagccagtcaagcgtgctgctccttttgaaggggaacgaagaaacctcatggaaccttctgataataatacttccaatgctgctgctgctgctgctgcttccagtagtgcaactgcttctcggacaatcacagtggacgattctttgccatcaacctccctccaaatcaggttcgcagacggcagtcgcttggttgcccgtttcaacacaagccacaggattagtgacgtgcgggcatttatcgacgcgacaaggccaggagccagtgattacacgctgcaggccgggttccccccaaagccgcttgaagacacggccaagaccatcgaggaagccggcgtggccaactcggtaatcattcagtcagtctagcttggcagaacaggtgccgcaaccctattccatcgaacacgctaggcatctgaagctaccaccttccttgatcttccttcattttgtttctcaaacctggcttttaaccttttatcttcatccagtagctacttctggtattgcgagtgtaaaacagtgaggtctgggtgtcctacatcttattcatctatagcatatatagtactacttgttgcatacagtactacttttgcttgtctccttcagcgtttggtcggttaaagtgccctcttgttcttgtctcattccctggttggtagaatgtcggcacctgtggacaaagttagttgcaccagatggtccttattgcggtttagcgatgtccggacgattgcaatctgtaaggcgagtccttgtccaggttacgcatgttcacaagttacgttggcgttctttcttggtgctgcataatgaacgggtctcgtcgatcgctagtcttttttcaatgctaaagataccattcatgttctacttttgtttgaccattacttgcgctcccattccagttgtgcgttgctatctggtgaccgcccattccgttaaagtgtggaatgtagatg

SEQ ID NO: 31566 - DNA, 1726 bp, Zea Mays
ctgcactgtactgtactgtactactagagagagacgcctccgccgctggaatcaggcgatgggagacgcggacgcctacgcgaagcgggtgctactcaccgcagctggcgacaccgtctcgcgggggatcgcctctaccctcaccaagcacggctgcagattggtcttgttgggcgacgagggcgcgctggccgcgacggaggaggaggcgcggcgttgcggggtagggggcggatgcgtcgaattggtcgggctggacttcaaggcgtgcggtgaggctgctgccgacgcggcggtggatcgggcctggcgctgcttcgccggactggatgccttcgtcaactgctactcctacgagggggaggtgcaagattgcctcagtataagtgaagacgagtacatgaagaccatcaaagtaaatgtgataacaccttggtttctaatgaaggcgatcgcaaagcggttccaggatacaaaatctggtggatctattgtgttcttgactcagattattggtgctgagagaggattgtatccaggcgctgcagcatatggcacaagcttgggagccatccaccagttggtccgtctgtgtgcgatggagcttgggaaacacaagataagggttaacgccgcctgccgcggcctgcatctgcaagacaagttccccgtgtccgtgggcaaggagaaggcggagaaggcaacggcggaggtgatgcccctgcggagatggctggatccggagaaggacctggcgtcgacggtgctgtaccttgtcggcgacgagtcccggtacatgacgggcacaacaatattcgtggacggtgctcagtccatcgtgcggccgcgcttgcgatccttcatgtagcctagcctagggttaaatgcatcggctgtccctgaacttcaaaaatgtgtttctagtccttaaattgatatttatatataaaaaatagtgtatggtaggtctatttctggaccatatcgatcactgttctcacgtggaagaagccctgcccgtacttatagctatgaaattctaactatctgttactagtatatatataacctttaatttgttgatgatggaatcaaaagaatggatcttttactaccaaggaggcgagaggccggctgagaaagaatggatatcagtggatgcagatgcccggtagcttccactggaactttcccgcgcgtcgctcctcgggtgtgccggcggtgtagttcctccagacgtcgaggaccccgcggaggtcgtggagcttggcgccgaggccgacgcagcagttggcgtggagcgtgcagatcctgttgaggtccttgctgagctggcagaagccgctgatgtaggctgtgtcgaggaactggatggcgaggtccagcctgggcgcctcctcgtgcttgatgaggttgaacacgtcctgctcgtgcttccccaggaagcgccaccgcccctgctgccacgcccggtagaaggcgacggtcttgtccgacgcccgcacgaagaggaagccgccgttggggaagttgcgcaggctgtaggggtcgcccatgtacacgtcgctggagatggcgatgtcggccgccatggagatgtggcggaacgggtcgcggaaccacatcacgtcaacgtcctgcgcgcggccggcacagtcgatagatgttgctaattaaggctgctgctggtgctggatgcacgacgacgacgactgaatgaatgaat

SEQ ID NO: 31567 - DNA, 864 bp, Zea Mays
gcggtgtcatggacagggttgtttcccagttacttgtggagatcgatgggttgagtgacaacagccaggcctgaccttcttgattctgcccttcttcgccctggtcggtttgacaagcttctttatgtcggtgtaaatactgaggcatcatacagggaaaggatccttaaagcacagacgcgcaagtataagctgcacaagaacgtttctctcttgtcagttgcgcagcgttgtccaccaaacttcactggtgctgatatttacgcgctgtgtgcggatgcatggtttcatgcagcaaagcgatcagttgaaacattcgaaaccgatccttcaagaagtaatgacgccagtgccgaagaagtcattgtcgagatcgacgattttatcacatgccagcagcgatgcctccttgttcgtgctcggcaagtcggccggtgtgagcaaaatccgtacgtcatcgtctccagtggtgccattctccgtggctctgcacacggtcggggactcggcggccttgctggatcatttgtgccgccaaacgggtttacctgctccgcctccgcccagccagcgccgccgccgctgccgctagcgctcccctcagattctagaaatcgtcgtgtcctgatcctggatctaattgttttatcggaaatgattgcttcagtgaagtccttcccgagggatgacccaaagaagccctgtcacctcaccgccttccttggctacaaggctggaatgacacacattgtggtgaggtcgagaagcctggctccaagctccacaagaaggaaacttgtgaggctgtgactatcattgagactcctccccttgtcattgtcggacttgtggaatgtgaagacc

SEQ ID NO: 31568 - DNA, 2062 bp, Zea Mays
attccacctgtacggctgtaccccaccgccaccacccacggcacgctgcgcgcccaagcaaaccagggagcgcggccgaccgaccagccagacctgcgcaatcgaaaccgatcgactcccctattattggtccccatccccatggggcggcggctgagcgcgaccgccgccgccgcggcggcgtcggcggagccgctcctcccgccggcgctgaagcgcggggtgctgatcgagcggtgcgcgtcgcacgccgacgacgagctgcagtggttccgctcctgcctgcggtgggtgtgcatggaccactcgggcccgggccaggccgcgctgtcctggctcctcttcctcgtcctcgccgccatcgtcccggccgccgcgcacttcctcctcgccttccgcgcctcgcgccgccccttctcggccgtcgtgcagctctcgctctcggccgcctccgccgcgggcttcctctgcctctcctcctccttccgccgcgtcggcctccgccgcctgctccacctcgacaagctccgcagcaagagcgaccgcgtccgggccagctacacggcgcgcctcgccttctccttccgcctcctcgcctccctcgtcgcgccgtgcttcgccgccgaggccgcctacaaggcctggtggtacgccacctccgccgaccgcgtccccttcttcgccaacgacgtcctcagcgacgtcctcgtctgctccctcgagatggcctcctggatgtaccgcagcgccatctacctcctcacctgcgtcctcttccgcctcatctgccacctccaggggctcaggctcgaggacttcgccggctccctgctcgaggaagtcgaggagggccgggccggcgtcgatgccgtgctaagagagcacctcgacattcgcaagcagctcaaggtcatcagccatcgcttccgtaagttcatcgtcgctgcgctgctcatcgccacggccagccagttcgcctccgtgctcctcaccacgcgacgcgactctgtcgacgacctcctcaacaccggcgagctcgcgtactccagttagaagcattttggacatgccatggtcgaagagtaggattcctggtactcgcatccttgcacactcgacaaaggttccagcctgtagtactgaaagacccattccagtttcagagtcagactgcgatcatgctgtgttcagttgtgctcatgtccgggctcatcataatcctgagcagcgccgccaagatcacccaccaggcgcaggccctcaccggtcacaccaccaagtggcatgcctgctgcaccatcgagcccgtgctggaggaaggggagcccgggtccaaccagaactccatgatcgaccaagaacccgagagtgacagtgacacagaggacagcgaggagaccggcgacgaagatctcctggagaacaccaagattcatatgccgcacgcgcatgtcatctccttccagaagagacaggcactagtgacatacttggaaaacaacagagccgggatcaccgtgttcggtttcacgctggaccgttcgtacctgcacacgatatttatgctcgagtggactctgttcctgtggctgctcggtaagaccatcggcttctcgtgaagaagacggcgatgaaaagaagagaggtggcctgtgtccaacgtccggatggtcgtttttgagaggtttcgcatgtcgcggttgccctttttggggatggatttggatgtgctttgtttttcggtcatcgtggaagggctttttttcgcgtgagcctggctgttggcacgggagcgttgcgcgtgtacacctcaacgcctgtgtatgatagcgattttgtatgatgtgtgtgtataaattgtgaaccgtaattgtccttgtaaatgagcgttgtacagtcgtacactggtaatgctgttttttacaatctcgttgtaagccaacatgttgtagcgagaatttagattgtaaagataaagattcttgtttttttaaatcttgggagggtatgaaattagttcaagatttgctagtttcttatgtttctcttttctcttttatag

SEQ ID NO: 31569 - DNA, 2736 bp, Zea Mays
ggtgtaattttttattattctaatttttattataatttctatcatgcgtgtatatgttctaataaatagaaaagtgtgaacatgtggcagagtctaagtaatgccttgtacgctatgtcgtggacctatgattgaattagagaaataaagtccaaccctagaaaactctcgcatcgtcactccaaatcagccgctagggctgcattcatccacctcgtgcttatcgcctactccaacgccgactcctgctcgtcggtcgtcgcctcgtccagctctctccgcccctccagcctagcctagcccctcctgctcactgcgtcgtctccagaatccggcctacgaccgttggcggctggtgcccccaccggcaatcggtggtcatggtctgtccctgctcactccattcagatccgctatgcgcgaggcgcaactggatctatcgtattcctggttgctctctccctctccgcgggcgatgcgcctctctaggttctaccggcgtccgtccaaccggtgttcagcgtgccttcgcaggcccccttctctgccttcgatgagtgcatttggtgagtggtgacacaactgggcggagtggtgaactagtgattgatgcgcttgccggcgacttgcaaactaagtcagaatcggcttctcatcttcctatccctttgtgtgatactactactctgtatgtggaaaaaataattattccctggtttaatattatttgttcttaagtctgaaaattcactcatatagttcatttgtgcagtgttttttagtccttagctattagagaatgatgcctggtaatacctgaatcggccactgcattttattatcctgttgttattaaatttggctattagataatgccagcgttttttattatcctgaatcggccactgcattttttagtccttagctattagagaatgatgtctgaaaattcactcgtatagataaggaacgttgtctagcaacaagagagatcatgtcacaaaaaatcctcaagctaaaacaagaacatgttacactatattttattatcctgttgttattaaatttggctcggggcttcggtaatacctgaatcggccactgcatagagtagtaaacctaaaaaaaatcagactcttattgttatataatttccatggtttcttcctctatgaataggagagaaaaattgatcctagattgcagtctactaagatgcatgcaatgcgttatctccttatacagttactgttacaagttcttctccatccagatcagtattgggaggctgcacttgatgtgactatatgttggaagaaatcctttcttgtcattgctcgaggttgttaaagaagagcagatgtgctattttggttggtctaaaatcaggggtggaccaacagggggtccaggggggccacggcacaccctaggccagcccagcaaggaccccacccctttgtcgcccagccgctagcacgtagctaccacgactagtgcccaggtcaccaccgccatgcctagcgccaagccaccactcacccgcacccaacaccaagtcgccgcaatcctagtgcccattgtacatgtgaacatataaagctaccatgatcatggaggtagcaggtgcagagacacccatcaaggtttcttcgtctctagtcatttgttacgcaaattcaaatacaggtaaaagtagcattgtataaggtgcagattgatttgtacagatgaggttgcttctgaaaattgacaggaaaattccttggtatacttgtatgcaggcttttggaaagttgaggcctatttgtgcacaatagtatactaaccattgaagattattactctcatctattgcaggtacattattctgaaactcagttcatgaaatggaatgagttcagtttcaatatagcagaatagcatgctagcagcaaacatgcacgtgcccagacttcattcagtaacatgtggtggtgacatggcacaacaagaacttgaagaagtagacatgttgctgctgcctgcagggtgacgtctatggtgttgtgctgcgggcaaggcccacacaatgtgatcgggctgcacgccaatgttcaacatgtgccccaaccagaatgtgtatgctactactaatataacattcgtcattggttggttcaccccaagaggtttgctgcatgttcatggagctggtggataataaattttagttgttctttttgtggtttattagatgacatcaattagtgttcaattgagccttagagtaggatgaatacaactgtcttaagtttctttgttccagcagattgtttgggggcaaggttacctatgaacttcaagaattggtcttatgatattgttagtttgtacaacttagtgttaggttgctcgacttcttcatgaatgaggtgttagacattggtcgatcatgcagggttgaaggtgcttcatataactaaatctaccatgactttctaggaaaagatggaatggaactcaatttttggtggccgtacaagtgtggaaacttgaattcatatatacttacaatcaacattagcgcaaacagttgaccaagtttttcaattagtattttagtttgaatttagtgtgcaataatgtatgagttatttaacaatgcttattcatgacatattgaatgatacttatatttattatatcaattatgatgttattaaatatatgtgtgcatgtatatttctctttaaa

SEQ ID NO: 31570 - DNA, 850 bp, Zea Mays
ctgtgttcttccacgtccgccgttgtttacgcgcgcacgcaatctcaaaaggaaactgccatcgtcaaaaggcaagagtggcttacacgcgataaggtaataaaaaaaaactgggccatccgttgacgcggagaccggtgtttgctgccgccgtgcaggcgcaggcgcaggcgcaggcgacaggcagacacagatgggctccggcgcacagcctcacatgacacatgtggcggtttgtagtttgttttgtggaatcatgaacagtggccgcatcgcgaatggccgactgcctgcaccagcaagcactgcaccaccactgcatgtggatgcccaaaaactttgacccgtctccaaccatgccacgggctaggacgccccaggattatattattcgttccttggctgctgctacaagaccgcatcgtatcggcgcgtcgtctcctgggcctagggcccacaggccacagtgccgctcaggtcaaagaaaagcgcgcgcaggaatccagaggatggcatggcaacaacaatatggcatgcacgcacgcgcgcacggacggacgagggacgactccagtcgaggcatacctcgagctgtcgagcacggagcaccaccggccggagcggagcggagcggaccgccggagaagacgcgcgaacggggatcatgatgagcagtggtggcgaggacgctgcatgtgccgcacctccgcggtaggcggcggcggcggcggcgtgagcagccatggaacggcgtccgcgtccaacctgtttgcacaaatgtacaataagcacgtatcgctgtgcagacaggaaagtagaaaccaacacaactgactgcgtttgctcgaat

SEQ ID NO: 31571 - DNA, 2966 bp, Zea Mays
gaggaagagcactgccagtgctaggggcagtcggcaggcgcggcgcgttcccctcagtccccttccccggctggtcttgccgggagtaaggggaacgaagccaccggcgcggcatggagcccaagccgtcttcggcggcgcatgctgacgcgccagcggtcgaggccccccgccgccgtggcggcggcggcaagcgcaagtcggccgggtcctcgttcacgccgtcgaagcgtcaggccaaggagcggaacgcttccttccacgtgcccccgcatcttctgcacagcgggccgctcacccgcgccgcgcgccagtcgccgcacaagctctcgggcacgccgtcggagtcggtgccagcgtcgtcggcggccgcaactggggacggggtgagcggcgggcaggcggtggttgatgcgatccggcccgagacagaggaaacgccggccccggagctgccgctggtagacgagatgttcgaggccgtccgatcccgtggcgctggcgtccatgtggtccctacctttgctggatggttttcgtggaaagaaatccacccagttgagaagcagaccttgccttctttttttaatggaaaatctgagaagcggacacctgaggtatatttggcggttagaaattcgatcatgatgaaatttcatgccaatcctcaattgcagctggagtccaaagacctggctgagttgtcaatcggggagaccgatgctcggcaggaaatcttggaattcttggatcactggggcttgataaatttccaccctttcccaccagatggacatgaggagagtaagccagaggagacccaagacaattctaatgacgagaaagcttctttgatcgagcaactgtttaagtttgaatcagttcaatcatatatgacgcctttaccaatgaaagaagatgcagattttgacctctgttgtgattgctataatgaagggaaatttgatccaggcatggccaaaaccgatttcatcctcatggattctgcaggagtttcaggtgctagtggtactagttggacagatgaggaaacattacttctattagaaggtttggaaatttttggtggaaaatgggctgagattgctgaacatgttgctactaagacaaaagcacaatgcatgttgcactttcttcaaatgcaaattgaagaccgcttccatgatggcaaagatattaatcaaaacatcccagtaagtacagatcaagccacaactgagaaagccattgctgaaacatctgagaaaatggaagttgaagataaagtggaaggaagaggtactgtggatgaaaaggcctcagagaaaacagagggaaactgtgaagaaacaaaaactgaaaatgccagtgttgttgtaaataaagatactcagaattcagatggcagagattcaggtgcatctccaagcactgaagagccaaagcaatcttctgatgagcaacctgtagtaaaggaaaattctgcagatgtagatacttctggtgaaaaactatcaaatgttgctattgatatcttaaaatctgcatttgaggctactggtcacagcccagaatatgaaggttcatttgcggatgcaggaaatccagttatggcactagcagcgtatttagctggtcttgtggaagatgataacaccaccacttcattccgtagttcactaaaatctgtatctgatgtgtctcctgcactccaattatcaagtaggcactgttttattcttgaggatccgccagatgaactcaaagacatttgtgctagtgtaagtaagaaaaatagagatggtgatcaaaaacaagatgaggatatgattcaaaattcaattgataccgagaaaaaagagatcaatgagaaagaaggtaagtctttatctgtggaaaagaaaaacaattcatccatgtcacaaaatgaccaccaagaatcaggcattaagagcgtctcaagtgatgattgctccttagtggagccaaaaaccaataatgctaaggagtcaggtgattcaactgctattggggacaagagtgcaaccgaaactacaaaaggtaatactgaacaagtgaatgacttgccaagtgttgaggtggaggctcctgatgattcatcttcaaaaggtaaggatgagctcaataagactaaagatgcagtggcgacaccagctaccgtacaggaacagaaacacagccaaacattgggaaatggggatagggaagaacctaacaacattgaaagtgtagttgtcggtgaagagaagggctctgtagtgactgccaaccgacctgattccatagctaggctcaaaagagcagcagctactgctgtttcagcagctgctgtgaaagctaggtttctcggtgatcaggaggaatatcaaattcgaaggctgacagcacttgtaatcgaaaagctgttccaaaaaatagaagtgaagatgtcattgttttcagagattgagcaggtggtctttcgaacgagagagtacaccgagaagaccagaaagaagctcctgaaggaacgaaatgcgattattgcagctcggatgggcgcattgccgtctaggccaaaccagacaggtgtagccggaaacaggttaccacctgggtatggcaaccctcctgtaaggcctccaaacgcaatgcctcggcccaccagctgaggaaattccggattccggacacccagtgatctataccccattcttttagaagcataccccaaagactcaaacctgccagcttgttgtagcattttttagaaagtacattgtacaattgtctgtataactgcttctatgaaaattcaccaaacctccacaactgttttaaacattccatcagataggaaaattccatttctctacaatgaacagcccacttgaccgttagcaagattatttctgctcaatttactaaaatagaatgctatatatctgctcaaagtttacttgcct

SEQ ID NO: 31572 - DNA, 216 bp, Zea Mays
tatgctgattatgtttaccaatctttaatattggatctgtcaaatatttttctaagtcacttgtgtcaatagaatcatcatgaccttgtccattaaatatgtagctatcaagctcttcatcgatacttgacttaatcatgtcacccgctgaagttgagtaaggtgcaacagatgatgttgagggtgtagtagaggcatagcattgatacatctttt

SEQ ID NO: 31573 - DNA, 2486 bp, Zea Mays
tgcagtcctagagtagtcaaacaggacggacgcacaggcgtcggcgcggcgcggcgcgtgagctcttttgcttgccgcggctgctcgccacgccacgcttcagaagatcacacggtgacggcgggcggacgcgctcccccaatttccctcccattttctactccctcccctttccttccttcaccggcatcggcataggcgtctctccctgatctacctggagtctctctcctcgtactccagcgccgcctgcccctccgaccaccgctgcggcagcgcaccgacttcccgcctgaaccccagatctcacccgcgccatacacgccgccagccccagcccagatctacggcgcgcccgccatggacgccggcgccggggccacggccatccgagtgccctaccgccacctccgcgacgccgagatggagctcgtcagcctcaacggcggcgctcccggaggggacacgggcccgcccccgccaccgcccaaggaccagccgcggagccgcgccgacaggaccaagctcgtgctcgcctgcatggtcgccgcgggcgtccagttcggatgggcgctgcagctctccctccttacgccatacatccagaccctaggaatagaccatgccatggcatcatttatttggctgtgtgggcctataactggttttgtggttcaaccttgtgttggtgtttggagtgataagtgccgttcaaagtatgggaggagaagaccatttattttggctggatgcataatgatatgtgctgctgtaactctaatcgggttttctgcagacctcggttacatcttaggggacaccactgagcactgcagaacatataaaggttcaaggtttcgagctgctattgttttcattctaggattctggatgttggacctggcaaacaatacagtgcaaggtcctgcgcgtgctcttctagctgatctttcaggtcctgatcagtgcaattctgcaaatgcaatattctgctcatggatggctgttgggaatattcttggtttttcagctggagcgagtggggaatggcacaagtggtttccatttctaacgacaagagcatgctgtgaagcttgcggtaatttgaaagcagctttcttagttgcagttgtatttcttttgttatgtatgtctgttaccctgtacttcgctgaagagagcccactagatccaaaagatacacaaggactatcagattctgctcctctgctgaacggttctagagatgctgcccatgcatcaaatgaaccaaataatgaaagatttcctaatggccatgtgggtttaaacaatgtgtcggctaacaacaacactgaggaatttacaaatgtgaattccaacacagagaaaggaggagtcttcaatgatgggccaggagcagttttggttaacattttgaccagaatgaggcatctacctcctgggatgcattcagtgcttctagttatggccctaacatggttgtcatggtttccctttttcctttttgacactgactggatgggacgcgaagtttaccatggggatccaaatggagatttgagtgagaggaaagcttatgacaatggtgtccgagaaggttgtccttggcgttggttcattccttgttgatccactatgccggatgattggtgcaagattagtttgggccattagcaacttcacggtgtttatttgcatgatggctacaacgatattaagttggatctcttctgatctgtactcaagcaaacttcatcacatcatcggggcaaataaaacagtcaagatcacggcattggttgttttctctcttctcggattgccactctccatcacttacagcgttccgttttctgtgactgctgagctgactgccggtacaggaggtggacaaggtttggccacaggagtcctaaatcttgctatcgtggttccccagatagtagtgtcgcttggagcaggtccatgggacgctctgtatggaggagggaataccccggcgttcgtcttggcttcggtcttctccctggcagcaggtgtgctcgcagttctcaagctgccaaagctgtccaactcgtaccaatctgccgggttccatggatttggctgatgctcatgcccaaaacacccccgtctgccatgtaaaacatcacaccaacacttggccccattttgccattcgtttacagagaaatgattcttttttcctcgtacaactacagaataatgacagtgaaagtaggagtttaggtgagagagagagagaggctaggtaggttgatgtgaaggtgtaaaagctgtatcctcctttttttgtttttgtttttgtttttgacagtgtatgtaagagctgtccacaagaaaatttacaagtggtgtaacctgccctcgtttgtacattgtactactactacatgacaatcatatgtcctttgtctttatccaaggttgaagacgtaaactgaggccatctatttatcttg

SEQ ID NO: 31574 - DNA, 2454 bp, Zea Mays
tgcatacatatatatcgagatggtggactcagttcgtagtaaaccgacctgggtacaaccggccatgaacctgccaaacttaagtcggtctatacattactattgttgctgagctaactaacctgacactggccggtataggacaaaactgttgcagtctgttgactacagctgctactgacctggtcagcagcaggccaaaacaaaattggttgctactactagctgcagacatgaaacttactaaggaacgtctgcttgacaggcgtgcaagaagcttcttaatggcaatgatgtgcgaaaggtctctagctgagttggttaggtggtataagtagcattcatcaggtcttgagtttgactccctgtaggagcccacaggtcgattttttttaatggcattgatgtgtgttgttgtggtggtgggtgggttgggggttctttctcccgcagagcacaggtccaggttttttaggattgcagtacataatttgcacgtcaaaatttatgtgcagtagattattttcaagggatgtgctggattattttaaatgcagtgtgctatataatttatccaaagatgctaatttgcttatgttattttttctgtattttacatgtacctgttccttttattctcttggaagcaaggagtgtcatcacaacaaacaactgaaggtactggtgtttttggtcgattcagattcttgaaccaaagagtttcatctcagagtgaagattcattatcatgtcatagaattgatctcagaacttcaacaattaagattgatgcagatgaaaatgatttaagattttgcttcagaataatctcacctgttaaggcatacacattacaggcagaatcaggggctgatcaaaaggactggatccagaaaattactggagttatcgcatcgctactaaattcaccattcccacagcagttgtcatatggtaatgtagcagcagagagtaacagatccacaagttctgttgattctttgtctattgaagataacaagagttcagagggacatgatgatatattcaaccttctgaggaatatccctggaaatgacagttgtgcagaatgtcgttcccctgatcctgattgggcatctctaaacttgggtattctgatttgcattgagtgctctggggctcataggaatcttggagtgcacatttcaaaggttcgatccttgagactagatgtgaaagtctgggagccagtaattatggatctcttccatgcactaggaaatgattacgctaattccatttgggaagccctgcttccaaaagaagatcaaggaatgaacgactcaaatggagctattctttttattgaaaagcctaaacctagtgatgctttctcaataaaggagaggtacatacaaacgaagagatcccgatcagaataccattaatattttggaagccataaggaaaaatgatgtgagagcagcatatcgaattcttgcaatagctgaagtcagtgctaacatgacatatgatgctttgagcaaagatgtccatcatgttcagccagtgacagacaagatgttacttgatccgatttcttgtgagataattcaggactctggaaaaccagaaggctgtctacaaggatttccatggccgaacaccattgcatcattgtgtccaaaagaaaaatgatgagctcaccaagcatctgctgaagaggggtgcgagaacgacaattaaagatggcggaggtctgactgctctggagagaagaatggaacttggagcgataactgatgaagacttattcatactatttgtgaggtgatgttgcaaacttgcaatacaggcctttggcaactagctgtttgtacctgatagcattgtattgtacccacctaatttagcttctggaaagaacatgatttctacacctgaagacaaatgccttttactgtaccacgatataacttatgggactgctgcgcttggctgtgttttaaaattccactggtcgacatgaccacatcgttggtttgtacaacaattataggcaatcacagtattcgattctttgagtatggttattgaggtatgagtttctgatgtcaagcacgtaaggaaagaacacacgataatcgtgcatgcatattaccgttgggcaattttctttttttattgcaattttacaactgtactgcatatggtcgacctgtaacaattattgaatttatgggtacgtgtatcctgcaagatatgaatcaacttgtaacagcatctaagtatcgcttcaataaaaaagtgcaaatgcagcatagttttcccgtgaatttgttattcagtatactagcgtggcaaactgattaaggatgctaattcaggctctagggtacctagagatcaagcattgacatgatcggtacgtacataaggagtttgcaagccacatggtctacctaaataagc

SEQ ID NO: 31575 - DNA, 2388 bp, Zea Mays
ccaaaagtgttttttccctcaaacatcgtttctttaggcatatgtgtatgtctgcaaaggtacctgctgtcgtgagattggcaaaagaagccttagcagaagaaaaatgtgtggtgattggtcttcagagcactggagaagctcgaacagaggaagctgttgctaaatatggcattgaattggaagatttcgtttctggtcctagagagcttcttcttaagctggtagaagataattatcctttgcctccaaagcctgattgttttgagcaaggtgaagaaaaagtccaggagtttcagcacaagcggcattatggatctgacatgtccttaaaaggacgagttagtaaacttggaaaaaaggaagacgtgagtgaagatgggggtgatgagtatcctccacattcagatcatgaatcaacagaatctgatgaggacttctatatgtgtcagatttgcaacactgaagaggagaaaaactcattgttttgttgctgtatttgtgcttcacgggttcaccctggttgcctcactccaccttcgactgacatcgtgaatgatgattggtcatgttatggttgcaaggagaaagtaaaaagctacttaaaagaaagagatgcttacttgactgaactctcaaagaggtatgatgctgcattggacagaaagtcaaaaattcttgacataatccgttccttggatttacctagtaatcctttagatgatatcatcgatcagcttggtggtcctgacaatgttgcagaaataactggacgacgtggtatgctaataagagcatcagatggaaaaggtgttatttaccaggcgcgaaacacgaaagaagttgcattggacatgatcaatatgcatgaaaagcagcaattcatggatggagaaaagaatgttgccataatatcagaagcaggatcagctggcgtttctctacatgctgatcgaagggcaaaaaatcagaggagaagagtgcacataacactagagcttccttggagtgcagaccgtgcgattcagcagtttgggagaacccatcgttctaatcaaacttctgcacctgaatataggcttcttttcacaaaccttggtggtgaaaagcgatttgcatcaatcgtggcaaagagactggagtctcttggagctttaacgcaaggagatcgaagggctggaccatcacttagcgccttcaactatgacagtaattatggaaagaaagccctgacaatgatgtacagaggaataatggaacaggatgcctttcctgttgtgcctttcgaatgctctgagaatcaagctacccttgaagagttcatcactaaagcaaaagctgctttagtgtcagttggaattattagggaccctataatgtattatttgaccttttcacaagcatacttgatatagtcattcagaatgcacgaattgaaggacaacttgattctggtattgttgatatcaaagctaaaagtgtcgaaatgaaagaatcaccaaagactgttcatgttgatactgtgtccggtgctagtacaatattatatacttttacagttgaccgtggagtttcttgggaggtaactttcatattgaagccattatctgtttctcctaagaacttgtgtgacatgaaatgtatttatatttcagttttgttctacattacctttttttctcgaaacgcaggagagctgtgcatcatattataaaagaggaaaattaggggaaaagaatcccttacaattgtagaacatgaaggtgcttgatatatttgatagatggggtacaatatatagactcacaaccctaaccctaatgggccggcagcccaacagtggtgccggcccacgcacacacacacaatctaacatctccccgcagtcgcaacgggggcaccacacatgatgagactagagtagaagcagaaggtaggagccaacgggttgaaatccccttgtagtcacaacgtcgtaagggtgcgaatgttgcggctggagtagagaccggtgtgtgctccaaggagacgatagcccgtagatgccaaggtagttgaagtcgaggtggccgcagtcgggagacacgtagcatgagcctgttcgttgggaggggtcgacgttcgagcgtcaacgaatggtgagggcgacacaacaaaagagcaccagcaacctcagagccttcttacttcgttccacgatcgatcgtcgaggagcctcgccagggaggccggcgacagcgcacgcatctgcgccagtcagggtgggtcgcgcccgcggcagaaaagaaggggtatcggcggatccggtcggaaaagccacgacagcgatggatccagccatgaagacgacgatctagacaaagggatggcggatctagtcgggagggc

SEQ ID NO: 31576 - DNA, 2363 bp, Zea Mays
agtccgagaagaaaaaggaaactgaagaagagacctcgtcgtctcgtgcagccgcaagcacgaggctgtgagcgagacagccaaggtgctcatcgactccagccagccgcccaaagccagccgcccaaaaagccaggcgcaaatcacaacctcgcctcctgtcccctccccggctcctcgttcccctctcgccgctcgcctccccgccgagatcgaggaggcgccaatagcgagagggtttcctcttccctccacggctccaacgagcccccggcccctccgcctcaaatcccacgcgcccggttggccgccgcccccgccatggatgtggatctgtggatctccaaggtcaaggagggccagcacctcgccgagcacgagcttcagtcgctctgcgaatacgtgaaggagatcctcatcgaagagtcgaacgttcaaccggtgaatagccctgtgacggtttgcggtgacatccatgggcagttccatgacctgatgaagctcttcgcgacggggggccacgtcccagagacgaactatattttcatgggtgattttgtggaccgtggcttcaacagtctggaggttttcaccatcctgttgctactaaaagcgaggtatcctgcacacataacccttctgcgtggaaatcatgaaagtaggcagttgacacaggtgtatggtttctatgatgagtgtcagaggaagtatggcaacgccaatgcatggcggtattgcactgatgtttttgattaccttacgctatcagcaatcattaatggtcaagtcctctgtgttcatggcggtctttctcctgatgtacgtactattgatcagatacgaacaattgatcgcaattgtgaaattccccatgaaggtcctttctgcgaccttatgtggagtgaccctgaggagatagagacatgggctgttagtccccgtggagcaggttggctgtttggatcgcgcgtcacagcagagttcaactttgttaacggtatcgagctagtttgccgggctcaccagctggtccaggaaggcttaaagtacatgttccaggagaagggccttgtcactgtgtggtctgcacctaattattgctacagatgtggcaatgtcgcttctatcttaagcttcgatgagaagatggtatgtcagttcttttgtcttcaaggatctgctagaagcattacacacacctgattacttttgacttttgagtcaatttatacaataagtttatctcaatcctcagtaggttttagtgtgcatttttacaagcaacttttgtacggttaattgtttctgatgtgcaaccaaaagatatattatgcaaccagtgtttctggctaatatttttgtgtatttacattagtgtagattttataaaaattaatgctatggtacagctaagtggggtcaccagctgctgtcttttgccataatacatcaagtttgtgctggacatttttcatgtactttcggttcgaaataggttggcttgtcttttctagatacatagcaaaaactgtgtaccaaaaaaaaacgcccaattatttgaaatggactacttgctagtgacatgcagaggttggacctgaaacgagcaatgaaggtatgtagggagagggtttcagtttgactgttcatgaaataaacgaatttatgtataagtgcatcaaccatacttagggcttgttcagttaatccccaaaccgagaggattggatcccctgcaacaagtcaaaactcccctccagcccccttgacttggagttcaactgaacaaggccttattggggaaacaaaaaccatttgagatttagtagttaatcagcattatgcttattgtatctttgctccttctatggtagcaaacggccaacaagttttgtcccactgctttctcaagttgcctactaatgtttcatgagatatatgacttgatgccgacttacaatatgttttgcactgttaccaggaaagggatgtcaagttcttcacagagacagaggagaacaaccagatgcgaggcccaaggaccgcagtcccatatttcctatgacttcaattgtacaattttagaagtctattcgaatctgtaagggctaaagatcaatcagatgtgtttattgttttaggtccagattatagtgcaatctgatgcgtttgatttctgttttcctttaaccacatgtacaatagaccatcgggacagtcatatgttcctgtatctcttcggtgacactgccaaagttttgtttgtgattttgttcccgtgctatccattttggactgtgcttgcgttgtgcagcagaagagtcaggctggttatatcttttatctcatttgagattgttcat

SEQ ID NO: 31577 - DNA, 2297 bp, Zea Mays
ccgccgaggaacgattcccttcgcacaatcgtactgttcccctcaaaccccagccagccatggcgatcgcggcggattctgccgccgatcaagacccaaaccctatacccaacgaggccgcgggcgaatccgtcgagctacccgcgtacactgaccacggggaacccaatgcggatcttgctgacgtggactacgaggatgaagaggagctggacggggtgacggcggaagcggcggcgagagacaaggtggaggcagtgttccagcggctgtcggaagcccccgttggcatccgcgtccacgacattatcatcaaaggcaacaccaagacccgcgacgcgctcatcgaggcggaggtcgtggggctcatccgctccgccgtcaccgtgcaggacctggtgcgcaccgccaacatcgccgccgtgcggctcaggctcctcgacgtgtttgactccgtccacgtcctcctggatgctggccctcccgagctgcctggcaccactaacgttataatccaagtcgtcgaggctgctaaccccatcgatggaagcgtcggctgcttctccaagccggaggcaaggtcatggacagttgaaggatcagtcagatggaggaacatatttggttatggtgacatctgggatgcttcgggagcatatgggtgggaccagtcatcagagataagcattggagtatccttaccaagatttagatcgataccaaccccctcgactgctcgggcatcactcttgtctcatgactggctgaaattttcatcatacaaggaacgtctgcttggcctatcctttggtttgctttcggacatgcaccatgatttatcttacaatctgacttggcgtaccttgactgatccttcacaagcggcatcaaaatccataacaagacagttaggacataaccttctttctgcattaagatatacatatacaatagatcaaagggattcccatctcaggccaaccaaaggatatgcatttgtctcaacttcccaagttagtggtctatggggcagcaaaggattgagattcttccgccagtttgatattcgcggggctgttccattgggcttttacaatgctgccctaaatgctggcatctcagcaggggtgattttaccgttggggagggggtttatggaatcaccttcatctgtacctgatagatttttcctgggagggcattcttctccagtaatcagtctttgtagtttaacttccctactgggtttcaaaacaagaggagttgggccaacagaactacggagaattgtcccaagtgaatctgtgacaaatgaatccacagcctctccaggatgggactatttgggaggtgatttcgcagtttctgcatttgctgatctatcctttgatttgcccttaaagttattccaggatgctggcatacatggccatgcattcctatctgctggaaatctcgccaagttgtccgagggtgagttcagaaatttctcgttttccaagttcgggcgcacatttaggagctcagctggtgttggcattatcttacccactaagcttcttcgtgcggagataaactactgttatatactgaagcagtttgagcatgatcgtggaaagactgggattcagttcagtttttcgtctccaatgtagatgtcatgtttgtggttctccctgactatgaacaatgcaatgcttaatcgtgctgagcatttccgctcgttctattttggttctggctgaatcatctttttaactaactaggagtccagcaaatccatatccagatgattgatcttttgtatcatgctcgttgttgaccattagaactggaagagttgccttgctgacggttattgtgaactgtgatggtttcatggtcggcaaaaaaatgcgtatatgttggtggcaatgatgtttgctctatgggaagtttgcatatatattatacatgaccatgtttatcaaggtggtaaagcgaaagcgtggtggcgatctatatcgccttatattcgacgtcatacaaaggtaatgaaatgcaagagatcagcatgaagggggaggaatatttttatatgaaaaaaggagaaaagaaggaagcacggggtaagaagtggtgtcgcctattggatagataataaaagttgaagtggaagagatttgcaaagagtgttcattgaatgtctcctctttggaattgctctgcaagaaaactgtcgtgggtgtccttttcagtgcagtatattactgggttagcttttaaactgtaaaaaaattacagaatctctttgttac

SEQ ID NO: 31578 - DNA, 1812 bp, Zea Mays
cgttgatccattcatggaaggatcctcgtcttcgccactgaatccaaagatggtgtgcgaagaaggcggcggtagaaaaggaacgtagagcacagagcgcaaagctgagaccgagacagcgagacgttgacaggcacaggcaggataggaagtgtcgcgaaacgcgaccggcctcgtcctaccaccggtcgatagggatctcggcctcgtgccccaccgccctctgtctgcccatcaccggatcacccctcgtccccacccagcgcgtcacgggcacgagctcgagccctcgtaccctcgcgtccgcgctctccctccctcgctcgccgcgctccgatcgaactcccgtccccgcgtggaggagagcagggccccacgagggccctctcgcgcggcgaccccgtggcgttcctgcgcggctgcttctcgttcgggtcggcggggcggaggcggcccaaggcctcgcccttgccctccccgccgcgcctgaccgcggctgcggcggcagcggacgacggggccaagatgaagggcctcttcaagtccaagccgcggacgcccgtggacatcgtgcggcagacgcgcgagtgcctcgtctacctcgacctccactcggactccaggagcggcgatgccaagcgcgaggagaagatgacagagctaagcaaaaatatcagggatatgaagtctatcctttacggcaatggtgaatcagagcctgtaactgaagcatgtgtacaattgacccaagaattcttcagggagaacactttacggctattaatcatacatcttccaaaactaaatttggagactaggaaagatgctactcaagttgttgcaaacttgcaaagacagcaagtatcctcaaagatagtagcgtctgagtacctagagtcaaataaagatctcttggacattttaattttagggtatgagaacatggacatcgctttacattatggtgctatgttgagggaatgtattcgccaccaaagcattgcaaggtatgttttagagtctgaacacatgaagaagttctttgactatatacagcttccaaattttgacatagcttctgatgcttcggctacctttaaggaactgttgacaaggcataaagcaaccgtggctgaatttctctccaacaattatgattggttctttgaagaatttaactctaggttgctgtcatcaaccaactacataacaaaaaggcaagctatcaagttgttgggagatatgctgctggatagatcaaatgctgcagtcatgatgcgctatgttagctccaaagacaaccttatgattttgatgaatctcttaagggattcgagtaaaaatattcaaattgaagcatttcacgtgttcaagctgtttgctgcgaataaaaacaaaccgcctgaggtcgtgaacatactggtcaccaatagaagcaagctacttcggttttttgctggattcaagattgacaaagtttgaagcagacaaggagcaagtcataaaagaaatatcggcactttgagtatgcttgaggttgtaattagtttttgtgatgaattttcttttgctaagaaagtgcatgtgaaataataaacttctgtgtaatattctgttggaccaagaggaacaatgttactcattgactctagtacttggatactgccagcaaatgtgataattttaatagattttgtggttatccatgcccttattttatgggcgtgttccactgatacaaaatattgaaggatttagagacaaatactgtatgagacaaaggcataatatctaatctcgcccaaacaaggt

SEQ ID NO: 31579 - DNA, 516 bp, Zea Mays
gtttgtaaacttggttggagctgtacttgtaagccacgtgtggtggccatgtggtgctggcaccatagaaaatactctccactacgtatgcgctgaactcagagttgtctgtccttatcagttgcactagggcttggttatgtgaagtttttccctaccctcaacctctagccaaagtagctgcgtgtgcgttgtagttcctgtgtccacgatagttttagctcccctcctcagccactagatcgatctgcccttgttcatcacagccaactcctgtgtctggtgaccacaacagcaatccttcaacctcaccatggccagggttcgtggagattgtcttggccgtgttgtgcccgttctttgttcctcacaggtgatgaggagtattccaggagttcctttggctggagggtgtttccagttctggaggaggattagttaggcttgtgtataagctttgtagggttcctaccttcctgctattgtaatgagttatgcactttgagtatatcagga

SEQ ID NO: 31580 - DNA, 1367 bp, Zea Mays
cgcctttctagctcctgcagtcctgctgttagtgctgttcccctctctcttccccgtcctgcaggctccaggcgctgctgctctcgtcctccgctagcgagcgaatcgctgacgctggcccgacgccgcggcgggaggtatctcgctttcgatcaggattttggttggggcgtcgttctccggtgcttatctcatttctatttatcggtgcctcgggttcacggccaaattcgctgctgcgtggggctttggagattggagccgattccttaaagtggcggtggcagcgtctggtgggaaccatgagcttcgtgttccgaggaagcagggccgacatcgaggccggtggcttcacagggttcgcccccgagcgccgcaccatgggagcaggccggtgaatagcaattccttggtttttcttctaactgtttttgttttgttcatggtactgaactcacaccagatgtctcccaatcttttgctttggatagtcttgggagccttcctaatggccacgagccttagaatgtatgccacgtgccagcagcttgctcatgctgcagctgccaacagttttcttggccacactgagctgcgtgtgcatgtaccgccgaccattgcccttgctacgagaggccagttacagagccttagacttcaactggctcttcttgaccgtgaatttgatgatttagattatgacactctgagagcactggatgctgacaatagcctgcatgttccttctatgagtgaagaagaaataaattctcttcctgtcttcaaatataaagtccaggcacagcagggaaatgcccctgcccgaaaaagtgatgaggcatcgcagctatcggtttcttcaactggctccggcaatgagaaaaagcaggatggtttaaaagcagatggaactggcaaaactccacaggatgaactaacatgtagtgtttgcttagagcaagtcatggtgggtgatctgttgagaagcctaccatgcttgcatcagtttcacgtaaactgcatcgacccatggctgcgccaacagggtacatgcccaatctgcaagcaccaggtcagtgatgggtggcatgccacaggcaacggtgaagaggatgcttcatacatggtgtaagtagctgcccaggagtaggccataggtaactagtagctgctaacagaatccgtggaacgctgttttggaggtgacggtttggacttgcaatctagggatgtggtctaatccctgtctaccctaacaaaaaaccgagtgtggaatcagctgtccagtgcactgagttcttgtacaactcatgtttatttctctcattctctgtgatgttgatgcataaaaaggttgctgataatct

SEQ ID NO: 31581 - DNA, 797 bp, Zea Mays
gttatgatggactttgtcttctctgagtcagaaggtggaatatatgacaataggaatgggatggactatcatattcctgtgtctgattctgttgcaagggaacctccaatgcatattgtacacattgcagtggaaatggctcctatcgcgaaggtagatttacatttcatattttgtgacacaaatgatgatggtacttgacaattaccaatatggagacaggtcggaggccttggtgatgttgttacaagcctttcacgagctgttcaagatttaggccataaagttgaggttattctgccgaaatatgattgtttaaaccttaacagtgtaagtttgtctactggtgtaaaatgtcctgcgtcttcttttctttcccttttttatctgtctcctcacctttctttcatttccaatttccaatttcagcgtctttttcacttcaatgaagttgagttcatttagttttaaaagcacatgaatttatggagggagaatattcttaatgtgtgctctttcatatttaatctgcagtacctttttatgttatttgtggagagtttcatgtgtatggatggatgaccaatggtagttggtggataccaattttcttcattatgttggcgtccttcggttgcaggtgaaggatttacgctaccaacaaagttttacttggggtggcacagagataaaagtatggtttggaaaggttgaagatctccctgtttatttcttggaaccacaaaatgggtatgcattacttcattctctattttacagggatacttgatttctca

SEQ ID NO: 31582 - DNA, 5878 bp, Zea Mays
ggcaggggaggacagcgaagagagagagagagagaggggagaccggggggcaagcctgggaggggccgaggaggcccgcttacgaatctcgcgatccccaatccggaagcctcgattcgccgatccgggctcggccggggagagagggatcccgccgatcggggggcgctcgtgctgcaccgattcgagctcgctccctgctctgcccgcgcggggtgcgttcctgcggaggtccgcgccgggccggtagctgctgcgtgctgcctggtggctgctgctaggtaggtggttaggcggcggcaggaggatgcgggcggcggccgcgtagcgccagcgcaggcgcagcagccccggcatgggcgacgacgccgagctcgaggagggggaggcctgcgcctgcggggacgacaccgccttcgtcgaccccgatgtcgcgctctcttacattgacgaaaagcttcaagacatacttggccatttccagaaggacttcgaaggaggcgtttctgcagataatctagggtcaaaatttggtgcatatggttcatttttgcctacgtaccagcgctctcctcttcctcaaactagaagtccccctaaggcaggaaatattacctcaaaatctccctttcaccagtcgaatgaggacttgtctcagaaacctccagctgtggcagtttcatctaccccccaaagtaatggtcctgtggtgcctttttctggtgattcaattaaaaaggaaatacgcccatccacaaagtctgaaaggggttccgtctcccatgattcatatgggccatcaaaatgtagtgaccaaaacagacttaaagtccggataaaggttggctctgataatgttttggcaagaaataatgcagctatctacagtggcctgggccttgatatttcttcaccttcatcaaacgaggatagccctgatggccgtgggagcctgtcccctgaagttaacaatgtgccacatgaatctccacaaaccattcttcagatcatgacatgcttttcagttcctggaggcttcctgttatcccctctaccagccaatatcttgcagttgacaaaaaaggtcgtgtcttcatcaaagaagtgggaatcaaatgtggatgtagaaaatgtacaagaatcatatgaaggccatgtggctaaaagggtgaaatctgatggtaacaaaaagaggctgatagatgcaaaaaattcaaagaacaaaaatgatattagtgcagttatgaaaaaggagattgatatggaattagttgctggtcaaaagatagtatctgaagctcttaaaatatcattgctgtctgaccccagagctatggatgcaaaaggtgagaatcgtcttgaagaggagccagcagaaaacaacttggttggaattagagatgctcgattgaaagagcggtgcaccaagactgactccatgacagtcaaagtggaacctgccaaagcagaggtgatggaatgtttagagaacagtagttttggcagttcagaaatggatctttcagcagtgaaagggaaatcaaaacccaagacagaaaagggtgaggcaactttagaagataggaatacaactaatgacaaagacctaatatcagataggaagcaaaaaaagaaaataaaatctgggagtaaatataatgcctctaactttgaaggtagcattagcaatgttataaacgaaggagcttcagctgttttccacatgggaaaaatttctggtctagaagctttgccttatgacacaaatggggaaaataattccaagagtgaggtcaaaaaaatgcagagagaacaaaaggccaatgtttcgacgtcttctgatttcctggaggaggagaaacacattcattcttctgctgcagttaaggagagaagtgacatgcaatcaaaacctatccatactggaaagaaacccaaagcaaaatcacatagagatgttagggacaacaattttcctgaaggatcttatggaagcaaggaacaggattcattggagaataaaagtgcctttggagatccccggccaaaggaaaaaccatggaagtttgacagcgaggactctgatgcacctgggatctcgaggaaggatagttcttatgtaaagcttgacaaacacctggctactgaggagcagaagatgcatatacttccacctgccactgcttcaactgcgaatgcagcttttatacatgcagccccagtcgtaatagaggaacattgggtgtgctgtgacatatgccagaaatggcgtctcctaccttatgaaatgaatccttcagatcttcctaagaagtggaaatgtagcatgctacagtggctacctgggatgaataggtgtgagattagtgaagaggagactacaaatgctctgaatgcactgtatgtccctgcccctgcaaatggtattccttcagttggccttcctcatgttgcttcatcaggactagtaacatccagcactcccaatatgaatggacatattgagcagagtaggaaaagaaagaatgttctaagtgatggaaattttgtggctgagggttctcaccaaacacagggttcaggtcatccaatgagcaaccaacatgctcccaataaaagtaaaactcatactgatggtatccagtatcctattgatagagattctgtaagcaaatcagttgacccaacaattaaaaagcaaaggtccaaaagcaaacatcacagtagctattctgatggagtagatcttgttgaaagacctaagaagcattctaaagtaaaaagcaagagagacttggatcgtgatgaatacaaagcttctaaaaaaatcaggaaagaagagcgccattttgatagagatcggaaccttggatccggtttagctagtcgtgatgttcccgatgaggccaaggcttttcctgtgaagtcagtaacgtcaaagggttcaggtgaaaggagtgatctttcttcatcaaagcaaaaaaatgtctcacatcataaccatttggaaaattccaagaaagcaaggcaagattatgtaggttttcctgaagacgagagcaaggaatattttcaccagtcagatgtgcaaagatcagatttgtctagtaagaagaggatagtgaagaaatgggaggagagtcagtacaatccagtagctcaggtaagcaaaggagctatcaaggaaacctatagggatcagaacttaaaggaagcaaagttgatgtcattgaattctgaagaactgttttctatgacgagctccaaaccaccgaaagctcaacatgctgatcaggttttgttttatgatggggggcgtacgaacagcgagttagttgaggataacacacactttagtggcaaaacaggtctccctgagcaagaaaatagtctttctgataaggctttagacttgggcaaacctgctagtgatgtggcctatattcagacttcagctgtaacttcaagttcttcaaaggcttcagtctcacaaaaaaagaagcagaccactcaagctatgaagacatcgtcaattgagtctctttctttgtcaccacagagaaactctaacattgacaatgtctctgcctctcatagtagagtttcaggtaaggatggatctctgaatgctaactcaagcactgtgccggccatggcaaaacaactaaatactcaagttggtgtagcagtcaatgatcaatggtctagtgaacctattttggttggttcttcccgaagaaaatctgatagagataatggacaggttcagttaactcaaggtcatgcctctgatggtattcatcctgaaaggggtttgaatgaggacctgcagcctgaatctgggagaaaggattccaatataaaaaactcccatattcctaaaagttctaaccatttgcattctggtgaaaaaaataactataatacagatggctctcctatgcaaccaggaaagcatcttgttgatccaaagacaccagtcttggataaaggtgattcaagtatgcatgaaaataagaaaagtgcaaattctcttcaagatagaaatggatcaactcattgcccaccagatggaaatcctctgctcggtttaccatctggaaaagagaaatcatatctcaaaaacaacaggcaagattcacagaagcctaaaccccagatctcacctctgaaagaaagcaaattggattcccattccactccattaaaacctaatgggtcaaaattgactccacaatcaagacaatacaatgctgaaaatggagggcgacatggcactgcaaaacaagcaattcgtagtcctgctgatacttttagtccagctaggaaggacaatacttcaactgcgaagaaggaaaagagcttgaaagtacaagactctactttgactccgccttaaaatttttgcatgttgcatcacttttggaacctcctagctttgatggtttgaaacaaggcgatgcagcccagagcatgtattcagatactgcaaaactttgcaactttgttggtcacgcgtatgaaaaatgcaagaagatggctgctgctgctttagcatacaagtgtgttgaagttgcttatctgaaggctgcatactgcaagcacccaactgcaagcaaggatagacaagtgttacaggcagttgtacagactgctccaggtgaatcaccatcatcttcagcctcagacattgataatttaaataacaatggattatccaagggcccttcaagcaaggatgccaattcaccacaagtggttggaaatcatttgttgctggccactcgaaatcaaccacacttgatgcggttactagcttatacaaatgatgtcaatagtgcctttgaggctactcggaagtctcacatggcaattgcttctgcttctggcaatcacgaaaatggagttgatggtctttcttcagtaaaaacagtgctggattttaacttccgaagtgtgaatgatctactaagtagcatgaagctgaatataatccaacagtgcaaaagcataggtctttcatttgagcttgctggtcaacttgtacagagagtgatcatatttcttctttttttacgttgattacacccaattagtatatatagttgcatacccacttggatgatttagttagtgaggaacacaagtgaagatgagctttgcactgttcaatgcttctgcttggaagaaggatgctcttgtggccgcagttcgttgttatctggaaagtggcttgctactgagcattctcttactacatgatgtaaattgtgaatctccatcaaggctggcttatggctgaagagtcagtatcatagtttcctttgatgggagaggacagcaaagccagctaatctcgctatccaagaaatcggctagtagttttttcccttttgaaccttgtcacgatgccttgtcttctggataaagttcacgcaggtttcaaataagaaatcacatggactatcagacttgtatggaatatggatgctgtacaaagatttctaatgtacattagtctaactttttttttcgtgatccccgaaatgccgactatcaccagcgcatgtacatgtatatatacatacaataaaggttggggcatttttaccacgtgctggtctctatgtatgacgcctttggttccgtccaacttttagtctttcacatttttgaaattttgtgacattctagttttttgttaggatagcgtctagtactgggaatttgttgcagaatgcaaaataaattccgtgctgtacaacttgtagccgagtttcaggtcgtcgagtgaagtgatggtaactgctcgccgaatttgcactatgcggtctgtggatagctacttgaatgaaaagtttgtttccacatatcaagt

SEQ ID NO: 31583 - DNA, 1315 bp, Zea Mays
ctcggctcacctaggcttcgaagccttcggctctccattctccaatctccactctgtccggcgcccctttcttctgacgcgcccgatgcagcgatgctactgcgatggatcgcagctgaggggcgtcggcgagcgcggccgtctaggcccctcgcgcgctctctctcgtacggtagggttgtggacgctgccgctcgcgatggggagctcagggtgttcgtggtcgcgggcgaggtatccggcgactcgctcgcttcgcgactcatggcggctctcagggcgctgtcccctgtgccggtccgtttcgctggcgttggcggtgaactaatgtgcaaggaaggtttgcaatcactttttcccatggaagaaattgccattatgggcatgtgggagctgctgccgcacatatacagtatcaagaggaaaattgaggatagtgcaaatgcggctatgctatttcaacctcatgctgtggttacaattgattcaaagggtttttcttttcgactgttgaagcaactgaaatgcagaagcaatcagaaggttcaaagtcctctgcatatccattatgtttcgccgtcattctgggcctggaaaggtggtgaaagcaggctctctaagttgcataattttgtggaccacatgttgtgcattcttccatttgaggaagaaatatgcagattaaacgggttgcctgctacttatgtgggccaccccttactggatgatgcgattggcctaaacatggggacagaattgtgttctgacaagtctaagtatcaaagaagttgtgaagctttccgactggaacatgggctgtccccaggtgccacaatcataaccatgttacctggaagtaggatgcaggaggtagttcgaatgcttccgatctttttgcatactgtgcagaacttaaggcatacatttgatgaactatcattagtcatcccagttgctccacatcgagatgtgaggacctatattgaaaatgttgttcagtcagaaccttttccagtggtgttgatacccggggggtcgcttaaggaaagatacaatgcattcagtgctagtagagcagcattatgtacttcaggtacagctgttatggaactaatgttagcaagactgccctgtgtggtagcgtaccaagctcatttcattacagaatgctttatccacttgaggaaaaagataaactttatttctctgcccaacattctcttgaattctctcgttgtgcctgagatcctttttggggcttgtacagctaagaatttagctgcaaaattaaggttgctgctggagccgatagcgg

SEQ ID NO: 31584 - DNA, 1640 bp, Zea Mays
ctttgtcacagggggcgagggctgaagatcatcacatggtggccttttttgggtctgtggcctttggtcttttagtgcttcttccttttacctcctcatgacatgaaccccctttttaaaacctccctcaaaatcaaatcaccctcctgctcctttaagagccctcaaccccttcccctcattttccttcatccctcagcctttgcacaaagggcaagaataacgcagtatgatcacctgatctcctcccgccgccatcacaatcccacacgtacgtgagacaaaggtaacagacgcaagaagctagcagctgcaggagattgctcagcccatctccatggaggttgccatggtcgtcagcgcaagagccagcctgctgatcctcgtcatctccctctgctctccgtacaaattcatacagagccccatggacctgggccccctgaacctgctccccaccaccagcaccgcggccgcgtccagcgacttcggcaggatactcttccgcgccccggccgcggtgctgaggccccagtcgccgagggacatctccatgctgctcagcttcctctccggctcgccctcgctgagcagggtcacggtggcggccaggggggcaggccactccatccacgggcaggcgcaggccccggacggcattgtggtggagacgcgctccttgcccggcgagatggagttccaccacgtccgcgggggaggcgaagggcgtgcctcctacgccgacgtgggcggcggggttctgtggatcgagctcctggagcggagcctgaagcttgggctggctcccaggtcctggaccgactacctctacctcactgtcggcgggacgctgtccaatgccggcatcagcgggcagacgttcaagcacgggccacagatcagcaacgtcctccagctggaggtagtcacaggacgaggggagattgtggaatgctcacccagcaaggaggccgacctgttcaatgccgtcctgggaggcctaggccagttcggcatcataaccagggccaggatcctgctgcaggaggctccggagaaggtgacgtgggtgagggccttctacgacgacttgggcgccttcaccagggaccaggagctgctggtgtcgattccggattcggtggactacgtggaagggttcatggtcctgaacgagcggtccctccacagctcctccatcgccttccccgcgagcgtggacttcagcccggatttcggcaccaggagcagccctaggatctactactgcgtcgagttcgcggtgcaccaccaccacggttaccagaagcagtctcaggcggccgtggaggccatctcgaggcggatgagccacatggcgtcccagctgtacagcgtggaggtgtcctacttggacttcctgaaccgggtcaggatggaggaggtgagcctgcggagcgccgggatgtgggaggaggtgcaccacccgtggctcaacatgttcgtgcccaagcccggggtcgctggcttcagggatctgctcatggacaacgtctcgccggatagctttcagggcctcatcctcatctacccactcctcagagacaacttccaagaagtccaagttgggcaagcaagcatttctttgcattatccacagc

SEQ ID NO: 31585 - DNA, 1054 bp, Zea Mays
ccgttagctacaactctttgcattgcgggcagagaagcccgaaaccaactctaatcgtcagagcttcgataatgactgcaaaatcggagcagacaccacgaataacggagctgcatgtaagggtggactgcaacggctgcgagaacaagatcaggaaggccctgcgtgccatcgatgtgtatatagatcaagcaagccacaagatcactgtggtcgggatggccgacccatggaggatggtcaaggccatcaggaaggccaagagggtccccaccatcttctcccacaccgacccggccgccgcagccgaggctgatcagccgccgcctcccgctgccgaagccgaagaagccgaagccaaaggggaggcccaggcgccagcgccagcgccaccacctcccgccgacccgccagcagccggcgacagagcagaggagaccgcgccagctgatacgtccgcgccggaggagcacaaggaggccaaaccggcagaaaccccggcggctgtggacgccaccgtggtggtgcgcacagtacgtgaccacccgtacgggtacggcgctggcggccatggccaccgcatgtgcagtgaggcgaaccaccccgtagacagcttttacagccaccatcgcccgacgagcccttacgtggccgagtacggcgccggcggcggctatgctggctttccggtgcaagaaggcaggggcaaagaggatgccatcaatatcacttgtatgttcagcgatgagaacccaaacgcatgcagcatagcgtaagatccatgtgtttgcaatctgctcaaggaattcctttctgcatgattgatgccaaagaaggttgcatagctgctggctagtgccgagggggacagatcatcatgtaggctttagcctacgtacagcggctagtgtgtagctgctgtaataaggcttgggttgatgtaattaaaagggtgagaaaggtaacagaatgggaacaataagatgcttaacttgtgcacatagtcactgtgggagacgattttcctggcaatcgccacggttttcactacgcc

SEQ ID NO: 31586 - DNA, 2597 bp, Zea Mays
cgaaggtgtatttgttcgacaggcatcttctctcatcagcggcggcggcgaggcaggcagaagtggcgaagcctgaaagtgagctctacgatagagggaggggccaaccaaaagcaaagctagcgcctagaggtagctggtagcaggagggctccgaccaatatctgctccaggaccttgttcttgttccctctcgctcatcactgggtgggccgttgtggtggctgcctggctgtggctggtgcgagaaaaaaagtagccagtatcaggcgcaagttgcgattctcgggagttcgttgaggagtcacagagaaagtttggtggtactggtgaggcaaaggtttccttccagggttcgtcaggaacgaggcgtgtcgcaatctgaagcctttcgtcggttccgtctagctgcccccctcggattcggccatggagcggcagtccagcatccggctgggcgcgctggagaagctgaggagcttccgggggatggagaagcagaagagcttccgcgggatcatgtccctggagcggcggagcagggacagcccggggaaacgcggcgacacgccgctccacctcgcggcgagggccgggagcagaaccaggacggcgagacgccgctgtacgtcgccgccgagaagggccacgcggaggtcgtgcgcgagatcctcaaggtctgtggcgtgcagacggccggcatcaaggccagcaatagtttcgacgcgttccacatcgccgccaagcagggccaccttgaagttctgaaggagatgctgcaggctcttcctgctcttgctatgacaacaaattctgtaaacgctacggccctggacaccgccgcgattcagggccatgttgacatcgtcaatctcctgctggaaaccgatgctagcctcgccaggatcacgaggaacaacgggaaaacggttttacactcagcagcaagaatgggccacgtggaagttgtaagatcgttgctgaataaggatcccaggattggtttgaggacagacaagaaggggcaaactgcgctgcatatggcttcgaaagcgcagaatgctgagatcgtggtcgagttgttgaagccagatgtctcggtcatccatatcgaagacaacaagggaaacaggcccttgcatgttgctactcggaaggggaatatcattatagtgcagactctgttatcagttgaggggatcgatgtcaatgcagttaacaggtctggagagactgcatttgccattgccgagaaaatggacagtgtagaactcgtgaacatcctgaaagaggctggtggagaagccgcaaagcagcaagtacatcctccgaattcggcgaagcagctgaaggaaacagtcagcgatatcagacacgacgtccagtcccagttcaagcaaacacgtcagaccaagatgcaagtcaaccagatcaagaagaggctggagaagctccacatcggcgggctgaacaacgccatcaactccaacaccgtcgtcgcggtgctcatcgccacggtcgccttcgccgccatattcacggtcccgggaaacttcgtggaggagctgagccaggcgcctccgggcatgtccctggggcaggcgtacgtggcgagcaacccggcgttcatcgtcttcctggtcttcgacgcgctggccctcttcatctcgctcgcggtggtcgtggtgcagacctcgctgatcgtggtggagcggagggcgaagaagcggatggtgttcgtgatgaacaagctcatgtggctggcgtgcctcttcatctcggtggccttcatcgcgctgacctacgtggtggtggggcgcgacgactggtggctggcctggtgcaccatgggcatcggcgccgcgatcatgctcactaccctcggctccatgtgctactgcatcgtcgcgcacaggctggaggagaagaacaccaggaagatcaggagggcctccgcgagccagtcccgcggctcgtggtcccgatcggtcgactcggacgaggagatacttaacagcgagtacaagacgaagatgtacgcgctgtagcctgtaggatggatagcaagtgtaacatgacggattcttttgtacataccagtgctttgtttcgccagaggctgctccatggcatgcggcaccacatcagtcttcttcaaccaaagggactgaaggtccttcctgcggaaccaagttcaggtcacttgaccggtgtgcctgttcctggggagtgagagtctgctcaactgtgtggttcttagcgcctgaaaccgtcaatggtgatggagataatccagctagaaatttagaatagaataaagtgtccggtacaaaatgcattgtgtcgtgcagtagatatgatgatcttgtacacgaggatctcatcggagagagtgatttgttgaactcttgtgggcagttttttttttcccttgggagttgggacttgggcttgtggtctgtgacgcagggaatatatgtgttgacaagatgaaaactgtcattgatcggccatttccgagactaaatttgtgtaacttgtcgaccaccggagtgaaatgtgtatctgcgaataacgatatagagtatgtgtttgtt

SEQ ID NO: 31587 - DNA, 599 bp, Zea Mays
gggcgatataggaatctctcatccgaaaagccatcttaacatgattgacccgagaacctctctataccggcagctcataccacggttgcccctttcgggccttttcattacgtatcttgcgctgttcttgatggacgggcatggtcaacctgcgttgttgtaccttgtgccatgtacattgggggttattgttattcttggttggttaagaggtgagctttatgaattatggaacttcggaaaaagtccaggagaaaattttgtcaatgaaccatgacaacaaaatccagggaagatgtattcttcagcgtagtagatagcttgaggatgtttattaggaggcaccgtgtattgcaagatgttatgtttagcattatttcaaagaaggatgctattgtgtttgaaaaaaatgatatacatgtaagatgcaagcatgtactcccacagtcgtaaaataatccaatataagtgccgctatatagttccaaaataagtgtcactagggttggaaacgagttgagcctgacttggctcggtcaatttggatatgtttggttgcctggtctagtgcacgaccaggcccatttgaaaaggtcgac

SEQ ID NO: 31588 - DNA, 154 bp, Zea Mays
ttggtgattaaatgacaaaacaaacagagattctaacaagtttgctcctagcatgtatatagttattttacagacagaagaagcacagatcttatgagtatgcaaatgtaaaagcacagcggattaaaattctacatcatatagcgtgctccaa

SEQ ID NO: 31589 - DNA, 2905 bp, Zea Mays
ctccgaagtccgaacccaattccaaacgcaaattacaccaaaccatccccgaatcatgtcaaaatttccccaatacgcgtccaaaccccacccgaccaccctcccccaaattcgtttcgaatcagattaccgacgcgaccacccatctgggctctggccgcctcgccccccgtcgctcccttccatggcgtttcacgtcgcgtgccccatcacttggaagcaggagaagatgaagacgagtgggatcgagaggatcaaggaaatgctgctgtcaaggttatgtgccgtttatgcttttcaggagaaaatgagggcagcacgaaagctgccaaaatgcttccttgcaaactctgcagcaaacggtatcatagaaactgtttgaaaagctggggggaacatagagaccttttccattggagttcatgggtatgtccttcttgccgcagttgtgaggtatgccgacgtcctggtgaccccaacaagttgatgttctgtaaaaggtgtgatggcgcttatcattgttactgtcagcaaccatcacacaagaatgttactcatggaccatatttatgtccaaaacatacaaggtgccacagctgtggatctggtgtgcctggtagtggacacagcacaaggtggtttttggggtacacatgctgtgatgcgtgtggacgattgtttgtgaaaggaaactactgtccaatctgcttgaaggtttatagagactctgaagtgatacctatggtttgctgcgatgtttgtgaaaagtgggtgcatattgagtgtgatggcatcagtgaggaaaagtaccaacaattccaagctgatcaaaaccttcagtacacatgtgcagcatgccgtggtgaatgctcccagatcagagacactgaggatgcaatccgggagctttggaagaggagggatgttgccgatcatgagcttatggctactttacgggctgctgctgcactgccttctcttgaagatgtctcaccaccttatcaaaactctgatgatgagaaactcggtgcatatgcattgaaaaatgagagtagaaatactctaaagttttcattgaaaagtaacagtagtaaacctccaccagatacacctgagcaagagaagattgtttttaagagctctggatcaaataagaagccttccaaaaagaaaagtggtcaggctaataaaacagttgatggccatgatgaaatatttctggagagaaggcatgctgttaaatcatcaaatagctgtttgggagatcaaactataaatgagaatcatgacaggagcccttttaaaaatgatgataatgtctatgtttcatcttcaactcgaagtttagaaaagaatttgaaatctccatccatgaaagctgtggcaaacaatgctgatatgatacccaaagtcaagattaaaggcagtaaggtttcgagtttgcattacaaagatggtgaagaaaatactcctaagaatgacactggaaaagctaccaagttggttatccatcttggttcacggcataaaactaggagtggctctcctaagtcggaactgtccaattctcaaagagagcaagatttgggttcaatacatggagggaaaatagatgtcacaagccagctgaaaagttcaagaaacgaggtaaaagagagaagtgtaatgaagttagttagagatactggggtgcaacaaagaaatagccttttgggcgatcttggtacctcaaagaagcatgcaactgggaaaaggagcaatgctctaatttctggaatggaaaatgcaaatgaaactggtactagaaacagatcatttgcacagaaacaatctcattctagtcaggtggagaaccatggaactgctgactctcctgatagcttgaagccatcattgctcaaactcaaatttaagcgtccacattttgagcagctaaacacccaggcctctcaaccagaggagccgacctcctgggtttctcagcaggaggagcagttaaatgttgctaaaggccagagatcaaagaggaagaggccttcgatggagaaggcagatggtttggacggtataactccagccaagaggcatcagcagagcacagatgaagtgatggacgcaaactggattctacgcaagttgggcaaggatgcgatcggaaagaggattgaggtccatctaacttctgatggcaaatggcatcaagggatggtgtctaatgtcatgggtggcacactgtgtattcggttagataatggcaggtctgagaacgtggagctggggaagcaggccatccgcttgattgcttcaagatcgaagggcgggaagcgatgaaaccttttccccataatatgcagcttaggacctgttctcgctcaatacattgcgccatgattatggcaggtagagtcctccccccctgaggtttgacatccgctggagcacagcctctcagcctttgctgactggacgagatactgagcgcaacttccatctgttgcgccatgtttcgctagcctagcgtgtaacagacatcgttttttggtgttggaagccccattggctttcgactagattctgttagggtagggaatgaggttttagatcaccttggatgtaagagaagcaggtagcgccgtgtctggagtgttttgtatgtttagttttccgacgagtttctcgacaatttgttattcacttatatttggttgctggtgttatttgctggccaatcaatgtctttttgtgatagtaataatttgtctacaaatacaaatagaagctggtgcgaaaccgaggctttgcctttgctcgaccgtctagcatgctcaaatgctcgacgactcaccgctggttttcgaagggaatttcaggagggtgaatttggtgaggattgtatgtatacctg

SEQ ID NO: 31590 - DNA, 983 bp, Zea Mays
tcgtcagcaatcctaatccaaaccgccgcggccacggccgcagccttccatagttctgtcagaaattccccttctcatccctgatccctccaactcccaccccaatacatcctgccgacgccatcagccggcgggacgcacacacgaggtcgaccttcgaaccctagtccttggccgagccgccttgcgggatcgtccccgccgcgcggcagctctgcctcgacccttttagtctccgtccgacaccgcttggatcagagatggaatcaccacccctcacagctgaagcaattgcttttaccgagaaaaagatggacatgactttggaggatataatcaagatgtcaaagaaaaagaatcctggaggcaagaacccccctaggcagccgatcaaaaagcgtccattccagaatgccaacactaataaagggaatggcaaggttcaacggtttatggaatctagatcaaccattagacaaggtgttcttgcacagagaaggtcaaatcttggtggaagtcagtttgctgctacaaagcaggctgcaaagaaggctgctgctatgccaatgcgcagcggggctgtctattggaagaagcctagtattcatggtgtaatctatagctgctggatgagtgctatttttggacaccagtgtctgaggtttacgttagtgttatttgtcaactatggttggaaggaccgaaggagatgtgataatgactagcatctcatgccactggtgactgatcatccagatacagggatgctacatgcctgagttggaattggtttttactactggctccttggctgtgctcagtgtttgtttgaatgatgaatgcaatgtgaatctagggtagtgatgctatagcaggacaattgtatgcctccaaggagtacattttgcttctgcctcctattaaagttggctgtatccataacagcattctatcataaagttgttcactagtttccacagata

SEQ ID NO: 31591 - DNA, 952 bp, Zea Mays
ccatagttagcatgagacccactgaacgaatatgcataactacatttgcattaaaaagaagattggaccaaatgagctacaacataagattttatttgatagaagggtctaatgaaaacattggaccatgagagtggagaggcagggccattgctactgcaagtcgcccctaagcctggtactaagagttgtaggaggcaagaattcacagttatctttgtctacatgctattctttgaacacaatatttacgagcttgataggcctgttttggaatacaaattatgtgtccgataggtttatgaggttgtcaagttttcatttcaatgcaaatccagctggacaacaccatgtcacaaagcaggcatctcacattaaaggaagatgttattcttttcgagtgtgcttctagatacagttcagtcttggcgtcatcgaatcaatgaaacatgaagttagaagcacaccgagatccagtggcttgtgaccccttgaccctttagaggaagcgcactagagtcgttggcaagaagaagaggatcgccaagaagaagtctgaggctgccgagtaccaaaagcttcttgctcagaggctgaaggaatagagagaccgcgagagcttggccaagaggaggtccaagctttctgccgcttccaaggcttccgctaccatcgccgcttaagaatgttcgatgctttgatatgtttcaagacctatcttgttacagcttaaataccttatgctactctgattgtgttgcaacttgcaactgcccctgtacttgatagatttgtattagatgctcaagctacagagggtaggttcctaattatgaccatatgactatgtactaaattatatatctgttgctaagttaaaatacatacaaaataagtttactccgaccatcttgtagaaaaacaagttatagtgactaaggatatctgaatt

SEQ ID NO: 31592 - DNA, 1014 bp, Zea Mays
ctttcccacttccccttttttgcccgcccgctacccaaccgccgccgcggttctcgctgccagcgacggacgggccacaccgcgcaggggctcagccccgccacccaccttaaccccgccgtcgggaggcgtcgtccccggcccggcccggcccggccctcgccctctactgcaactggactggcgcgtagacctgtccccgccacgagatcgttccgccctatgtcggtgaagatgctctttgcatagctcaagctgcaatctgatggaccctgatgacaagaagtttggaaatggaccaagggagctcactggtgctgttgatttgatcagccactacaaactgctgccacaccatgatttcttttgcaagaaacctttgccgctggcaatatcagatacacattatcttcacaatgttgtgggagacactgaaattcgcaaaggagaaggaatggagttagatcaacttgttcataatgcatatctgagggataaacctgcttatattcagccctttgatatggaaactctggggcaagcgttccaacttcgagaaacagctcttgtggatttgccttctactgaaaaaggtataccgactatttcgggtaaaccaaaaagtgagtccaaggacaaagagaagaagcataaaaggcacaaagacaaagacaaggaacacaagaagcacaaacatcggcataaggatcggagtaaggacaaagataaagacaaagacaaggataagaaaaaagataaaagtggccatcatgaaaagaagaggaagcatgagggaacagaagattcagtagatgtgcataagcacaagaagagtaagcacaagagctccaaaaccgatgagatggggaatggagttagttaacacttcctagctctacctccaatccttgtaatttgctgttaaaacttaaaaggagacagacggtctctgctatcaaaaccctgtgcagaatagtggatgacgaagccgacgaacaatgattcgaagcttga

SEQ ID NO: 31593 - DNA, 4807 bp, Zea Mays
gctgcacccctgccccacccccggctctctctggactctggagtcgccttttgtttttccttttcgccgcctcctctattcttttcccttctcctcaactctcctcccccgaggcccgagctgccatcccctctcgtcagaggcattaacccccatccccatctctcgccggctgagaagcagctgtgccccgggtgcgaggaagccaggatggccaagcccgctcccgctgagccattctccatacggggttacgccatgaggatgcgagctgtcgacgcggccgagtgctacccgttcgtcggtggctgccgcagcgatgtggagggggaatcaccgccgcggttccgtccgatggacccgaagccgctgtcacggtggtggaagcacgaactcgcggcggggcaggcccgacttttggctggcgccaagggcggagaggctgcggcatccggcggtgggctgcggaaggggaccaagaggaagggctctcgctcgagttccacgggcgagagggccaggaaacggcgacacgtgcttcaatttaggtcctttctgacgaaaaaggagataactgctaagcctcagtcaacatcttgtttgcatgagcacaagttgcatatggcatttccgagaaagcataaaagttccactgtccatccaagtacagaacttcaaccaaggaagaaacgggaagaggcacgtgatcacatgccaactcatggaaacagcatgaataaacgaaacagagaaagagcgggcccttctagtgaaatgaatagtgacctaattgggataaaggaagtgacctcagctgtaaataagcaaagcatagaagtcaatggttcgactaataatcctacaaatactggctatgaattggtgaaaactcccacagggcccaaagatgatatctttggagatctccctctcctggaattagaaagctccaagactatgtttcgcactggtgttcatgaacttccaactgttattgaggaatcattaataacaaatcaaaccgaagcagattctataccagaagcggtacccttgaagttgatagatgcatctgacattactgctcagacaccatctcctcttgaagacttggtgaaaagtgaagctactgagccaccatgtatctcccacaatgatgtggcagggagtcacccttccactgttgagattgatggtcttccaaatcatatgaacatcaatatggtgaaaccaggtcttggtgatatgcaattgaaatttactgacgtgtctgctttaggttctcattctgttctcaggtcaaaacgtggttctggtaaccctatgcagggttgttttgatgtgaacaaaaactgttctcaggaaatgaaaaaacatggtacaaattctattagcagtccacctgccatgagaaccagacctgaagagactaaatttaaagatgcaccagttaaaggcaagaagagtactgatatcactggtgcagtggttacactacctacgcttgccaaccaactttcctatcaagctagtgtgttgccctctgcagtatcacatacagttttcagcataagagttgattcaaatgacttgtcttcattgagaagtatgcctgccgaggaatgcatcccaactaccagacctggtaacttcagaactaatgtgtgccatggaagtagggaacatgtggatccatatgcggcacaatctactgataaccagggtagctcacactcaaaacttcacccaatttgcagtcctgctaacattggaatggcttttatgaagctaccgggccttgaaagaatggagatctcaaactgcaatgcaaggataggtgaaaacaggtttagtaatgcagagtcaatgaacacagtaagatgtcagaaacaacagttgttgagtggcatgacctatgtaatggaaggtcagaaacagattggtctaagcagctctcaagttgggaaaccaggtctggatggttatgggggccaaggtgatcatcatctgcagcaacccacagttcgtttgatgggtaagaccgtctcagtgtgctcacatggcaaggatcataatgtatggaccatggataaagtcagtcctgacaatgttgccattgaaacaagccgcctatccaatagcacgtcagggcaaaatactactttcagtggccttcataaccaaaggccagaaccaataagtagtgttccaatagtgaaagattgcacttggaattttggtaatcagtttgttcgtcaagctgaactcaataaggcagctataggcagttccaactctcagaccaggcatcttgagctacatcaaccacctcatttgataagcattcctcagaatcaacagtctcatttgtggacacctgcagcacacatgagtaggaaagatcagtgttttgtgggtccagcagcgaaccaatcttctctggttccaaaatcactgctaaatgcaagcatgcaggaaaagtatcagaaatccactttgttgtcttacgatgatcctagttctatgcctattcgccaaccctaccagacacctggtgtaaagtcatcttctggatctgtcatatccttttttgagtatggtgcgaataattctttgtccagaagctcttctcctggactgactctttctcttacaactggtttggctaatgactctatttcagcaggcagagcagcttgtgcaggcagccttacaaatgcagatggtaggaaagctgctagctttgccgaaccaataggcaatagatcagtttatgcagataatgtttcacagcaacctgcgaggccaataagcaacagaacagcttatgcgacagataatgtttcacaacaacctgcaaagagacaagttgttacagatagacatgattttatgtctatgggcccaaacattgtgaaccattcacctggctggtcacttagtgatgcagttggtcctcaggtacttgattttagtaaaagagtagcaagagatgctgttcaaacgtcaagaaatgaaagcaacaatccaagggccagttccggtccagttctgcctattgaaacatggtctaggcctggcgtggttgcaggggctaataacatgttgaagccaggtcaaaacctgaacgatcattccaaactgctatactccacgaaatttcctgttgatagtgctatcaattcagttgtattatagcggaaagcaagaataataataataaggcgtccttgttgaagatagatctggagtttttcaggattcaaacagtcaggcacaggacacttgtaagaggtctacgtttctgaacatgttagtttagcaattgatagattgctttattcttgtaatttccccggtcaaatgtgcaaggttatttgattgtttgattacatgtcatgccatatctgacaaaagctggaggacagatcaactgtacagattgtaactagttgagtgcttttttggggcacttgatttctaagactaagcagcatttgctacgaacccacttgatgggcagcagttcaatttcagagatgatgtattgtactgtttgatcttgaaagcaaagcataaagtttactttcagccagtttctgtaaaccatcatacaaactttcggatgctgcacttgattggtttgcaattattagccactgctgttacaaagctgcatgtttcacctttttttggctttcttacatctgaaagatagtcgaaaagaacattcagaacgaaatggtccttttaccagattcatcagtcctggcctttatggttaaaaaaaatcagcttcggtgcaagtgatagctgctggcttcttgattcccactgttgggagccctctgaccctacaacctagggaaaaaggttactggtgaacgcagttgcttcagacctttgcaactgcaatgttcttggctttccttgaaccaagagtaaagaaggctttgcatgaagcacagatccacctgcgcatcccttgtcatatacaccgtcgcgaaacaaacaacgggggaaggagatcaagaaacgtacgtcaggccgagcttgtcgccatctggtggcgagccgtcgacaacggatcatgggtgtcctcggtacccttgctagaaatctggacgccctcgttgggccaggggtgatgctgctttatcctctctacgcgtccatgcgcgccatcgagagcccttcttccctggacgaccagcagtggctcacctactgggtcctgtactcgctgatcaccctcttcgagctctcaagctggaaagtcctgcagtggtttcccctgtggccgtacatgaagctgctcttgtgctgctggctggtgctgcccgtcttcaacggcgcggcctacatctacgaggcgcacgtccggcgctacttcaagatgggcacctacgtgagccccagctacggcgagcgccagcgccgggtgctgcagatgatgagcctcgacgcgcgcaagtccgtcgagcgcttcatcgacacgcacgggcccgacgcgctcgacaggatcatccgagccgctgaagaggaagccaagagggagaaacctgaattgttccgggtggaaaccgaagcaagtctcccatcggttgggtagtcacttgtgcagaaatcgtatcgtatgcgtgtgtgtggttgatcattacgtcgggcttgcccagcagttggagaagagatgcccggcgcccatgagagcatgcatgcatatatgactttgaaagaagccgcgaatttggtgtacttgttaatgaaaatttggcttggacctgtgaaatccgtatcagctaaaata

SEQ ID NO: 31594 - DNA, 4287 bp, Zea Mays
gcccagcccagggttgttgcggtgcgggaaggagcaagtttggcttgacaagttgggcgcagttggcttttgcctcgtcccctccgccgccccgttgccgaaacaaaactcgctcttcggacaaaacgccaacgccagggcgagcgagcgaggtgaggtcacctaccagctcccacagtcgcactcccccctcgcgccgtcccgtcgtaggaatggaatgaggccgaggcccctcctcctcctcctcgtcgtcgtcgtcgtcgtcggtgcttctcccgtgacaggcctcccttcctccggtccggtcgccctctgacccaatccgcatacatccaccaaccagctttgatttgcgctgtttccgattgtactcgtgctccgcccgctacgatacaggacaggggaggatggatttgtccaggctcgcctccgtcgccgggcccagccgcgcggccccgcgggcgggcctgcagatcggcgccgccgggaatggcttccgcgtctgctccctgcggcaccgcggcgccgggaacgggcgcctcacgtccgccgccgccctcctccgcggcagcagcgggctcttctacctggctcccgcgcgcgggggccctccccgtctccgcgccagagggcggccgcggtgccagggcagcgactcgttggcctacgtcgacggccccttggaggccgccaagggctccggcgaggtctacgacgacgatgccaccagctcggggcccgacgacgacgacaatgacaagggccccgccgacgtggacggtctccgggagatgctgcagaggtgcaggaacgagctcgaggtggccaggctcaacagcaccatgttcgaggagaaggctcagcggatatccgagtcggccatcgcgctcaaggaccgcgccgaaggcgcccagagggacgtgtccgcggccgtcgccaccgtgcaggaggtcatcgtcaaggaggcggacgccaaggaggccgtccagaaggctaccatggcgctgtcgatggccgaggccaggctgcagctggcgtccgaggcgctggatgccaagcgggggtcggtcgggcccatggaggttagcatcgaaggcgtggaggaggaggcccttgtgtctgctcaggaagagatcaaggattgccgggcagccttgttgcggtgtgaggaggagctggaacgcatccaggaacagaaaatgaacctgcagaaggaggttgataggctcaccgagctcgctgagaaggcccagttggatgcatccaaggccgaagaagatgtcaccaatataatggtgttggctgagcaggcggtggctcttgagatgaaagccacgcagcgtgtcaacgacgcggaggcggtgctgctgaaagcggagaaggtcatatcctcggttgacaccgtggtggagctaacatcacttgctgaagagcagaaaagcgctgaagaggatagcgtttctgaagggtatgagtatagcagcaatggcactgatgatgttcctgtgagggatgaggtgtcaagtatcgagcgtctaatggtaggtgacttgactgttgagggcattgagcagcttgaaccatcccgtgaaatatatgatgaagcaagcagcgataagatgtccgttgagcctcagaaagaagctgagcctgattcagacaagttgaagcaagggaagaagcaggaaatggaacgaaaggagttcaccaaggaaccactgagtgctcaaaaatcactgaagaagagatcatcccgcttcttcccggcatctttcttctcctccaaagctgatggagagtttacacctacatctgtctttcgggggttaatgaaatcagtgcaaaaacaggctcccaagcttgttgttgggatattgcttcttggtgcaggggccttcttcttaaatagagctgagaagagtcaactatttcagcagcaagaaattgccacaagtattggaaaggtaacctccacgacaaagcccatagttcgtgagatacggcaaattccacagagagtaaagaagctaatagagctcttacctcatcaagaggtaaatgaggaagaagcttcacttttcgacatactgtatttgcttcttgccagtgttatttttgtaccattatttcagaaaatccctggaggcagtcctgttcttggatatcttgctgctggtgtcctcattggtccatatgggctctccatcatccgtaatgtgcatgggacaaaggcaattgcggaattcggagtcgtgttcttactgtttaacattggacttgagctttctgtggaaaggctaagttcgatgaagaagtatgtcttcggcttgggatctgctcaggtgctagctactactgcagctgttggtgtgatagctcatcgttttgctgtgctaccaggaccagcagcaattgttgttgggagtggcttggctctgtcatccacggctgttgtcttgcaagtattgcaagagcgtggtgaaagtacgtcgcgtcatggacgtgccacattttctgtgttattgttccaggatttggctgtggtggtcctgttgatattaatacctctcatatcacctaattcttcaaaaggaggggttggtttccaagcaatagcagaagccatgggaatggctgcagtcaaagcagtagctgctataactgccataattgctggaggtcgtctgttgcttcggcctatttacaagcaaattgctgaaaatcagaatgctgagatattttcagcaaatacactccttgttatttttggcacaagtcttcttacagcccgggctgggttatcgatggcacttggagcttttttggctggtctgttactagcagaaacagagttctccttacaggttgagtcagatatagctccttatcgtggtcttctgttaggacttttctttatgacggttggaatgtctattgacccaaagctgcttctgtcaaacttcccaatgatctctatgatattgggtctcttgataattggaaagacattgttggttacatttgtgggcagggtatttggggtttctactatagctgccattcgtgttggtctcttgcttgcgcctggtggtgagtttgcttttgttgcctttggagaagctgtcaaccagggtcttctatcacctcaattatcatcgttactgtttttagtcgttggcatttcaatggctctgacaccatggttagctgctggagggcagtttctggcatcaaaatttgagcagcatgatgtgaggagtttattgcctgtggaaagtgagactgacgatttgcacgaccatattattatattaggctttggacgtgttgggcagatcgttgcgcaactcctgtcagagcggttaattccttttgttgcccttgatgttagaagtgatcgggttgcagttgggcgtgcacttgaccttccggtatattttggggatgctggaagcagagaggtactgcacaaagttggagctgaaagagcttgtgctgctgcaattactttggatacccctggtgcaaactatagagctgtctgggcattgaacaaatatttcccaaatgtgaagacatttgttagagcacatgatgttgatcatggtgttaatttggagaaagctggtgcaacagcggttgtccctgagaccttggagccaagtcttcagctagctgctgctgttcttgcacaagcaaaactcccaatgtcagagattcaggaaagcatcaacgagttccggaatcgtcatctgtcagagcttacagagttgtgtgctacgtcaggaaattctcttggctatgggttttccagagttatgtccaaatcgaagtctatcagctccgatgatgaaagcgaaacagtggatggcgcactagcaatttgaagacgattagataaaatgggatcccttgatagtactagatcgattgcactgttagtagataagcttgttgcatgtagaaaaatggaataaaaattaatgcaagagctgtcacaaaaatcggcgtgcaattttgtatgttagagtacttatatatttcttctctcccccaaaaaaattgtttgcatacaactcttcacaaagaaaaataatacactctagcagtgcacgtgaaaatgagacccttgtaagcagggaagaaaatagatgtcagaatgctgaatacttcccatgcttgctcaaaggagcatatggtacagtcaggccagttggacggttgggacctggctttgggtatgtttagtacaatttttgggtgtgtttgggacagttttttaaagag

SEQ ID NO: 31595 - DNA, 1095 bp, Zea Mays
atggaagcctactaccagttcagcaccaccgcatcgttccagcatatcagcagcagtggcagtgcagcacgattttctgaacaagacaaagctgatcttcaggctttaagcaaagaagaaaagacaggtattgtctccatgcaaatacacaggatgatcatgcttaactatcgaccctattacgtgccagcttctccctcatctttagccagctctctctctctctcactggaaaaaagaaaagaaacaaggacgcacaaaaagaacatactcacaagaggcagcgcggggcccgtcggcacagacacagacactgccacagccaccgtaccctccgaggcgtggcatcgatcttttgccaaagagcaactgcaggtgcagaagaacaaggtaggttcggtgctgaagaattccaaaggggggatggatggggtcagcttacgcttgttcatcacatcacaaccctgcaggggaatacgaaatttccgttatattcttttcatgaacctgatccatgaccccccagcttaagaccaagaaatgggccatacagcggcaaatatggtcttgcaatcttctgcatgctatcagagttaatactacgttatgttcttctacaggctaaacagtctgcaagcatgtgaatgtgaagaagtaaggtaacatcctacaactatctgttttgtttacgaaatatatgcattgaagcaaataaacccagatgcaaccaaatatgaaatgcccaacttaatacaattactaagctattactcttgcaagttaacggttccaaaagttttttgtgtgaatacgtaaggtggtaaggcactaccgcactctacagtcttaatatgagaggttaataacgtttctgtaagtcagttgaaaggatttatttgaatcaaacacaccccctgattatgatcaatttcctatccgtgctctctgttttccattgcaacctaacgaaacttggcacagtagaaactggaacaaatgcaggacgttatttacctcagctcttccggtcgtgcaatgcaaacggagggatgctaagaagcagcctagtcacggagaatgacagagtcggcaatc

SEQ ID NO: 31596 - DNA, 1727 bp, Zea Mays
gcgccgcgcaccaagcggccggtagcttttaacagggacaagcttcctctccctgccctcttttctctctctttgttcttgtctcggccactttgttccctcgccctcttcttttgcgcggcctgtcattcccctggggatcagccttggcgttgcctcatatgggggcgagctgaggagcaaagcggacaacaagaggctttcgatcgatctccctccctatctctctctctctgctatcccttcccctgcttccctcccccctagcttttagtagaaagaggagggccgggacgtggtgacaaggctaggctagcttggggccggcggagatcgatcgtcgtcgtcgacggccatgacatggtgcaacagcttcaacgacgtgcgtgccgtggaggacaacctggccaccgccgccgccgccaagaaacagcagctgcaggcctcctcccacgtcaacctcatcaggacctgcccctcctgcggacaccgcgcgcagtatgacgaacaggtgcagcaggcggcggcgatccaggacctgccggggctgccggcgggcgtgaagttcgatccgacggaccaggagctgctggagcacctggaggggaaggcgaggccggacacccgcaagctgcacccgctcgtcgacgagttcatccccaccatcgagggcgagaacggcatctgctacacgcatccggagagacttcctggtgtcggcaaagacggactgatccggcacttcttccaccgcccgtccaaggcttacacgacggggacgaggaagcggcggaaggtccacaccgacgaggagggaggcgagacgcggtggcacaagacgggcaagacccggccggtgttcaccggcggaaaactcagcggctacaagaagattctggtactctacactaactacgggaagcagcggaagccggagaagacaaactgggtgatgcatcagtaccacatggggtccgacgaggaggagaaagacggcgagctcgttgtctccaaggtgttctaccagacgcagccgaggcagtgcggcaccgtttcgtcgacagctagggacgctgtcccactggctgccagcgcgacgactggtcaccaccaccatgacggtggcaatggcggcgacgacgagaacagcatgctgatgaaggaagtaggcattgtagatttctatagccgggggggggggggggggggggggcgctaatcggctacaaccagacggctcctaacaacggggcggctgcttctgctatagtgggagctgctggctttgaggtgcacactacagtaggagctgctggctttggaccctgaccaagacgtgcaagtgcaactattcaactgatataggtagaagggagagagacaaatggaggcagggataatggcaccgtcatgaacgcaatagcttactgcaggcggtggacgagtttactgaaccgtaatgctggacaatatataagaggactggagtacgtggttgagtggcggcttgacgtacagatgctgaagtgtagggattggtacaactatacattgttcattaattgttacacatatacgtaacttgtcgctatcaattttttgtttaatgatatgttagttcttaattaactaaagggcttgtacatgcatgtatacaatgcacctttctttttgaagaatgcatctggtgtataagtttgttgattgttgctcaacccttcttcgag

SEQ ID NO: 31597 - DNA, 6189 bp, Zea Mays
gggactcctcaagttgcaacaaaaagactatgcaaaagctcgtgaacttctcgaggatgttttaaaggacccactaatatcaaatgttcaggctgataacattggcagtgatcagcatttgctgcagctaaggtttttgacattgaaaaatcttgcatctgttttccttcaacaaggttttgagttctacgataatgctcttcactgttacctacaagctgtagagcttgattcaaatgattcagttgtctggaatcatctgggaacactttcttgttcaatgggtttgctgagcgtatcaagatgggcatttgagcaagggcttgtatgcagcccaaacaactggaactgcatggagaaattgttggaggtgcttatatcaattcgtgatgaagtcgcatgcctttctgtagcaaatttaatacttaatagttggccatcacatcatcgtgctttacatgtgaagaagaccattgaatgtgctgaaccggtaccttttgcacctcgtggtattgacatacttgaacccaagcatgcaaaactcatcttttcgaataaaagaaaatccgttgatgatgaaatctgtcaagaaatagggacaaagaagagtaaacacagtgctacattgcaattgaatgaagcaaaatggttggcccttttagatggtatcctaagcttaataagtgcaaacaccgagaaggctggtgaatataattgctcaaatactgttgataggtgttcaatcagtgagggtagtgccaaggggcttgcttataacattatagacgttgtcatatctacagatacattgaaaagtgtggaaactgctggtggaaatggaaatgattctcaccatggtgagattctgccatatgattgcaaagctacagttaaagagaaagatggtaattcagatagggaacatccccatgaaagacggagcacacgccttgagaggctgcgaagtcgcaaatctggaaaagatgaaaatggatctgatggtaaagatatatcccatgctatgacccagtttctagaatcatttattctaaaaggaccaagccctgtagaaaaggcttattgttctggaaatgccgatgcttcaaatcctgatactcataactatacatccaacgaggaggcaaatgatcttaagcaatttctatgcaagatatccaagaattttggccctcatcacattggttatatgttacttgaggagatggctcatctcaaagtgccattccaagattattttgtcaagttaattgaactggacaaacttactagaggctgggctgaagacagatctgcatcgtgcaatttatttctagctgaactgtactatgatcgggctttgtgttctggaagtccaccaacatcttctgagctgtctgattcatcttaccatctttgtaagatcattgaatcagtagctctggaactgccattcaacatatctgttagagaaatacattccaccaacttggatacggaaagtagcaggacaggtgaatcttcaagtgaattaatcgagagaagtcatgaaaatggtcacatcaacatgcttaatgaccaaaagtccaaacatgattcttcttcaaacatgaattgtgcattctggattcgcttcttctggctgagtggttgcctgtccctttcatcagactgcaaagagaaagcttataaggagttcaatattgccctgtcaatactaaaaaatagcaacaaaactaaaagctatggagaggtcattcttctacctcacaccaaacttgtaaaatcacttacaactgacaggattcttcgtgaaatcaacttgatcaggcttgaatctctactttggaataatgatgagaatatcaacaaaataactcatacagagttcatgcagttgctacctccacttttgctttccaccaaagatgcctacgttggaaatgcatatggtccacaaagagaaagcgagaatgttatttcacttgagttgtctgccttggatgtcttaatatctgcatgtgaaaaagcaaaaccaatgaacatccaggtatatcttgactcccatcgaagaaaaattcaagttctaactgtggcagccggcatggttggatctgtcacacccctgaaagcgaaaggttcaagcaatgtggaatttgtggaagcaatgaacaggaaccggctagaaaatgttgtggaagcagtcaaagatgtgtctcgaaatgccagtaaagcaaaagacataatcgatcaatgcgataattccgatgggcaagatggctggagcccactaatgtctatcgttggtgatattcaatcattgctcttgacaatcatgtgtgctgctgtcaagataatactatcgagaaaactctcatgctctggaacctcctatcaggttgaccacttggaatgttcctgtctcatagatgcagccattgcattttgcaagctccagcaccttgatcctacaatatccatcaaaactcaggttgacttaattgttgcagtccatgatttgcttgctgagtatgggctctgttgtgctggaagagatggtgaaggggaggaagggatgttcctaaagttcgcaatcaaacatctcatggctctagatgtgaaactaaaatctcaactcaattcaaatgggatggaagaagatgcagttccaaaagacgtcagagcagaagacagtgtggccgatgaaccatcggttagtgacaataagcagaactccgatgatgaggaagaatcggagttagatgagattcagtcatgtcttgatagtgccttggaccaggcttttttctgcctgtatggtttgaagatcaacccagattcttgcagtgaagatgatctcgctgtacataaaaatacaagccgcggtgattatcaaaccaaagaacagtgtgctgatgtgtttcaatatgtcctgccatatgcaaaagctctatctaaaactggcttggttaaattacggagagtgctgcgggctatacgtaaacactttccgcagccaccttatgacttatttgttaacaaccctattgataatttcttggatggacctgactcatgtgaaaaaatactctctgaaatttgtgaaagcaatgaatctagggaagctatcctgaatgtattgttcccaggtgaaagaggctatgaagcattcaaaaaactctccactgccagctctgagccttattcagatgtttatgagaacttatattatttcatagctcaagccgaagatattagtgccaccgacaagcatacaggttttgttttgaaaaaggaaggagaagaattcgttgaacagagtgccaatattttcaagtatgatttgttgtacaatccattgcggtttgaaagctggcagaagctttccaatctttatgatgaggtggaagttgatctgttgctcaatgatggtagtaaacatataagcatcttggattggcgaacaaacacggatttaatcagaagggttgagatgggccgtcgacatagtcgacgctgcctattgatgagttcactactggccaaaactgcccctgagcagagcgaggcacatgaactgttggctcttgtgtactacgatagccttcaaaatgtggtgcctttttatgatcaaagagctactttgccagtgaaggattcatcatgggagacattttgtaaaaattctatgaagcactttgagaaggcttttgaaatcaaggagcagtggcttcatgcgttttaccttgggaaactgtgtgagaaactggggcattctttttctaaggcattatcatactacaacaaagccatgatgctgaatccaactgcagtcgaccctgtttacaggattcatgcatcacgcttgaagttactttacactcaaggcaaacagaatcttgaagctatacaggttgttgctgactacacatataaccagtcaacaaaagaaaatgtcttgagcatgctggggtcaatgactaaggttttgcagtcatcttctgataaaacatctttagacactaaagaggaaaataagttttttgagtccgatatactggataaagtgtggcacatcctttatgatgattgtctgtatgctcttggtacttgtgtggaaggggaactcaagcatttccacaaggcgagatacaagcttgcgcaaggatattatagaagaggtgaagcaggggacctggaacgggctaaggaagagctctcgttctgtttcaaatcttctcggtcttcctttacagtaaacatgtgggagattgatggcactgttagaaaaggaaggaggaaaaatccaaatgtgggtggatccagaaagaatctggagaacacggacctgtggactcttgagaaggcttatacttatctgcgaacagataagaggtttgcattgtgtttaggtgatattgttcctgttggtcttgggaagtatattctagttctaacggcagcaattcataatcctgagattcgtcgagcttctggtgatgcttctgttgagcaattacttgagaaaatgttcactgtattcatggatcatgcgaacatgtgggctgatataagcaatataccagaggtgaacagtccagaattatcagaaagcaatctttacagctatatccaccagtacatccatttgctcgagagtgatgtacgactagatgttctagaaggactaaacgagaagataagaaagcgtttcaagacaccgaagttatcaaatagtaacttcgctaagatatgcaagcatgcttctctggcatggtgccggtgtattctcatcaaactggcctcaatcactccactgcctgaatccgcagatgcaaccaatcagcctgcaccattatccaatgggcttctactctatgttgacttgcaacctgatgagcttcttatctcatcccctgatgggcctgctcaattcaaagggcttgacatgaactggtttgagacacttaacagaattaaaaacatcccggtcaagcaaacatccgaagataacttggagactgctgttacgttaatgaagagcacttataacttttatcgggagagcccttgtggaacatttccttcaggtatcaatctctacacggttacaccatcacaagctcctattgaagggctaccgccaaccgctgctgtagttgagacgctcgacttaagtattccaagaaaactccttctgtgggtatacactctggttcatggtcgttactcaaatatatcctccgttgtaaagtattgcgacgagatgaagttaagaagtaaaagaggaaccccagctgcgtctgcttcgtcacaagttgtgcagccagtgtcgcatagtaccgtttcttcccaagttgtatctaaagaaaagagctcccaagttgaacccgctgaagcagcacaaaatccttctgatctagctgccacttgcgttcctgcataccaagaagttggtggtgctagtgcctcgcaaagtgccattgaggcccagaaagctactgctgcggcatctcagctcactcgcagtggttcatcaagggcaatggaaaatgcacaggacggcggggagaggaagtaacgagatagagttcgattttttttatcctctatgctacatcgtatggatgcatatgatcctgcctgacgattctcaggtctcagctctccgtggctccgtgtgcaaatctctgccacgggcgtgttttaacgcctgattggatggttgcccgctggcgcgcccggccagcctcgtacggccacttcggacgcatctgcatcttcggaggtacccgcagatgtagatgaatggccgtaaaatggtttggtctgcgtctctttacatataaccaaataaaaactcagataaagttaactcatgtggtggtctatgttgagatgatgcgggtaaccaatcgaacggttaacaaattcaggtcgtatgtatatcctggtttacagttagtgtttcctaagtgcatttgtagattatagagctgtcaagattgaacgatacatctgtaaggtgttacaaatgctaaatgctaatcctgattttgtggctgatgctaaaaacctgtggactcttaattaccacagactgaactttccctcattttggcccaacaaatacaatagcagaggaagagtttcagttggatttggtggaacggtaggagcgtaaaatatcac

SEQ ID NO: 31598 - DNA, 2455 bp, Zea Mays
agcaagcaacgagaagggcggctttggcaggccgaggaggccagagaagagcagcagcagagagagagagagagagagagagagacgagttgggtgcagtgcagagaccagggcggctttgggttcaataatatcccatcactcacacgccacggcatcattggccgcgctccctccttcctcctcctgctctgctcgtctcctccgagtgagtcccaacagcagcaccacaccagcgcggagctgcaaagctcctcacggctgctttctcgtggcgcggtgcatgggagcgcggctctgagaggaaaagaagaggagaaaggcgcgcagggaggatgaagttcatgaagctgggctccaagcccgatgctttccagtccgacggcgccgacgtccgatatgtggcctctgaccttgcaacagatgttgtggtgcatgttcgtgaagtaaagttttacttacacaagtttcccctcatttccaagagcagcaggcttcaaaggttagttcttaaggccaccgaggagacgaccgatgaggtccgcatagatgaccttccagggggagcaaaatcgtttgaaatatgtgccaagttctgctacgggatggtggtcaccctcagtccacacaacgttgtagcagcaagatgcgcagcggagtatcttgaaatgaccgaggagatggagaaggggaatctgatatttaaaatcgaggtcttcatgaactctagcatacttcgcagctggaaggattctatcatcgtcctccagagaacgaaggccctgtcgccgtggtctgaggagctgaaggttgtgggcagatgcatcgatgccatcgcttccaagacatctgtggatcctgccaatgtgacctggtcatacagccataataacagcaagaagggaggagcttgtgctgaaatagtcgagtcggcaggaaaaccatcgatagctcccaaagattggtgggttgaggacttgtgtgaattggatgttgacctgtataggagagtcatggttgctatcaaatccaaggggagaatgtcacctgaactgataggagaggcacttaaggcatatgcggttagatggctgccagactcctacgatgcactggttgccgagggtcacatgaggaggaaccaatgtctggtcgagacactaatatggttgttgccttctgataagagctcaggctgttcttgcaggtttctcttgaaactgctgaaggtggctatactagtgggaggcggggagcacgtgaaggaagaactcatcagaaggatcagcttccagttgcacaaagctactgtgaaggatctcttgctacctgctacctcgccgcctaatgatggtacatatgatgttcggttggtgcatgatcttgtgcagagatttgttgcgagaaccgcgctgtctcataatggcggtttcattgagaagtctgatgagaagatgatcgagctcaactttgagcaagaatcaaccttggcggtgggagagcttgttgatggctacctgtctgaagtagcttcagatcaagccccttcactgcctatgtttgttgaactagcgacagccgtgcccgaagcggctaggccagttcatgacaccctttactatgcagttgatgcatatctcaagcaacacccggacataaataaatccgagaagaagaagatctgcagtctggtggatgtgaagaagctcagcacggacgcgtccatgcacgccacgcaaaacgaccgcctgcctctccggttggtggttcaggtcctcttcttccagcagctgagggccggctcgggcaaagaactcgccctggttgacaacggagaacacgcttgcacacggcctacgcaggatcagtgcgaaccctgcgaaaggcggataccgaagcatccagagtcactagataagcaggtgacgagcctgagcgcgagggagagccgccagcaccaccggaccagcgacagcgagcacaggggcggcggcaggaacagcttcaaagaccagctcgggggcctcctgccgcagtcgcggtccaggaggatcttcgacaagctgtggagcagcaaggggcaaggcgagcatggcggcaaaggctcggagacgtctggcagctcccagagcccaccgttgtcagcaaagcctgcagaagtgaagccctcccctcttcccgctgttaggaacaggaggtactctgtttcatagttttttttggctctcctagtttagagctctgggttaggttgctgtacagaaggaagctaatcactgctgcccatcctttttgtaagcagatcaacctgctgttctcaatgtgatcatccatgctgtagcttttactctagtgtaattccaactgggagcagagattcgccagggcctgcgttcttgaaaatgttattttttgaagtgaagttgtttttgtggcaaagataaaagaaataaca

SEQ ID NO: 31599 - DNA, 4626 bp, Zea Mays
atggcggcgccggaatcggaatgcggcgggagtgacggctaccgcgacctccgcggcgtgcgcgtcgacctggacacgggagcagccggagccgatgggggaggaggcttcgccgtctccttctggctctacctgtccgtctccgccagaccgtcctcagtgatcctccaccagatcacagcgggagatgacaccaagttgccgtttcttgctttaggtgaaggaaacaaactgcttctcttcccgttgatgaggctgcacagggaagctcctgctcctgctagttcctacccatggactgacacaaccaatctatcatctacgagtgtatgccctcttgagaaatggttccacattgggtgtgaggttactgaaaatgttatgtgtcttcacgttgatggtttcctaactgctgaggcccccctttgttcactgtttgatgagccagaccgtcaggatgattcaaaccaaattagcttagttggaaatgatggcaagcttgaaggctatatctataatattgaggtttcatatgtactaggagctataaaagaacaatacacaaagaacccaccttttaagttatctattgactattcatgctctgatggaatcgaagagggtgatgacggcatttggagcatcgttggtgggaagctctcttccaaatgtgacaataagctcttccgtattaaattctctacacttcacatgcaaagatattcttttctggaagcatattccaaaccgattcgctgtatatctcgaagccgcactgtccgccccttgggtcctacaaagcgggcgagttctgcaacagcaaatgaaattgacatgctcagtaatggccaagggtttgttagtactgacaaagtaaatagtcgtggacattcagtgtgtctgcatacgcccatgtttcccaagatagaaggtggaatggtggaggtagtagaggcccccaaaatagcatcacagaataagaatgccagaaaggtggtagtaagcaaagaagcacagaatgtcatagggactgattcctcaacatccaactatgacagttttgattcaggaagttcttggagtggatcagaaggagatgatggtattgaaaccttttcagacgctgtggttttcagatactgtctagacagcacatatgaccggtcaaagtttcttagaggtgcatctcttactgttaacaaagatgacttggtaaaacttgcagaccgagtctcgttatatagtggatgctcccaccacagaaaccaaatattaatgtcgaagagattgttcagagagggtgctgacacttggaacatgatctcaaagaacaatgaacgtgctctttggtcatctgccattccagagatcataacaaaatttacgaacattgtccattctgtgcgtaggggtttatcagagcaggatcttgaggttttaagaggcattgctggttgtggtgaggacataggaagagatgaatttgataggctatggtgctggttatacctagtggttgtttcattatcgagagagagaattaaaaagctgtgggattgcacagcacctagatggatagagggcttgattacaacagaagaagctgagaatgcactaagaagttccagggaattgttaaaggaggcaggaacatttgttctcagatttcctatcacccgaagctggccacatccagatgctggaagcctagttgtcaattacattggctctgatagctcaattcatcataggctactctctcttgattccagtgatgctagcgctgagaaactgcaagatttgctgctccaggaaccagaactatcacagttgggcagggttgatcgggtctcaatcaccatccggagatgaccaaggcttcaaacggttaaacttacattcaaaagcaggatttaggatgctgccacgagaagagggtcaaaagcatccaagagcatagcccataacacccattgcctgttgttaccatgcacaggttgtaaattggttcccttcgtagttcgtacaaagaggatgttttgccgtactagtgaggtctagtctagttgcttcagaaaaccaacagtaacatcagctatcatgtgtgttgcaaaaagaaagaagctgtcatcatgtgcctcgagactggaggattttcagtggctaacatgttgcatataaagctgacagttgatttacggagtacaaattatttttgggttccttttcaatcctctcatttgggccgagagaaggatagtgtcgtcgtagcccatgtcaattttgaggtcaaaagcatcggtccgtccactatccaagccccgaattacgtcacattctccaaaatggctgcgggtcgcacccggcgctcgtccctccctgccgcaaccaacgccaccgcttcggcgcttacccatcagatcagacagacaaacaaggcaaacgagaccctagcgcagcatggcttggacggctgcgggcacagtttgctggcgcctcctccgcctcccctccgtccgctgccctctctcgtcccgggcccggtgttccgctgcgcagagcctagacgccgtggacaaggagtatgccgacctcaacctccggcctctgtaccccaacaggggccatcacatgcgcatacggtagcacgtgaacccgctcagctcatccttctcggagcccacggggccgccagagtggaaggaggtgttcgacgaccccttgcttcccctcatggtcgacatcggctgcgggagtgggaggttcttgatttggcacgcgaagaattctggcaagagtcaaaactaccttgggctagaaatccgccaaaagtttaagagagaaaagagaagatcagaacagttttagaaacaaagcactgggaacctcaagctcaagcagccccccgccccaaagcatgacacagcacacagactgcaccctcataacacggaacaaagataatgaactgcagaatcgcatgccatcatttcgctttcaaagacacttgctttgctgtttggaacaattctcgaagatgattcagtttcattctttcctgagtcccacattacatagattgccaggccgttgaaatattttggcataaaagatataagcgtatgccagtatcacacggtccattgcgcataatgcaattatcttgatgtggccagccccttaaatccaagttgtctgctgcagaattttgtcttgtataagtgtccaagcaaaccatttaaatgtgcctttgaactgcacccgttggtggagcgggcacagttctgggtgaatgaattggagcttatctattttatgtttgcaaatgcaacgatgtcttttgagaaaatcatatcgtcataccctggtcccctgtcacttgtttcaatactgtgtcctgatccacacttcaaaaagagacatcacaaaagaagagttctgcagcaaccattggtcgattcaatcataaataatctatgtttaggcggacaggttttcatacaatcagatgtactggaagtagcggtagacatgagggaaaggtttgatgggtactctggtattttggcacatgttaattatgtcgatcaagatcttcagtgtgacaatgaaggatggcttctggacaacccaatgggaatccggacagagcgagaaatccatgcagagcttgaaggagcaacgatatacaggagggtgtaccaaaaggttagagatgcttctttctagctgtttatcagctacagaagttgtccgaggagtaaggtttccaagaatgttcattgcatgtatttcattaagagaagttgggaaaaaacaaagcatccaagtacaaagcctggcgaaccaaaacgaagagaagcccaagcagtaacacacctgatgtcttcctgcttgaaccatgccacaagttgcctttactacatcaagctgcattacatttctgacagtgcgcttgtgcacatctaatctttttttttcacctgatgcaatgagtcagattagccaatgcttttgatgaagatgacaactggcaaaagtgttcctttgttggtcaaattgtacttatggtgtttagcatcaggtgttgtcttcgttctgtccataattcaggtctggaattggtcaccatctatcggtatgcagagagtttgtagaggcaatccagatgaggcaatttgatgtgcgctaggattgttcaaactttggtccgctcaacgttctcttgacttggtagatatacaagaatggacaacgttttcttgacttggtaaagtttggtcattagtttgtgaaacagaatgctgcattgctcttggcatttgataagtgacaggtggataagacgacaccgaggtgtgggcactttttagtgtttgatgtttgctaagtcctctaccatcaggtcaatacatatgttaatcaatttgaataactccttaattgaaattttgttgctaatggtatcgaattaactcaccattgtattcggcgaataatgtttcgttgcaacacagtcatattgtactagtgatagctgatattgttgggttgcccgtgtattttgtaataagacacataaatatatgttctattggttagatgagtgtgaatgctaacaatcaa

SEQ ID NO: 31600 - DNA, 354 bp, Zea Mays
gctatgaataggacaaggcgaacggcaggggtgggtagttaccagctattgggccgcgcagactcccatcgacgatggatggagcagggctgtccttaccgagcccgacgagcaattgccaccaatttttggccaccagagctcaacgataaccatcgacacgctcctcaagagaatgcgaagctccctgaccccatgctccaccccgagcgacgacgttcctcagtttcccccgtggcggcgtctcttcttccgcaccgatccccccggttcttgtggcgaggcattacgcgttcttggggggctcccatgctggcaggggctagaggcctcatgattttatagagcggcggc

SEQ ID NO: 31601 - DNA, 4212 bp, Zea Mays
ctctcccaccaaaccaccgttctaaacgctcccctagtcccctgctcagcttctccagagatcgccaaagaagcagcatcggcagtaagctctgcggcgatggggtacacgtacactccgacatactactcgggcctgcaggacaccatcgcgtcgctctgcaagtccatcctgccctccttccgcgtgggccggcggctcaccgccgaccaggccgccgcgcggcgccacgccgagcagctcaagtggcagcaggagtccttccaccgcatcctccacctcgccgcgctccaccgcgagggcatcgctccggcctccgacgttgccgccttccgcggaaccatgctcgcggcgctcgtcgcgccgccgcagcacctcgagcagcccgctgtgctccgggacaagctcctcttcctccaggagctcctctacgccaagtgcgtctccgcggcggagtacaacgcgtccaaggcgcccctcgtgcagcggctcgccgcgttcggcgtcatcgtcgactgccccgacgcggaggtctcggccgaggagtggtcggagatcgacctccgtgacccgcctcctcccgccactgcggcggcctccgacaagccgaagcacaaggccttcgtcacgccatggaagagcagatccaagaaggaccaggacgtgaacagcagcgcatcaaggccgccgctggcccctgtggaccataacaacgccaccaacgcgccagtcttcatgaccgagagctcgccgtcggaaacggttccctccgggaaggccgagaaagggaagaggaggcatctggcagggatgttccacagcggcggcagtggcaccgagaacaaggagcctgcgggggaggaaggggtcgtcgagaaagagacggtgagaggtaagaagaagagctcgtgggggttcgatggcatcaagaagtggacgaaagccggtgcctgtaacagtggcgaggcggcagccaccggtgagcagccgcagcatgttcctccgcgctcatcttacagcgagtgccagctggaggcgagccccatggctgcttctggaccggatgccaagagggccaagacgaggctgcactcggacacggacaatgactctgcttccgagctgctgcgtgacaaggttctggtggagaacacaaagaaagagctctcaaggattcaggctgagctatcatctacaaatcggaacttgaacttctcgaatcagcagatggaggccatctcaacaaagcttccggtggacaagtctgacctcaagtcctacttcccaaaggcatggtgtgatcagcacggggatggcgtgatcaccgcggctaaggaagggttcaagcagcacgtcgaagagatggagaagcagagggacatcactggcagtgagggctgggctacctttgaggacatcgaccttgatgacaacttcaacccgagggccttctctcgccaccagccggactctgcggtgaaaggcaagaaagtcaatgaaagcctcaccagcagtttcacaaacccattctacagcgagaagaacccgttcttgaacacaaactacaactgaatgatgttgaactcttttgcgttgggatgtatcagtccgtttatatttttgttactggtataatgttgttattgtacttagggttcaattgttacattggatcagggttgttgtttatgacgtaagaagttgtatggttggagattacttgatcattcttgatatctactaatattgaaatcatttaggtgtctagttgagtttcgataagagtccaaacattgagattggcctagggcccggctctgcctacagcgtccgtgtaaacttaacgccataggaacagacgccgactccgataatatagtcccaccaataacgtaaacatgaaattttgtataaaaaaactaaaaatgtcagcaatatgttacataaaactaaaaaattacaatgaacgctgtactaaatcgatgcatacaaaatcattgtttgcagtttgctgatgtgctagagacaaatttatcttctatgcaatccgcgtcaacacgaggcaggcagcggtcatgcgacgtcactaagcaggtcccggtagctgacacgtgggccccggttccgtggcgctgtggcccacggcgacgccttgctcgcagttcgctccacgacatggcggcctcggtgctgcaggccgagcgccacctgctcctgctcggcagcggccgcaaccgtcccctcctccgcatgctcccgccacgcgtgctcttcccgcaccggcgccgcagctggccccgggccgtgagggtgtcacccggcgacggcgagggcgcgggagggttcgcgagcgccgtggagaagcgctcgataccggggatagttgaggaggaagggtatggagcgaggggagaggagttggaaggggacgtggccggggctttggagcagaggtggcctccgtgggatgggttggccgagcggtacaagctcatcggcgccacctccctcgccttcgtcatctgcaacatggacaaggttaacttgagtgtcgcaattattccaatgtcacatcaatatggttggaactcatcaactgctggcttagttcagtcctcattcttttggggttatgcattgagtcaactaccaggaggatggctggcaaaattgtttggcggaaggaaagtgcttgaggtcggtgttgtgacatggtctttggccactgctataattcctgttgtagcaggttttatgccagggcttgtactatcgaggattctggtaggtattggagaaggtgtttcaccatcagctgctacagatttaattgctaggtccattccttggcaagaacgatcaagagcagttgctgttgtttttggtgggttgagctttggcagtgtcttaggactcctgtttgcccctcccatcattcagaactttggctgggagtctgtcttttacatatttggccttcttgggattgtttggtgcttaggatttgaatctcttatagtgcaacggttcggtgacaaaaaaagcctattaaatcttggacaaagttctactggatctgatggtcttatctcatatgctatgtcttcggaatcatcacactcgtcattggaagatctgcaaaattcactaaaggatgtgccttggggggcatttttcaaaagcaaggcggtctgggcaatgatatatgcacacttttgtggaagttgggggcattatacttgtttgtcttggctaccaacattctttagcgaggagctgaacctgaacttgacagaagcagcatgggtgtcagtccttcctcctttgggttcaatgatcattacatctattgcagcaccttttgcagacaacttgatatcaaatggagttgacaccacgaaggtgcgaaaaatttgccaaacaattgcctttgtgtcacctgcgactttcatgatgctttcctctgtggatcttggactgcctccctgggaaattgttgcttttcttacaagtggtgtagcactctccagcttcgcattgtcagggctttattgcacacatcaagacatctctagtgaatatgcaagcattctcctgggaatcacaaacactgtaggcgcggtgccaggaattgtaggcgttgcactcacaggctttcttcttgattcaactcattcttggagtatatcactctttgcgccttctatcttcttttacttaactggtactgttgtatggttggcatttgcaagcagtaagccccaggatttttccaagtcaggacctgagtctgagccgtgaatcgtgatgtatggtactcctctgcacataaggatcgtttcacaaggaaaattcgttttgagtttagacaaaagaatggagttctagggcagagaatagatgttatgttcctcttcagtcagtagcagacaagaggaagccactgataaggggacaatgcttgcgtgtatatagtataatgatgataggctttttttctggttagttttcacattttgatatggttttgatttttgaatgtgtgcagtcaggtccgcggtccgccagtttgtagtatcctgttggtttcgggtgtcttggttgttgagtgagatttagaatgtgctgatacttcgtttcagtgcttgtactttagattcgacctgttacgaaaaaaatgaagagtacccactgaattttaaattacaagtc

SEQ ID NO: 31602 - DNA, 905 bp, Zea Mays
tgagatactcacagatatctttatttttcattttctgcaaggcgaatgagcacatctatctcaatcattgcaagcaaaccgatgaagaataggggggacacatctcacatcaccgctcggatggaacgcactttgccaggcgaccaagaggaattcggagagtaagaagaggcatgcaaaaataaaagccctagcagctaggaaacgtagattggagagtgtgtcaaacctctgagtagcaacgagacgaaggaaaatgagtgcgcgagggaggaggggacacagagtgtgttccatccgagcggtgatgtgagatgtgtcccccctgttcttcatcggtttgcttgcaatgattgagatagatgtgctcatttgccttgcagaaaatgaaaaataaagatatctttgtgcccagattcagagatggtttgactacctaatcatatatgcatggtacaacagccataaaactgaatattatttggctagaacctaaaatggcggaaactcttaggaatcatgtgcaaaccgtctaaagctgactgttggatggggttggcgaaggtgtgcttgaataaggatcacctgaaggcgtggagtccctagctgctggttgttgtgtgtcctagcgggcggcagtttgagtcccctgcaggcagtggcggctgtaatatgtactagtataggcatgcggacaacaattggaaattgtatgattcatgtgatcattttccttgtattcttttctattgttggttatatatcagattttagaagaatattgtgatccttttccttgtattcttttctattgttggttatatatcatattttagaagattcttgtgatcattttccttgtattcttttctattgttggttatatatcagattttagaagattc

SEQ ID NO: 31603 - DNA, 1675 bp, Zea Mays
gttcaaggggaggcgggggagccacggcggcggagggaattgtttaatcccccgtcaccgtctcctatcgccatcaccccacccgtcccccttggtccaggcgcaggcgcgagcgcgacgtccggcgtccggcttcggcggcggagtggagcgatcccgatccccacaaggaattccatcgctgtcgtggcgtttggtggcgctcctcccggccggcaagcaggatcaggaaatcgcacggaggtgaggatacacgggtgcggaacgagagctaggcgaacctgtctggtacctcgcggcggagatggacgagaaggcgacgatggagagcaagctgtcctcggcggcggccttcgtggaggggggcgtgcaggacgcctgcgacgacgcctgcagcatctgcctcgacgccttctgcgacagcaacccctccacgatgaccaagtgcaagcatgactaccatcttcagtgcattcttgaatggtgccagagaagctcccagtgccccatgtgttggcagcatatcagcatgaaagatcctatgagccaagagctactagaggctgttgaacaagagaggaacatccgagctaatccttcacgtaatactgctgttttccaccatcaaatgctgggtgattttgagatccctgtaggtgcagatgatgcagaacttgaagaacgcattattcagcacttggctgccgcagctgcagtgcgtaggtcacaccgtcatcataatagaagagatgggcaccagagcagatcagaagcaagtagccacccacagtttctggtgctctcagcagacgagcgcacaatctcaggtcaagaaggggactacgaacaagcatctgctgtagcttctggccgccctttacgtacacttgttgaacaagaacgcactcgagggttagcggatgcttccagtccatctctccgttgttctactcctgctgatagtactggtagatcaaacaataggatttctgggatcgaatctacacctgtggatcaagacggaactggaccatccgctttacaatcaatggcagtaactctcgacaaacagaactcctgacaaatggagcacagacacgcgtcttacctgtgggcattcttgacaatggcaggtacagggatttcataatcaaagtgcaagtggatggagggagaggtggttttctcggagcaactctttactggatcttggttctgaggtgaggagggaggtcaacgcggggattgctgcggtgtctcgcatgatggaatggcacgatgcaagggacgggacgggagcggggccttctcctacctctgcatcaagatctggttctcagtgaaacactctgcacttgaaaggaccgatgcaaatgtaaagattaagagcatgcaaggctagatgaagcagaggtttgacggcacggaggcaaaacggccttgtcacgtggccagcccatctcgaattcctcgaagcaggcaagtagtagaagagcacgtgcaagcgccagagacggggcaatgtgtatagggatggagccagacagcgcgcaaaggtgcgccgccagtgacaatccgcaacacagccagcgcggttagtagcgagcgtgacagacacgaggacgacacggcctgcgcgcggaaggagacgtggatggaggtagggctggaaatg

SEQ ID NO: 31604 - DNA, 1387 bp, Zea Mays
gcaacacgtagtcccaccgcacccgactccttcgattatttgaatatagattccgtgggaaccatccgcccgctcgccggggtccagccgtgcaacacataacacgcgcccgcgttggcgtattctattcgccaagagccaaggggattggggaggccgtccatgttgcgtgttgtttagacgcgccaaaaggcaaaagcgtggaggaggagatccagggctccgagttcatctacatggtcgacgacccggccgtctccagcgtgatactggggtttgatgctcccaggaaggaggacggcgtccaggacaaccccggcgccaagaagagatcccggccggagtccagcgcgccacccggcaccaaggcttgccgtgagaagctccggcgagacaggctcaacgaaaggttcaacgagctctgtgccatcttggaacccggcaagccacccaaggccgacaaagtcgctatcctaagcgacgctgcccgtctcctgaaccagctgcagggcgaggcccagaagcttaagcaatcgaacgaatcgctccaggagtccatcaagagtcttaaggctgagaagtccgagctgcgagacgagaagacgaggctcaaggctgagaaggagaggttggagcagatgctcaagggcgtcgtcagccacgccgcggtggctgctccggggcccttcgtcccgcaccctgctgcggtcgctccatctttccaccaccacccggcggcgtttgctcaggctggaaagttcgtcccgtaccccagctacccgccgccggctgcgttctggcagtggataccgccgacgtccctcgacacgaccaaggaccccgcacactggccgccggtcgcctagccgacctaccacctcaccgtggcatcattcatcggtgatgcgttgccgtgtgtactgaatttgatcgaagcatgcctgaaaaaagaaaccttggctgctgctcgtgtcaaggacgtgatgtgctgaagttcaggcgatctaggtcggctggagaagtctatgtaacagccataatgctaaagcaatgaaagtgatatattaattgaatcgggctagtgtttcctgaaactacggttatttagacattgcctggaaggctagaacaatgcaaacttgggtaacattgtgacaaagatcttaagtagtttaccatctccatattcaaactccactacgtgtagagtgcaaaacagtgtttagacaatgaccatataactgaactgctggaggtctaacaatgcaaatttggctaacattgtggcctgcaatatgagaatatgttatacaagatgtatcagaaacaactactccctctgtttttttagttgttgctggatagtttaattttgcattatccagcg

SEQ ID NO: 31605 - DNA, 4080 bp, Zea Mays
atctgcttgtttcattgagtaaagatatcagcatattatgatctcatgcactgtctcatttaacttaactcctgattcaaggctcttaggtgaattgcatattgctctgttgaaatctatcattaaagatattgaggatgttgcccggactccttcagttgctttaggtgtaaatcagagcagttctgccaatcctggaggtggtcacccacaaattgttgaaggggcgtatgcttggggcatcaacatacttaactggcagcaccacttgaactttcttacatggccagaaatattgcgccaatttggtttatgtgctggttttgggcctcagttaaagaaaagcaatgctgaaattgtccatcaccgtgacaataacgaggtccataatggtgtagatgtcatttccattctgcgaaatggttcagcggctgtgaaggctgctgctttaatgaaagaaagagggtatactaatcgcaggtctcgacaccgtctgacacctggaacagtaaagtttgctgctttctatgtactgtcacttgaagggagcagaggtctcacgatattggaagttgcagaaaagatccagaaatctggactgagagaccttacaacaagtaagacaccagaggcatctgtatctgcggcattgtcgagagacactaagctttttgaaagaacagcaccttcgacatattgtgttaaaactccttacagaaaggacccagatgactctgaggctgtgttgtcagcagcacgtgaaaaaatcagggtttttcagaatacactttcagagtgtgaagaagtggagaaggatgtggatgaggctgagagggatgaggattctgaatgtgatgatgctactgatgacgctgatggtgacgacgtgaatattgagggcaaggatgccaagtctcctctagttggagctcaatatgacacacaaattacagtagttggtgatgtaaagaaagaatcaaacagtgtgatgaacatatcagtgccaccaagcattcaaattaaatctagtgcaagtgtaccgttgcatactttagacagtaaagcaagtagttcaactgacccacaagttggagatgatgataaagacactgagatagatgaaagtaaccaaggggagtcctgggtacaggggttagctgagggtgactattgtgatcttagtgtggacgaacggctcaatgctttcgttgcgcttattggtgttgccacagaaggaaattctatccgtgcaattctggaggtaatgtttatattgtgattttgttatcttgctattttcctattgaacatcatctgaacaacagactttacaggaacgcctagaagcagcaagtgctttgaaaaaacaaatgtgggctgaggcacaacttgataagaggcgttcaagggatgactttactagtaaggtgcagtatgattcttgtgtgggtataaaggttgatacagatcaaaaaaataatgctgctgaaagtacacttgtgccagtggataaccctattagaaacaacaacggaaattccagtttgacgaacaacgatttacttgttgataagcagaaccagcttattactggtgatgtatttcaacaatggaatggtgtaagccaagaattgagtactaaccccgaaagcttgtctgttcagcaatatgcttcatctgagaaaactagatctcagttgaaatctttcataggtcacaaggcagaacagctatacgtgtacagatcgctaccccttggacaagatcggagacggaaccggtattggcagttttctgcatcttcatcatcctatgaccctggttcgggaagagtcttttttgaatctagagatggatattggagggtcattgattcatctgaggcgtttgaagctttggtatcttcccttgatactcgtggcatccgtgagtcacatctacactcaatgttgcaaagtatcgagccaacttttagggaagctgttgagaggaagaagtgtgttagtttagaacacacaactgggtggactgacaatggaagtaatgaaagtccaaactgcaacaatgagtttggaagtccatgcagtaccctttctggtgttgcttctgataatcttatggcatattcagatactttcaagatagaaattgggcacaacgaagctgagaaaagttctatctcgaaaagggcttctgtgtttctgaaatggatgtggagagagtgctactgtcaccaatccacgtacaccatgaaatatggaaagaagcggtgccctgagttgattcaatcttgtgaccattgctaccagatatacttagctgaagaacaacactgttcttcttgtcacaagtcattcaaacccattcacaatttcttggagcacttatcacaatgcgaagataatcagagaacaaatcctagttggaagacacaaattgtgggcctttctgtacccgtaggattgagattgctgaggttgctcttagctaccattgaggcttcagtaccggcagaagctctcctacctttttggacggatttgtatcgaaaatcttggggtgtgaagttgtattctgcatcatctgctgaagaagtcttgcaatgcttagtgtgctggaaagtgcaataaagcgagattacttatcatctaattttgaaacgacaactgagttgcttaattcaaacacacaagatgctacccagaattcagttggaggttctggatctgccactatacttccatgggttcctgacaccaccgctgctgtcgccttaagattgttagacttggatacttccatctcatacaaacttcattcaaagttggtttcaaataaggagcaagaagctggagatttcatgaagcttccactgagatacccttctattaataagaacaaacaagaaatagaacagttcatacctattggttttgatcaacaggatggaacattgctaactaacagcaatggccgtagaggtcgtggacggggaggtagaggtggaaggggaagtagaggaggtagcaggggaggtagttctcgtggtggtggtggtagggttcccaggggtattggtagctcatccaggattcagttcagggatgacaatagtgtgccctatgggagagcccctcgaaagaatgtacgtggtgggcgtacccgtggccgcggccgcggccgtggacttcgaactgtcagacctcggcaaccatctgaattcagtgccacatcaattccaaagttaaacctattgggcagctttagcatgttaagtaaggcaaatcacactggcaatatgcattctccagagagcttgggtgcagaagagtgggtcttggagagaagggaatatgtcaaggatgatgatgacaatttggtctctcgatatgatgagtcagaggaggaaaatggtgagcctatgaatgaggaatatgatgagcagatctcaggctatccaagggacaattctgagttcagccccatacagatgatgggtgatgtgagccacgatgaggatgctgaaggggatgagggcgaggaggatggagaggactatgaaactgaagatcctgctggtgatgaggatgatgacgttgagatggattgggatgatgacattcgggacaacgatgatggtaatggagcagccaacgcagatgaggatgaaggtggtacatcatcatattcttcagagtatagtgagtgatgagagtggattgaagttgtgcaggtttgtggtttgccaactatgtaagaggctgccagttctaaactgtgctgtggctatggccctatttctattcatttttaactaaaatttatttagggtcttatcattttgttaagaatcatttggatggtgacccattaccatctctagttgtggctcgttattgcatagaagctagccgacagtggaagatcggctttgtacagggatgttcgaaacttcgaatcaggttatttgtggtgtatatataatgccaaattaccaatcacaagaagtaaaaaaaaagtcattcactgtctgtttttttgttcttcagctacatttttcattgctatatatagggagag

SEQ ID NO: 31606 - DNA, 2974 bp, Zea Mays
ctcgcaagaaaaaacctgaggtcttaactcggatcacgggttgaaatttgtgttggtgacaagccatgaacagcgcaaccaccagttgttaagtaaccctcctgtaaacttgaagcaaccgaagcggagagcagaaatggtgttccaaaagaggtcctcgtcagagttggaggcgtccggtggaggccaagtcgcggagatgccgcgcgttcccaagtctgcgaggggcaagagatcggtcaggaagaaggaggcccagaacccgccccagatgtcagcattcgaccttctcgcgacggtggcagggaagctgcttgatgagggggtgggctcgctggggaacatgagcgctggtgccccagctttgactgcatgcgcgaaggatgtccgtgtgaagaaggagcagtgtgacgaggaaatgaagcagttcaagcatgaggtgacagatcaggatagctgcaatgagagtgcaattctcccgcacattgtgttccagcgggcggtgaataatgctcggaatgaggatcctaaggcgaagtctgaggcccaggacaaggaatcctccatgatcagctgtaccaaggctgaactgggttgtaattttggtgtgattgcagataggtggtcgcctgaatccgtggaatcaggagccttcacaggagatgcagtggcgagcctgatgccacctgccccagcaggatttcataagaatgcacccgaaatgtataatttgcttgattcaatggatgtggatgtcaagcctcctcctttggtcagctctgacagcaccggcgagatgccattgtatggcgataaagttcaccgctcaacctccttaccaagggtctcgaagggagtggggttttttgctgtagatagagatgatgacgacgataagtcctctgggtgcactcatcccagcaccaccactaacaaggatttcaggtccaattgtacagctgagtatagtagggtaaggaagttgctcaccagtaagtacaggaaagttgctccagcgagggtttacaaatctgatctttcctatagtgatgttgatcggaagccttctttccggaacaaaaaaatgcattatacacgacagaggacacaaaggagtacattcaagcgtaggaagctctttgatcgccattcagttctagcatctgaatttggtaccgcacatggaaagggaaacacgaagaaggttaccggaagagactcccatgctgtgtctttggaagcaaacaaggggactagttcaacgccattccagaaatctcgtgggtcaaatgattgccatgtgaaacttaaaattaagtcttttaaggtgcctgaacttcttgttgaaatcccagaaagtgcaactgttggctcactaaagaaactgttctcgaggcagtgactgcgattctcggaggtggtctacgtgttggtgttcttcaccatggaaagaaagttagagatgataataaaacgttgattcaggctggtattggtcaggaggatatgctggacaaccttggcttttcacttgaacccaactgtacacaaaacccacaagtccaagctcctgaagatatcagtttcctggaaaccattgatactgctgaacccctcgcaaggattgcacctgctgactcgtcttctaagcatggtgaagttgacctatcacaggagtttgcattaaccccattagcaatgaactaccagggcagtgatcatgattctgtgcactcccctgggggcgtctcatcgcccgataaagtctccacaaactcgcgagctttagttccagttccagctgcagatcccaatgcaggagctatagttccagcgaataagtctaagaggtcaccagagcaggggcaacgcagaatcaggcgcccgttctctgttgctgaagtagaagcacttgtgctcgcagtcgaaaagcttggaaccggaaggtggcgagatgttaaacttcgcgcgtttgacaatgcgaagcaccgtacctatgttgatcttaaggacaaatggaagacgctggtgcacaccgcgagcatctcgccgcagcagcggcgtggcgagccggtgcctcaggagctgctcgaccgggtcctggcggcccaggcctactggtcccagcagcaagccaagctccagcctaagacgcccccgctgctggctgaggctcgcttgctcacctaataaattcgatgatcctggctgatggcctcctccgaggccgttgcagcctttgtataaagtcagtaagtcagtcagtcccttcacaggaggtttaaggaagatatattaggaaaaaaaagaatacacatataaggtacaagaagcattgaccgatttgttgtaatatctactcaccaacagatattctttaagccaggattctctctccttgtgaatttaaccaaaggaaagggtatttctttggcaaattgtacatgttgatggtggaagaagaagatgatccatgaactgagatctggggtgccattgctcacaatttttgcagttgtgactgagaaattgaaggtcctgcttgaccaagctcggctccggctccggcttttggattctcctgcgaagaagttgttgcctcctcgcagaagctgagagccgaacagtgtatttggtttgaattgcagcctatagtataatttgattcacccgtacagacggccacaaaaagccgtaaagggagggtagcttcttttgttgagtctaggcttgcgagctgggccaaagcggcaccgaaagaaagcttcagattcttttgttcaattaaattcattcttttgttagtggacagtgacggaaggataggacattaggagggatggatctttggttctcttttccttttttttcttctattaaattagttgtactatgttatgtcaccaatcttgtagttaccctcaaatttgtaattgatgaaattaagaaattggaaggaaatgctttcgtacca

SEQ ID NO: 31607 - DNA, 2106 bp, Zea Mays
ctttttggaagtttggctctgttttctctcaccgcctgttctcccccgcgcgcgatggcggcggctccggcgagcgtcggctgcggcggcgcgtactcttgcgagacggcggagcgtacccgcgagtggatgcaggccctggccactttcctcggccgccaccgtccgctcctcgaggcccacgtcgtcaactttttcaaggctgtgggagctagtggacgccgagtggatggagtgcctccggcgggagcccgtcgagagcttgctcaagctgccatctggatgcgtccaggagcactggcctgctacactgcgagagtttgtgcttactgctaggtcgcttgtgattccacgggagcagaaggctccgcaatcgcttgtatctgacattcatgtagccccagttggcactgttctcgctcagggcatgaactcaaagaagaagcacgaaattgaaaatctagctgctgtggttcatgcaattgcaaagaggtgtggagccaagacagtggttgatgtaggttctggccagggttatctcgcacaggccttatcttttgagtaccaactccgtgttgtagcaatagatgcttcatcacaccatgcatcagttacaattgctcgtgcagaaagaataaagaagcactatgctgctaaatgtgtggagaagcaactgctcatggtacctagggcagtcacctgtcatgttctttctagtgacacattggcagcagtcacattagatgcatgtaaggatgacaatggagaacatgtgagagatactaaaacatctactaagaaaatcactcaaatccaggaatcaactcagggcacccctccattaatcctggctggtcttcatgcatgtggtgatctttcagttaacatgctaagagtttttgtgtcctgtgaacaagtaaaagcattggtaagcattggctgctgttacaacttgctttctgaggatacttatgaggacacagatacctgccctggttttcctatgagcaaggctgccaaacattctgaattggtacttgggaaaagcatccgtgaccttgcatgtcagagcgcagagagatggagaaatctcaccatggacattgcattgcaaaattttgatgtacatgccttccgagctgcatttcaaatggtacttgagaaatattttccagaagtgtcaaggttgagtccatcaattggaaggcaaggaaaagctcttcgacgtcagaggcttcgaaaagttgtggaatcacaaatgactacaaagaaaaatgatgatttctcctgttcaactttaaaggaacaaaacaagaacacaaacgatgttcatccagtcatacatgaagttgacacagggccagatgacatccatcagaacgcacatcaaaagttcatcctgttcaaagatttcacattatctggattaggtcgccttggctgtggctcagtggaagacacgagtcttcttgaaatatggaaggacgtgcaacccttctctgaatatataggtcccttttggtgccttcgagctgctttaggtccactggtggaaacatatattttacttgatcggttattgtatcttcaagagcgaagcaacctagttgaagcattgctgtttcctctgtttgatcctaccatttctccaaggaacatggccgtaattgcttggaagttatgtgcaaattcttcagaagcatgacatggtaaatcttctgatgataggatatgcagttgatgggatggtgtgttggtaccaaactataagccagactattgtcttatggcagaacttcttcgatttagatacagttattgtattgctgtcccttttagaagggcaggcctgatacagaggtgagagctgtctcactgaatcaccaggtcacggtttcgaagcagcctctccgcatttgcgtgggaggcttgcctcggtttatcccttatccaagcctctagcactgggtgtgctttattttaattgtattgctgtcctcccatataaaaaaaacctgaagatagtattgtctttgaaattgtgagggcaatgcatttccctttcaaatcacctggtacatgtcttgtcccccccccccacttccc

SEQ ID NO: 31608 - DNA, 266 bp, Zea Mays
gcgcgtgctgcttaattggtcgtcgtgtaccggtgtacgtcaatccgccggggctacagttgccaggtggcctgcaccgcacttgctcaaatatttgaattaattatacattctcggagcagatagggtacttctgtgtgagtgtgtccattatgctatctccaacaaatttatcttagctcttattttgaactttactttataaacaatatattttatatgatcatatacatgatctattgatcacaaatttaaactgttttaac

SEQ ID NO: 31609 - DNA, 3237 bp, Zea Mays
gtagtgccgtgctcgtgctcgtgctcgcgaggtacctcgctctctcctgacttcccgcgtcggcgtcgccggcctcctcgtataagaaccgacatccgacacgccgccttcgcactcgtcaacctctccgctttgcctccctccctcgcgtccgcgttccctcccgcctccagatctcgatgcggcagcggctcccctgacagcggaggcgacgccggcaccatgtcctcctgcgacgacgaccacgcctcgctcctcagatcccacgctggggcctcgtcgccgtcctgcccctcgccgcgcggttcggcgggacatcagcaccacgccgacgtcgaggcggacgaggccaccgtcaccgcctccccgaggctcgccagcggcggcgggggtgtgcgcggtctcctgcgcaacctcgagcgccgcatgtccgcacgcggatctgggcctgggcgtcgccagcaccagcattatcagcagctcgatcgctccgtggcgatcgagtcgccgccgtctcagcggcagcgggagagagcggcggcgggggatgacgacgagctcggggacggggcgccgcccgagtgggcgctgctgctcatcggctgcctcctcgggctcgccaccggcatctgcgtcgccgcgtttaaccgcggggttcatgtcatccatgaatgggcatgggcagggactcccaacgaaggtgcagcatggctccgcctgcagaagatagctgatacttggcacaggatactgctgatcccggtgactgggggtgtggttgtaggaatgatgcatgggttgctcgatatatttgagcagctaaaacttgtgaaatcagggcagaggcaaggaatcaactttgttggagccatcttcccaaccataaaggctgtccaagctgctgttaccctagggactggctgttccctgggacctgaaggtcctagtgtggatattggcaaatcgtgtgcaaatgcatgctcagaaatgatggagagtaaccgggaaaggcgtattgcacttgttgctgctggcgctgctgctggcattgcttcaggcttcaatgcagcagttgctgggtgcttctttgccattgaaactgtattaaggcctcttaaagcagaaaattcacctccatttacgactgcaatgataatattggcatctgttatatcatctactgtttcaaatgttttacttggagccagaccagcttttatagtgccagcatatgagctcaaatctgctgccgagctaccattgtaccttatcttaggaatgctatgtggagcggtcagtgtggtatttgatagattggttggatggttttcaagattctttgggcacataaaggaaaagtttgattttcctataatagtgtaccctgctttaggtgggctgggagctggtatcatagctctgaaatatccagggatcttatactggggtttcacaaatgttgaagaaatattgcataccggtaaaagtgcttctgctcctggtatctggttgttaactcaactggcggctgcaaaggtagttgcaactgctctctgcaagggctctgggcttgtgggaggactatatgctccaagcctgatgattggggctgctgttggagctgtttttgggggttcagctgcttatttaataaattcagctttacctggtaatgctgctgttgcacagccacaagcttatgctctgcttcagtctgttcagtcccattgacttcagtactgcttctctttgaactgacaaaggattacaggattttgcttccgctcatgggagcagttgggttggcaatatgggttccttcagtagtaaaccagccaaacgacagtgagccttctgggtttagaacatccagacgaggttattcttcaatgtcaccagaagaaagaaatggcagcttaaggcaaggtgatgttgtggatgatcttgagctcagtattatacaaactgacatgagtaactatggaacttataatgcagaaatgcttctggatgatttgaaggtcttccaggccatgtcaaagatatatctcaaagtgttaccatctgctacagtaacagaagttcttaatctgttgcatgatagacagcaaaattgtgccctggttgtggaccctgaagattttcttgaaggaataattacattaggggatatacggcgcatgggatatgggttacatgtggaaagtttcatcaatggagatcaccccaaggctgacgataactcttcttccatttcattgtgtcttactcgaggattccagtatcgtgggagcgaacgtggattgttaacatgctttccagatactgatttgaccactgcaaagagtcttatggaggccagagggataaagcaactgcctgtagttaagcgtggtgttgcccatagaactgcaggaaagcgcaggccgattgcccttctacattatgattctattggttgctgcgtgcgggaggaaatagagaactggaagaccatatatcagagactggcttgttaataatatgaaactacttggacgatatgattattcgtttgattgccgagggagaatattgtgaactgaaggtcatgtatcagcgaaaagcaggctttcctcttgtagcaattgtgcactgaaaaactacagtgcccttatgacaccacaacagtaagcaagactacaggacatctatgcgaaatgcagctagccagctacactgatgtagagatcattcaggcagtttaacctctatactgtatcattttgatttcacggtgatctgcaggggcaagcctgataaattctgcaaagacctcccattactgcaagtttcatgtggcatccctgctcgtaccacttatttgttcttgttacgacctggacttgtactttacgcgggataggaacgaagtacagacctagtgtaagaaggcggtactttttaccctcgtactgcttgtaaattgtaatgtgtagcatatattagagcatgataacttctgctgcatatattcgtcagtgtgatcactcaaggaatttgtgcagcagaattttgtcatgtcgatgttgtaagttgaaggatcacattgcttgtaaaatttggcagcatgttgtcttatcctcggatgagtatgttgttgtagaaacttgcatttggcctttgctctgcacactcttgtatgttgtgacgtattcaatccgttctgatttattgatcgttttaactttttcagat

SEQ ID NO: 31610 - DNA, 1114 bp, Zea Mays
cacatagaaaacaggcctcctcgcctccgtccgtccagctctggtccgagcccatggaaatcgttgccatatcagatcagctccgccatggacccccatctatctgcgaccctcggtgacgcgctccgcccaccgccgcccgggaatggctcgagcgctgctcctgctgcgagtagctgtagcccgctaccctcctctcccggcctcacccgcgctcctccagccgctgctgcgccgccacgcgccctcccagtacaggtcccagctccgcttcctctcctccctctcctcctcgtccgtgtccaccagctcagatgctcccagcgacggcgggggcggccgcgacggggaagaggatggcgcgaagagcggcggccgcgtcgactacttggggatgagcgacgaggagctcatggagcagtgcgatatgggcacgttcaaggcgtccggccccggcggccagcaccgcaacaagcgcgagtccgccgtccggctgaaacaccttcccaccggcatcatcgcccaggctgtggaggatcggtcacaacataagaaccgagcgtctgctttatctcggcttcgaaccctgattgctcttaaagggactgaagcctttgagatgaaatcctttgtaaaatcctcagcttcaagtgcaccatatcccataggtgccatgttcgacagatgtcaggaggcattatttctagggaaaacctttgaggtttcatgcggtttgtttaagggatgttcgtcgtcattagattgccgtaaatatgttcagtaggcagctagtatatcttcagaatatcctcgtttcgtattacatatacccccaatgttctccagcagggcaacaccattacaccacttaaccaatatttttccttgaggacctgttaacctcaaacttttatttgccagccaaaagttgttgaagcggctgtgctgaattgctgatttaattggctgtaactacctcatgggtacacaattctaatcttgtttcctttcagcgtttgatgatgcttttatatcaaattggtgctcttaaatttaaatgcaccatggatctgtttttagcttccattgtcattgcatgaaaactgaaattata

SEQ ID NO: 31611 - DNA, 838 bp, Zea Mays
aaccctaataacatttcctactcctgccggatcagactagcgagccaagccaccgacggccgacgtcgagcctccgcggccgagcctccgcctagcaccaactccgtcgtcgatcgtcctatgcgaccacgcccccgtccgccttccgtctcctgcctccactgagtcgcgggcgcgacatcggggaacgccaaggctgagcttcgcccatacgcctaccgccctgttatgccccgaaccgccgtgctgaggtccgcccaggccgggccaggagcttctcccggcagacccacccccgcccaacggagctccatgcctccgcccagggccattgtccgagctacgccccacgctcctgtccagtgccctggccacttagatggttctgctcagtcatgtttagtgtctggttcaacaacttcaacttcaaccaagggacgcatctatcacaagaccgatacgggtctgccatctctatatgacatttggctgtaaatggattatgatcatagttgaataagttggagcgtcaggtcaatggtccccccaataattaaactagatggtggagtggagctttgttttgggatgatgcaagcaacttttatgtttcagaacattgtactcaactgatgcttgtggccgttgaacctattctacttacttttggatttaagttaaggatagttaaaaatatttgatgtttaatacttgtgttggatgttttatgtgtcaattctatgtggatgctagaaaagttgtgtacactcatgttatttgatgaaattgtatgcacgatttggtttgaattcaattgaatattgatttttattaatta

SEQ ID NO: 31612 - DNA, 1310 bp, Zea Mays
attggaatcatcgaccctgactgtagactcattggtcttcatctctatgacggcttatttaaggttataccatttgacaacaaagggcagctgaaggaagctttcaatatcagactggaagaacttcaagtactggacatcaaatttctgcatggttgtgttaaacctacaattgttgtcctctaccaggataataaagatgtgaggcatgttaagacttatgaagttgcactgaaggacaaagattttattgagggcccttggtctcagaataatgtagacaatggtgctggtttgttgatacctgtaccagctccacttggtggtgtgataataattggcgaggagcaaatagtttactgcaatgccaattctacatttaaagcaataccaataaaaacaagtaatctcttgcctacatctctttaaatttctttgtggtgcctacttcaggttggtaagtatcgtgtctacactaattcttttgcccttgatttccgtttttcgccagtccattattagagcttatggacgggttgacccagatggttctcgatatttacttggtgataatactggaattctgcatttacttgtccttacccatgaacgagaaagggttactggtttgaaaattgaatacctgggggagacttcgattgcatcatcgatttcatatcttgataatggcgttgtttatgttggttcacggtttggcgattcacagctggtgaagctgaacctccaagctgatgcaagtggttcatttgttgaaattctcgaacggtatgttaatcttggaccgattgtggacttctgcgtgattgaccttgataggcagggtcaaggtcaggtggtcacttgttctggggcatttaaagatggttcccttcgggtggttcggaatggtatagggattaatgagcaggcttcagtagaactccaaggcataaagggattatggtcattgaaatcttctttcaatgatccatatgacatgtaccttgttgtgagctttataagtgagacacgattcttggcaatgaacatggaagatgaacttgaagagaccgagatagaggggtttgatgcacaaactcagaccctgttttgtcaaaatgcgatcaatgaccttcttatacaggttactgctaattcggttcgattagtcagttgtacctcccgggagctagtggatcagtggaatgcaccagcaggattctcagtcaatgttgcttcagctaatgccagtcaggtctgctgttatccaaaacaaacccaggagagggttaaggggcgagaaacataaa

SEQ ID NO: 31613 - DNA, 1864 bp, Zea Mays
tcctccagtattcaggttttaatcaaacaaaacaaaaaagctctgtcagtttctagggaagaagacattcttgctgaggatgaaataagcaaatctgaaagaagagcaaaggaacgttatactcaaaatctggctgaggaaaacttgaaagcgatacgtgctttctcttctaagcttttggaagtactttgttctatattcttgatgtcttcgaatgatgctattggattattgcagcctgcgataagtgagatagcttccatatcagacaaaaacgttgttgggaaattcttccttgatgcaataagaaagttgttggatgctacaaaggctgttaatgcagagcctgtggatgatagttcaatggaaattgaagccgattccaacaaaaatagcatgaagagggctctacttttggattttgcagcttcattgatgcctggtttagctgcaaagtctatcaatgtgttgttcagttatgtgaaacctgcaattaaggacagcgactctttgattcaaaagagagcgtacaaggtcctgtcaatgctgctcaaggatgctgaatttattgaaaagaatctggatgtcctgtcagaattgatgatttcgtcactaccatgccaatttccctcgaaacgttacagactcgaatgcctataccaccttattgtttacattttgaaggattcatctatggttagaaagagagaaattattagttcattcatcactgaaatacttcttgcattgaaggaggccaacaagaaaaccagaaacagagcttatgatttgcttattgaaattgcccgtgcctgtgaaaatgctggaaatgacgaggggaaggagggcttgcaccagttctttggcatggttgctggtggtctggccgctggtcaaacgccatatgcaattagtgctgttgtaactgggttggctcggttgacttatgaattctcagagcttatcggagtcgcatacaatctccttcctcagactttcttgcttatgcaaaggaacaaccgggaaatagtcaaagcgaacttaggttttgtcaaagctttagttgctaaatctaaagctgacatattgcatgaacacttgactggagttgttgagggcctgctgagctggcaaagtgatacaaagaattcctttaaagctaaggtcaagtcactcatagaaattcttgtgaagaaatgtggtttagacgctgtgaaggctgtgatgcctgaggagcatatgaaattgctcacgaatattaggaagattaatgagcgaaaaatgcgaaaggcaaaatcttctgaggatggggatgccatgtctatggcctcaggagctacaaggcaaagtaggtggaatcacacacaaatgttttcggactttggaagtgatgatgaatcagatggtcctttttctacccaacatactgctacttctcgatctcgtactgaatcaaaagcttcaactcggttgagtcggaggcgccaaggagataagaaactactagacaagttcattgaccattcaactggcgaccccctagatttacttgaccagaaaacggtgcggttggctctcaaatcagcagcagggaaaaagagggctgcacccgatgacgacgacgataagttcgaggtggaccctgaaggccgtataatcgtgcgcgaagagcgggagaagtggaaaaagaagccggcccctcgtgacgacgaggaggctgatggaaagagctctgtcagaagccagtccatcaagaagaggaagacatccggctctggctgggcctacactggtcatgagtacaccagcaagaaagccagtgacttcagaagtcactgtcttacaacacaaacgacacagatgg

SEQ ID NO: 31614 - DNA, 236 bp, Zea Mays
tcccttccctcccacagaaatgcaggacacctcaggtgtcacacctgctcggccggccccatgacatgagtgagtgaatgaatgaatggaactctccatcgacctcgctcctgccctgcccttgcgaggtggcaacagcaacagggaatacataaatacgggcacatgtcccacggccccatccccacatgagctgagcatcaccgagtcaccgacccgtctccttcctccaccct

SEQ ID NO: 31615 - DNA, 236 bp, Zea Mays
gcgcgcgcccttttattgcgcggaggagctacgcagcctcgccatcggcacgccgaccatgccccaccaggcaaggtcatcgtcatcaggaggagagacgcgatgagcctgcgcagcaccttcgccgtgcgtccaagcctcgccatcgtcgacgccttcgccctctcgctatcgaggagggagccacgccacgttcaccttatggtagtttgtcgcggaggtgagatgtctacccc

SEQ ID NO: 31616 - DNA, 625 bp, Zea Mays
cggaaaccggactgaccacggtgccggtacgaccgtacgagtttcgaaggtttgtctcgtcctgctgcgggctgcgcggactagagaccgccaatttgcttccctccccgccgcgctactgtacatactctgcaagccaccgcagtccgcagcgcgccaccgcctggggcacgccacggtgccacggacggtgtcgccgtgctcgaacccgcgtcacggaatagcagcgtcctcacggctcacgctcccggacttcactcgcccgttctccgtgatatcgcgatctgatctcgcccagcgcagcagccagatccgccccatccagccaccagtttcgcggcggagggtggaggtggaggatgtcggcgacggtggaggagcagatggtggtgaaggcgatccgggaggagtgcccctgggagtcgctccccaagcgcctccagtccacgctccagaccaaggacgagtggcaccgcaggtggtagatctctgatgagcaacatgcttgtctatttggtgggagatctccaatgtgccaccggactggccgtggcagggctgcagggtagagattggggcacaatgagccagtgacttggggagagggagccagagaggggcagca

SEQ ID NO: 31617 - DNA, 260 bp, Zea Mays
cgcattgcattcattagattgtaatcttgccgacggagagtacgtgctcatccccgagcaaggacctgtccaagaggaggaccaggagcaggcttcagaggctgctatcgaggatctccccgcagcgccagcaattgaaggcaagccccggttttatgcataaccatgttattatatgctactttactacacttaatgcttgtaggattgcaatgtgcacttaagtgtaggagttgcttgaaacctctagctgcatgaac

SEQ ID NO: 31618 - DNA, 226 bp, Zea Mays
aagtatcattagtgattacattatcggagtttcataaataataaccatgaatttaatgcagcggatataactaacggagaaaaccgaataacatggcgaagcctggccacgctactcctcctggtcctctcctgcgggagtaataacccactcgaccgtctatcccggtggcagggatggaggccaagtcacaccaacaaccaatcatcctaaggagtacctgcaa

SEQ ID NO: 31619 - DNA, 1988 bp, Zea Mays
gtgagctactcactcagtattccacgcttgacactccgtgacggacgcgcgccctttcccctcttctgcgactcattccggagcgcgctgcctccgatccgcggcaccgcgtcgcgtccgccgatgacgagggcgcacctgccggcggcggcgcagcggcggccgacggtggcgctgcttctgggcctggcgctcgccttctgcctcgccgtcctctccatccagtcctccttcttcgccgccccaggggcgccgggcaggaggctggatctggacgccgacgacgtgcgcgagctcgcggggttccagtcccgcgtccagcagtgcgtggctagcagaggacttggtctcacagcacatattattgatcactgcaagctggtccttaaatttcctgaagggaccaacagcacctggtataatgctcagttcaagatttttgaacctctagaatacaaatatgatgtctgtgaaactatcctattgtgggaacagggaatacttggatgtgaggccggatggatggttggattatgcagctaaaaggatcgcacagcttggtgctgataaatgttacaaccacactctctgtgatgaacttcttagcattttactgcctgctaaaccccctttccatccacgccagttcgcgacatgtgcagttgttggtaactcaggagatctcttgaaaacagagtttggacaagagattgatgcgcatgacgccgtgtttcgggacaatgaggcacctgtcaataagaaatatgcaaaacatgttggattgaaaagagactttcgactggttgtccggggtgctgctcgaaatatggcaccaatactgaagggctcctccgatgaggcacttatcattaaaagtttgacgcacaaagaaatcaatgcggtgataaaggaacttccaaatcctgtctacctttttcaaggtatagttttaagaagaggtgctaaagggactggcatgaagtccatagaacttgccctttccatgtgtgatattgttgacatgtatggttttacagttgatcctgggtacacggaatggacacggtatttctcagcccctaggaaagggcacaatccactgcaaggccgagcttattatcaacttctagaatgccttggggtcattcgtatccattcccccatgagagcacagagagtggaagattggtcagacataccaagcaaagaagagatcagaagggcacacaccatagcttttcgtctaaagaagcatgaaactggccagctagctgaactggggccatttagcaactgcaaggtatggggaacagtcgacccagactacggaccggtatcaggtacttcagacatgagcgagacgcgcaagaattcaaactacagcaagtgggagttgcttccgtttgagaagctgagaagagaagcgcaagaacaccatatccaaatgggtggcgtgtctctatacaagatggacggaaacaagttggatgatcttgtctgtgtgaggcatcagcgttcatcaagttaagaccgtggccgcctaagcctagttgtttggacgctgaattgatttcatggtggatctgaaaggatgctagacagcaagagccagaagatccgatgaagcagctctgctgtacccacttgtaaaattacatgagccatcgggttcagagcgaggcagccctctacctggaatatggaattcttttattggttgttttgggacttgtagccttctaggaatagctacttaagctgtctaggggttgttatgcgcacaccacatgacatggttttcacttcttttaacacagctgtaactgatgcaaatgggtcttgccatttctcaactatgaggtgcagttttgttaccgatccagcagtctctcgattccaaattcgtgacgtttgttgttaactgacaccttatttgactgtcccagttgagttcatttacaggattaatggatacccttcaatcttac

SEQ ID NO: 31620 - DNA, 612 bp, Zea Mays
caaaatcatgttcgtattcgtgtccatgatgcagataacaggtgaaaaaggaaaacgctgagcgtgaagcactgggagcccttccactctaccagagaacgcttccctaaatcgctggctaaacatggttgcaagtcttctctttacggcaaatcagaatgcatgcaataaaatgcagtgggtgttttttttggttccaaccaaagttacattttacttgtccacgcagtggtgcattgaccatgcgctctacctgtttttttttcttccgattaatgggagcaaattattgtaacactataattaacttgtgaatcttcagctgcgggtggctgacgtagtgttctttgatcgtgattttttgtatccattgagctttttttcgaggttgacactggctctacggccttgtattaagaactagctcagttgaatgacgagatgctgcagctagtgcaacattttttttaaagtttgagaacgtatccgcccaggcatgcgagtcctggatcctaactcctagcgggctgagatagcactagcacatgcgcagccgaattacaagagcgtggaacatgcacgaaactttaaataggaaaaaaaagaaagaaa

SEQ ID NO: 31621 - DNA, 2687 bp, Zea Mays
atttgactcctatcatgtatttttatccttatattttgacagttgttaagcatgcttttagattatactcccttgttgctgatggtaataataaaaaaatctgtctgtttcctttcagacggtgcacccaagtaacccaacatttttctctgcagattgacttggatacaattgaagttagcaatctgaatagacagtttttgtttcggcagagtcatgttggtcagtcaaaagctaaagttgctcgggatgctgtattgaaatttaggccaaatatcaatataaacccataccatgcaaacgtgaaggattctcatttcaatgttgatttcttcaagcaatttaatgttgttctgaatggtcttgataacttggatgctagacgccatgttaatcgcctttgccttgctgctgatgttcctttggttgaaagtggtactactggttttttgggacaggttactgttcatgtcaagggtaaaacagagtgctatgagtgtcaaccaaagcctgtccctaaatcatatcctgtctgcacaattacaaacacaccatcaaagtttgttcattgcattgtttgggcgaaagatctgctttttgcaaaattatttggtgataaaaaacaggataatgatcttaatgtgcactccaaagatgataccagttcaaaaacagatgtttttgaaaggagtgtagatgaagatcttgagcaatacacccagagaatatatgaccacgtatttggttacaacattgaagttgcattggataataaggaaacttggaagaatcggagaaagccaaaccctatttacattagagatgcattgcctgaagacgctgttcaacaaaatggtcgctctcaggatcacgtgaatgaggagcaggatccttctgctatggtatccttaggccttagaaatacacaagagatatggagtcttgctgacaattcaagagtgttcttggaggctttaaaattattttttgacaaaagagagaaggaaatagggagccttatttttgacaaggacgaccagttggctgttgagtttgttaccgctgcagcaaatatcagagcttcctcttttggaataccactgcatagtctttttgaagctaaaggtgttgctggaaatatagttcatgctgtggcaactaccaatgctataattgctggtctaatcgtcatcgaggcaattaaagtgctcaagggtgattatcaagattatagaatgacatattgccttgagcatccagcaaggaagatgctcttgatgcctgtcgagccttttgaacctagtaaatcatgttatgtctgctctgagaccccacttgttctggaggttaataccaagacaacaaagctccgggaagtcattgaaaaggttataaaaggtaagcttggaatgaacctacctttgataatggttggcgccacacttgtttttgaggatggtgaagatctggaggaggatgagattgcaaattatgctttaaaccttgaaaaggtgctgtgatactaaccatatacttgccaagttattttttctgttaagatgagtcatttgtatgcactgtggcatatattctaaaattcttgtttcttaataaattgcagccctttgttgtgttcttggccagcttagttgatttgtagttaagcttcttcacccttagttgtgtttatgctctgcttagttgatccattactgcaggtcttggctgaacttccagctccagttctaaatggtacaatggttacagtcgaggatttgcatcaggaactaaaatgcagtatcaacatcaaacacagggatgagttcgatgaagaaaaggagcctgacagaatggttcttgttgggtggtctggcccagttgataagcaaaccactagtaatggtgagactaaatcagttccatcttcatccaatacagaagatgtggatggtactgccgaggacatatcagcaacttctggaatgaagcgtaagctgaacgaaatattagagacaaaggagaattttgatgctctcgaaaatctttcgggtgttgattccagcagcgctcaagttgttgaagatgacaatgacgatggccttcttatgtttgatgaggacccaaggcaaagtaagaagaagagattgcagtagcatcctgctgcggcgataacagctcttgactcccggcatcgtggctaacacattgttcgatcgtaacatctttgataacttatttatgcggttatgtaccaggttgatgttgaaacattagtaacaatgcccagggcaccttttggcctcagatagtcagataccctgtagggttgtaatttgtaggatttaggaacaagagcaactaatgctcagctgacagcctgctgcgagatagaatttgtatctcaagagccaaggtcctgttttggttatgttttttgttcagttgaggggtgaccgggtgaaccaagctctgtcttgttaggtgccaatcacagggtctggaaatatgtactcatcctgtattcttgctaaggttatggatcagatggtgtatatatctgtgcaaaacactaatttatagttttgcactaatctacactgtagattatattgtttaccgagtgaagtttgaagtaaacggctggaaatagcttaacgttaagcaatatgcgaaacaaggattgggtt

SEQ ID NO: 31622 - DNA, 2067 bp, Zea Mays
tgacgtcgaccagcggcacggagcggatcctgacggactcgatctcgccgaatgccgcgaactccttgatgagcaccttgcgcttggtccgcagcggcaggttccccacgaacacggtcctgagcagcttgctctcgtcgtcgaacgcctcctcctcgtcctccccggccccctgtgccgcgtcgtcgggagccttcctcttctccccaactctcgacggattctccgcgcctcgccgccgctcccggccggcctccaactcgtcccgcttccgcttgcgccgcgggccctcctccttgctcttcttattcttcttcgaggacggctcggcatccctggcgtcacggctgggttgcatggggaggggcgtcgtggcgggtgcaggagtcgcggggggctcctccgtagaggccttccggcggaacgggttgtccgcggagaagagggagcggatggacgcggccggggagtcgccgctcgcggcctcagaggctgggtccctgtgcttcttcgccatcggcggctgcgggtctcccgatgcggctgcgggttgcggcgggggggctcgcgaagaagagggcaaaacaccttgtcctcctcgttgggtggctcggaatagatgtggggtcgggaaagcctcatgaattcccagccgtccgatggactaccaacggctaggattattctgtgctctgtacatcgtccagcgaggctaggttacccttactgttccactccagtcggtcgaggagtagggttctagcgcctatctggtttctccctgcgccgccgccgccgccgtggacaaccggagcgtagtgggaggggatgatggagggaggtagccgcgcggatgggcggaatccgaaccagctccggccgttcacctgcaccgggaacccgctccaccgcgcccacggctccgcgcggtgggcgcagggcgacaccgtcgtgctggccgctgtgtacgggcccaagtcgggaacccggaagggcgagaaccccgagaaggcctccatcgaggtcgtgtggaagcccaagaccggccagatcggaaggcaagagagggaatatgagatgacactcaagaggacgttgcagagcatctgcttgctcacagttcatcctaacaccaccacctctgtcgtgcttcaggttgtgggtgatgatggttctcttatgtcatgtgcaattaatgcttcttgtgctgctcttgcatttgctggaatccctatgaaacatctcgctgtcgcgattagctgtggagtgatggacaatggtgtggttatcttagacactagcagagcagaagagcagcaagctaggtcgtttgctcacctggtgtttccgaactcgcgcaagtcagtcgaatcgaaggacacgacacagcgagatgaggagtccgagcgaggattgataacttgcatcacgcatggagcaatgtccggtacggttctacatcaggatgactatttcaactgcatagagaggggtgtcatggcgtcctcgaggatctcggatttcatgaggaagacactgcagaaggaggcttccagggatgcctgacctgagtagcaaatgtattagcacgactgagaagctgcctgcctgtgataggcgatggcgatggcaatggtgtgtagacagcagctgggtctctagttttgacggcatgtagtcgtgttagaatgaaggaggcaagggtgcgatggagtggaggtcaatcggcgtgtgatgccacgtcactagcttagctgcggatggtttggtggacttttgaggaacagataatgagattgtatgcacggcacgctgaaattttacttgaacgccgcccgattaaaacaatatccatactgtacgtgtgtcggtgggctgcaatgtgatgtgtgatatgaaatgtttggtggtgcttgggcgtggcgtttgtttgttagcggtggttggtttaggtaggtcgcacagcccatccatgttgtgtagtacatgcacatcaggttggtagagctgtctaggttacatattcaaactgaacctctgcctaattcaggtttcgtattcctacca

SEQ ID NO: 31623 - DNA, 3417 bp, Zea Mays
cccccccccccccccttcacagcatcttctctctctcctcttcctctctcctgactccgccgcgtcgcgatctccccacctctcctgccgctcccacctccccgcactgccaaacccctcgccccccccccctcctccgctgcgctccgatccagtctgccgcgtccccggcggcgcgccctgagctcgtcgccccgcgcgcacgcgagttgccctgcccaccctgacccgcgcaggcgagcgagcccccattgaagcgcgccgcctcccctgcgcgcggcggcagggctcggtgaacgaggccagcggtccgcgcgcgcctggccgtgatggggcggtgccggcgccggggctgatgcggaggccgctgccatgtcggacgtctcgtcggatctcggcggcatccgggcggggcccgtggagcgtgacatcgagcaggctatcactgctctcaagaaaggagcatacttactgaagtatgggcgtagaggaaagccaaagttttgtccctttaggttatccaatgatgaatctgtactgatatggttctcagggaaagaagagaaacatctaaggcaatttttcagaggtatccacggcctgagaaggaatgccagtctttttctctaatttcacatgataggtcattggatataatatgcaaagataaagatgaagctgaagtatggttcgctgggctgaaaacactgatttcacgttgtcaccaaagaaaatggagaactgaatctagaagtgatatcctttcctctggtgcaactagtccgaggacttacacacgacggagttctcctttgagttcacctttcagcagcaatgacagcatccacaaggatggcagtgacaactaccgactccgtactccatatgggagccctccaaagaatggattggagaaggcattttctgatgtcatgttgtatgcagttcctcccaggggtttctttccatcagattctaatgctggatcagtccattctatgtcttctggacaatcggataacacaaacgggcactcaagaggcgtcccaatggatgctttccgagttagttattcaagtgccgttagttcatctagtcatggttctggtcatgatgatggtgatgctttaggcgatgttttcatatggggagaaggaactggggaaggaattcttggcggtggtggttcaagagtcggaagctcctcaggtgcaaaaatggactgccttgtaccaaaaccattagaatttgccgtgcgacttgatgtgcagaacatatcttgtggaggaaggcatgctgcacttgttactaaacaagtgctgtctatggtcaacttgggaatgcacaagctgatggcatgcttcctgtgcgtgttgaaggcaagctatacaaaaactttgtggaggagatttcatgtggtgcttatcatgtggctgtattgacttctaggactgaggtgtacacatggggaaaaggtgcaaatggccggttaggtcatggcgatactgaggataagaatactcctacattggttgaagcactgaaagataaacaagtcagaaatgttgtttgtggaattaatttcactgcagcaatatgcattcacaaatgggtatctggagttgatcaatcaatgtgctcaggttgccgtcagccattcaacttgaggagaaaacgccataattgctacaactgtgctctagtattttgtcattcctgcagcagtaaaaaatctctgaaggcttcattagcgcctaatggaaacaagccttaccgtgtctgcgatacctgctacagcaaactgacaaagggacttgagacagatatgcatttttcagcgaaacgggctgctaccgtaccaggattcagtgatacaattgaggaggatctggaaacaaggtcaaatgctcaactatcaaggttgtcgtcaatggaatcttttaagcatttggatagcagatattccaagaaaaacaagaagtttgaatttaatagcacccgtgtttcccctgtgcccaatgggagttcacattggagtggactaaacatttcaagatctttcaatcctgtatttggatcttcaaagaagtttttctcagcatcagttcctggatcaagaattgtttctagggcaacatcacctatttcaagaagaacaagccctccacgatctacaacaccaacacctactctgggtggcctaacgtctcccagagttcccactgacggcaagccaacaaatgatgcattaagccaagaggttctgaatttgagatctcaggtggagagtcttaccaggaagtctcaactcctggagttggagctggaaagaactaccaaacaattgaaggaagctatttccattgccggcgaggaaactgcaaagtgcaaggcggcaaaggaagtaatcaagtcactcactgcacagttgaaggggatggcagagagattacctggaggagcagccaagaacactaagttgccacctcttcctggaatttccattccaagtgacatctcgtctttggctatggagagtgtgggcagcccaagcagctccggagaacaaatcataaatggtcataatggattgcttgcgtctaatggaccaagttctgttaggaataagacaagccatccagaagtgggtaagaatggaagtaggccgcctgatgctgaatcttgccatgatgctgaatgggtagagcaagatgaaccaggtgtttacattactctcaccgcgttgcctggaggcgccagagatctcaagcgggttcggttcagccggaagagattcagcgagacacaagcagaacagtggtggcaggagaaccgggcgagggtataccagcagtacaatgtccgcgtggttgacaaatcaacggccagtgccgacaatgacattgcagctaactgacactagactgacctggagaaacatacctgattacaagtggagctgaggccatgtaccctacctacgtgaaggctctctagtcagtcaagctgggttgctaacgtggctaccattttacctaggtggttttcgctcccaggaaaacaggaggtttttttaatccggttttacataattctttctcttactcccttctcttttctccttgtgtggaaagtagagtgcttgagcagaggtaatgtaaatgcttagtagaagcaggctaatctaccttgtaaatgcataagcaagcatcgattttagaatgtcttggaaattttctgatatggttgcaaatggcaaatctgggctaagtggtgatggtccctggcggttgtagtagaacctgtatgcatgaatctgaagcaatcacgagggctcaacacttgagtccgatcccatctgattggcttagactgtatccagcaacttacttatcccataaccatatttaaacttca

SEQ ID NO: 31624 - DNA, 1295 bp, Zea Mays
atcaatggtgggctgcaaaacaatttccgcaagcaggttcgcaaattgcttccatcttcttagcaactggactggacgggccggcgggctacgtacggcccaaaagcaaagctccctctctgctactccgaccgacatcctcagaaagaccagttagactagaccaccgccgctccacgcttccaccctctgctgcgggacgagctcgagaggttcgccggcgctcctgctcggccgacggccgtcgccgcgcgataataggccaggagacgcggagagatgctgtcgtccgccgccttctcctcctcaccgctgctgcgcggagccccgctgcggacccggcacctgctcctggcccctcccgcgcgcgcgcacggcggcgcggcgagccgcgcccgcggtggccttccgaggttccacgccccgtctctcccttcgtccaagggtgaggtgattcgcatccaaggagacgagttctggcacatgacgcgggttttgcgccttggcgttaacgacaaggttgaactattcaatggggtgggcagtttagctgaaggattcatacataaagttgacaaaggtggctcaggtgttgagttattagaggatgctaggatcatagctcctcaaggcatccaatggcatgtctttgctgcgtttgggacactgaaaggcggacgtgcggattggcttatagagaaatgaacttggagcttctagtgttacccctctcctgacagaacgatgtcacacaatagcggaaaatcgggtggataggttgcaacgccttgtgctggctgcagttaaacaatgccagaggatacatgaaatgtcgctgaaatccccaattcagataaggcaccttctacctgttgtatcacagtcaaagcttgctttcttagcatcagcggaagcgcctcctctttttagtgttctgccagaatccagcattgaacaaagtgggcttctgattattgggcctgaaggagacttcacagcagaggaggtacattcactgaaatcagcaggtgcggcccctgttggtcttggtccatgcaggctacgggttgagacagccacgatatccctcctatctgctctcatgctctggtcagatgctaaacaccggtaaagacagcaatgcaggatctagttggattcagtaaccaaaaccatgggtaattattccattggatctcagaacgcatttcagtaagagcttggtcttgggcttgaccagcatggacgatgagcatctcaatacacgatgttttgtttgagttatgttatcttag

SEQ ID NO: 31625 - DNA, 1768 bp, Zea Mays
gggggttcattaatgtatgtgatttgatgcgctgaggcatcgacatcacgggtgtaagcagctagctgctgaggtctgccttgccttatcgtcgcgattaataaagctgtttctttctctgcttgcattgccaaagccgcggtttgggctctgcagacgtaacgtaacgatgccaaccctatattttgaaaagccaacgagagcggtttgagctcctagtaaagtagtaatagcgtgcctgtttctacagggcttcccgtactgacactgatacctgcctggatattattagtaggatatagtatatattatggtctcaagggctgctaccgattggagggtcaggtcttcattcgcaaaacacagacatttgacttgcgctctccctttctctctctctctctctgtgtatgtgtgtgtgtctcaggttctcagcaaagagcagggaggataagcttggaatgccttggcagtgagagctgcaactgcaacaaagcaaccggcgtccatggtggagagggaaaggggcgagggagaagccagggccctggccagcgggccagggcagcagcagcagcaggaaggagcagcggagggcgagagggtcgagaaagaaggagacgagcgggaggaggaggatcgagacgacgaagccgtggagtggtccgagatacggctcgccatcgaggagctgtccccggcggcccatctcaagcgcgtcgacggcgatggcaaggcggccgcgtcgtccctgcccacgctccgcttcctggcgctgtcgcacctcctcgttcgagtgctcgataagatcgggccgaccatggccgtgctgaggctcgacgtccaacggaacatcgagaggctgcaggagctgtacctgctggacccagccacgtactcgaccctgacggggatagtggagaaggaagtgaaggagggcacagcgaggaaggtcgacagctgcgcaagggcgatcctgtggcttgctagctgcgctgttacagaggctggaggaggactctacgcagcagcagcagcagagcctcgcgcagctcgtggaggccgcgtacgaggccaccctgaagccgtggcacggctggatctcctcggcggcgtgcaagatagcgtggaagctcatccccgagaggaaggtcttcaccggcatgctgctggggacgggccaggactgctctgcacttgaagacgagatcgggcggctcgcgctgttgcttcggcccttccttgatgacatccactccatgatggccaagttcagactggacaggctcaagtcgacgtgatccatggcgaacccgacgcaagcccaagccatggacatggacatggtccgatccccgtccttcgctgtgaatactgcctgccctggcttccgtcttcgagtcgcatttgcttgcggttaggtctagtttagacgctgctgctctctagtctgtacataggtcttttgcttgtagaatagactcccaagatctgcatgcggtgcccttttttcgtggtaggctacgtttggacagcgcccctcctcaattgcctctgcctgtgccaatacgttggccggccaaactttggctgcccaagaaacggccaactttggcagggaaaatgaactagcaagttgttcacgatgccaaactttggcaggcagcaaccatccaaacatacaagatgccaatagtcaacgaccttttattggtttggctggctggtaatgggctctaaattttacgctataaaatttaagaatcga

SEQ ID NO: 31626 - DNA, 3854 bp, Zea Mays
agtaacatcagactttcccaagtggaatattgcttagggcaagctccctccatcggtccgtctctctcagcttcttcgtcttctctcttaggttgacctctttgcctcaactgcgccgcccgctcaccaagccaggcagaggctgcaggggtcgtagagttggagggcccagtccatctgggaggtcccagtgccgcccgctcaccagttaccagccaggccgtcgggaggggagagagagagagagagacgaaaagatcgagacccatacgctcagatcgaagttcgacttctcctctccccctcccccaacctaacagattcgtgtagcacagatccatccgactttgggttgatttcttcctttgctgctgatcagaaagttacagatggatcatgctgaggtctctggtttgttgtgtattggtacacgtgaaacagatgggggtgaagaatcatatgcggctgagtaccctaaaatggatcaggataccaatgcaacgaccaaatttgatgtagtaatggagacttcagcaatgtatactgatcaaatcaacaccaatgcttgcttagatgaatatcacatgtctggaaaacagcctatggaagaaatgggatttggcagtgcacatccctttgaacttccatcagaaggaatggtagctgattctggggaagaaagcatgccatctagccctgacacatctaccagtaattatgatgcgcctggttacacggagcaaaatctgcagcatatctataattcgtatgatgcactggttgacaaagacggagttgtgcttactcctgccttcatgatatgtgacaaaactttgtatcttgaacctcacctcactttctcattggacgggatcaagattgagtatttggatttagattcctttgaagacgagaagctgtcagctctacaatgggaaatatctaatattatttccatcagttgtaaatggactcgtagtgttggatctgccttaataacactccttgttggatctacagcagaaacaggaaatgcaggtcctgttagagcacgattttctcttgatgattcgcaatggccaaggagacaacagaggatttgggaactgggaccaagatatcaagaaatatggaaagacatcccatcagatgattttgcattggagaattggagcatcgaaccctgtctgtttttccctaggcaatacttttccagcactgaggactttgaagatgttatttatccccaaggagatcctgatgctgtttctattagcaaaagagatgttgagctcctgcttcctgaaacctttgtcaatgatacaataattgacttttatatcaagtacttgagcacaagaattgaatctaccaagaagcgcaggtgccacttctttaatagcttcttttttcgcaagctggcagatcttgacaaagatcaggggagagctccagaaggtagagcagccttcttgcgtgttcgcaaatggacccgcaaaataaatgtatttgacaaagattttctgttcattccagtcaacttcaacttgcattggagtttaattgttatttgctatcctggcgaagtggcgacatttgaagatggtgatgccaagctctcagctaaactcccatgcattttacacatggattcacttaaaggaagtcacactggactcaaggatatcattcaaagttatttatgggaagagtggaaggaaagacaccctgaatcagcatcagataattcagacaagttcttaaacttgagatttgtctcccttgagatgctccaagtaacttcaaccctctgaagattgatgtattttctggctttcttagtgatgattggtttccacccccagaagcttctctgaagcgttcggtggtccgaaagttaattcatgagctggtaactggatcttttcagaatcatcccaagctagcttgtggtggtgagcagcttgacgaaagacatcaaagatgctcaaatcctggtgaacctgaaacagtttgcacagttgatgatggaactccatgaagtacagccatccaagtccatctgtttatatgattccaaagaggggctacctacttctggatgcatgttggacactggaagtgtcccaattgttgatgtacagaatctacaagagtcagaggtttgtgcaccagtgaaggatactgttgtttgcttgtcaatccaggatgagaaaaatgacccacttgcatctaacagtcaacttaatatgagatcatattccccagaaggtgatggcgtgattaaggaatcaaatcgtgtggtgacagataaggaaaatgataagtctttgtttctttctttggataatgaccaaaaagttcacagccaagcagaagctgaggtgcaggatattatggttcgtactagctgctcaatatctgaaattttagctcagaaaattaccagcaaagaacagccctcccaaaaaagcatagaagttggggatgagtgctttagaccttctcaagatatggattatgttatgatgtttgactccagcaaagatgagaatggaccaaatccagaaagattgacagctgaaggtgattgtggcgatcctcatgaacgtctggatttagtcacagtaggtgatatcggaaaaatggttgtagacaatgcaatcatcgaagatgtgaagagtaataacacaactgcaaacaatgtcaatcacggtgagctgcatgtttcattgcagttgccagagggaaacactgacaatggtatgactggtgttagcacagcttcctctttagacataaaagagggaaacaatgacaaagtagtggcagatgcctctgcacatgaaggtgatataaatgacaatggtagctctgaattgaaaataggaaatacgaacagtggtattactggtgttatcgcagcttcctcagacttaaaagaggaaaatattgacaaagtagtggcaggtgactgtgcacatgaaagtgatataaatgctaaggattgcactgagttgaacattggaaatactgataatagtattgctggtgatagtacagtttcccctgaggtgagcgcggaaaacactgatcaaatcatagcaggtgattgtggaaatgaaaccgatttaaaagctgatggtgagggtgctgacaaattcttagcaactgacagtgctcttccttgtgaagatgatgcaacttgcatggatggtgcgaatgtgattgtatcactagatgtaccccgtagcacgaagaatgatacattttccaagaacacatcttctgacgctgaaatgcctctgcctgttggaacctgtgagctcgtcgatagaccttcttccgagaatgacatgtctgagcacacatcttttgatggtaaacggcctgcggatgataggactttggaagagaacgaaatggttatgcctggtgatgaaaaaacagaggtgcattacaagcgacggaaggttttggcctcagagaaacaaagcagcttctccggagcaacttctacagattaggtttggctggtgtgagacttagttttagtttctgggatatgtgacctgtctagtccttgacaatatgctgcctgtgatatagtatatatttctgtaatataaggtactgccactaatgactgtagaaataacaaaaagaactggaatcctgaaccctgatgtctgcttgacagcgtggtttgagaattgagatactgtatatggtctgagtattgcacgacctgcactgcacatgcaagttgcacgatataggctgtttccaaacatgtggaaggccttgtttacctgattagttgggatagaccatgctatgattgttatgatttg

SEQ ID NO: 31627 - DNA, 2986 bp, Zea Mays
accaggcacagggcaggcagccgcgcggggccgtctccccttccgttccgcctcgccgaaacgacagacagacgagttgctccagccgtcaccgtcaagtaacggacccccaccccagccccgcgtccagggcctccaggctccttctgggggaggccgcggctcaccgtgttggctgcgcccccaccgtcgcctcgccttaaactctccccgcctccgttaccgtcttcccccttcccacctcccccacccgctgtgttcatccatcgaccgcgcgagcccccgcccgccgattcgacgacgtttgattttttttcatttgatttgattgtaacgtaccgcagcaggaggagggagggattcttggaccgttgttcggctggatggtggaggcggttcgtcgatttgagagctccgggtttcttggacctgcgtaggtaaaagcaccaccccccccatttcctctcggctggcggatggacgcgagggaggtgtgaagcctggtcgctaactgatgctcgtggagcgattcggaggagaggagcgcgccgccatgggcgagtcgctgctcaccgcgctctccatggacaccaccacggcccaccatccacaccagggccctttcaccttcctctccatggacaccgcctcccacgaccacttcgacctcttcctcccgccacaggggcccttccgccgctgcctacatgccgcggcggtcgccccccctgacatcaacctccccctcaccgccgacccgtctccgccacctccggcgtcgcacgacgccaacgttgacgtgctagatgccggcctcggcggcccgcagcactacgactcggattcgcccgctgctgccgggcctgtcttggccccagcagcagccgcggccaccgtgatcgccgtgtcccacaccaagggctccggttccagcgtggcgcgcaagtgcgtcaagaggaatgatagcatttggggagcgtggttcttcttcacccactacttcaagccagtcatgtccaccgacaagggtggcaaggcgaaggcagccaccaccggcgggaatggtaatagtgccagtgccactctggacgctttcctggtgcagcacgacatggagaacatgtacatgtggatctttaaggagcgatcggagaatgccctggggaagatgcagctgaggagcttcatgaatgggcactcgcgccttggggatccacagttccctttcagcgcagacaaagggtttgtgcgctcacaccggatgcagcgcaagcattatcgtgggctctctaacccgcagtgtattcacgggatcgaaatcgtgagggcgccaaacttggcaggtgtacctgagtctgatttaaagaggtggatggagctcaccgggagggatgccaatttctcgatcccagccgaggcaagtgatttcgagtcttggaggaatctgccgagcacggaatttgagctcgagaggctagcagccgtggttcctacaaagagtagctcacatgggcaccacaagaggttgctgaacggttctggccttaacctatcgacacaaccatccaatcacagttctggggatgccatggagatcgcaaccatctgtaacaagcgcaggaaggattcctcaccgtctgcaacggaagaggactgcagcaattcgaattcagacaaggcccaagacatggatgtgagccacacctttgagccatcatggatgaatgacttcacaggtgtgatgcgccatgcttctggaccagtaactgccgcaaaaacaatatatgaggacagcaagggctacttgatcattgttagcctgcctttctctgattttcagaaggtgaaggtttcatggaagaatactcttacgaatgggattgttaaggtatcttgcattagcgttggtaggatgccattattgaaaaggcatgatcggactttcaagttggcggatccttctcctgagcattgcccaccaggagagtttgtccgggaaatcccactgcctacccggatccctgaagatgccactctggaagcataccgcgatgaaacggggacaggcctggagattattgtcccaaagtaccgtgttggccctgaagaacatgaggtgcatgtgtccatgagaccgccctcgtcatggtgccaatgaaacttgttccgagctcgaggggagacacatctggtgcggaggttccctgttgttaccataaggctgaggctactgtccgagaaacgcagctcagttttgccaattttgatggggaacagtcctaattgattcaagcattctggtagttggcattgcagcatttggaacgtattaggtctatggggttaggtttgctgttatgtttctcaagacttccaattgatcccgttgagacgacaaagtgaacgctgacacaacggtttctaacgcttcccttgaagtgacaagatgtttggatactttactttaccccagagaggcagggcctagactctctccagcaaggtgcgctatatgctcctctactctatatttagcgcatggtgatcaacttttttcctccaacaacgtgcgctaaagggtccggtaaaatagaggacgtcctcaaccacctccaaatgcagcggctcctctattcgtgtctctctacttcagctccgctagaaatgtacaacaacatgcagtataataagtattgtagctgaattaatgaagaataagtagcagcaagcaatattattaggtgtctgctcaaatatgtatagtaatttttttaagatctgccaaggaaactttgtaataaaaaggtgtactattttaggtgaagaaaattaatatacatcgtattttaatactagatatacaaatgatatttttctgtgtgtgtccaatgcggaaaaaagaatgtagaaaataaagtctggtaacactatttatatagaggatgaaatttagaggacgctgttggagtagaaaaaaatatagagg

SEQ ID NO: 31628 - DNA, 726 bp, Zea Mays
ataaaaaacaaaaggaccaatgcttggtgaaggggaccaatctaactggttgttgcgcacactagttaggcactcgaccaagcatgctatcttaatcactcaaacaaaaaccatttattgcatcgcattcatgtgttatactacatgtactactagtgcactagctaagatgacagtacaacatgatgacttcctttcctcggtggtggttcagatctaccatctctctgctagctcaccaacagaaagagatgtaccatctatagcttagctagctagctagttttcaccaaattattggttaactactcctataaacctgaccatgcatgcatggctcgagttaattaccagatattgagttctcagttaactggccggtacggtccttgccttcaatctgggacgatttgcatgtgaagctaactaacccttcagttgtgctgcatttaagggcatccagcagaacacactttaggaagcaagggcaactgtatggtgtactacgtcctaaatggaccactgcactcccctccttttgcttgtgcttctccctccgttttagatctctagatgtcaattagatggtggtttaggagcaatggctgtttctctgttagatccaagtgatgtataattcaatcatgaatggtactggtaccccatagccagctttacggcccaagatattttaatcaatcggttcctttcctgaaactaaagcta

SEQ ID NO: 31629 - DNA, 773 bp, Zea Mays
catggctggtggcgctcggtgccgaatctgtcactgcaagatgcgccgcagccctgctaggatccgccgcatgagacgggctaggtcactgacttggaagaagactgcaagatcagccactgtatcggtgggatgtatataggggtgttaatggatcacgatccaaatgcctcttcacaatttgttagggccctaaattatttctagttcaaaaatgaatagaaacaaagcccgatcctaatccgattcgatccttaagttttatagtgtaaaatttgaggcccattgtcagctttagatgtatagcgtgaagctaggtagtgacgacgggatccgaagccatagagatcgatgtgcacaagcgctgcctcggacgtggcggcctgtgtgtggatgtccatggcaacctctatgttccggactcagaggaagaagactacgacatcgaggtcgagccgccgagcaaaaatattctgaactcctaaagaacactccagaatgcgatgattgcttcagtctccgtgtatgggcataacgatagaggaggggcaaatgcataattttacatctacaacctcaaaaaatatcaaggataaaggaatgcagttgattgctaataattaccaaggactaaagagattgaacataaccaggtgtgttaagttgacagatgatgggcttaaccaagttcttctgaagtgttcttcacttgaaagcctaaacctttatgccctttcaagttttactgacagtgtttatagggagataggatc

SEQ ID NO: 31630 - DNA, 1354 bp, Zea Mays
attgttccatcggttgtcaaggacgacgagcaaaagtctctcttttctacgcctcttgatgtgtgggcgagctcaagtttctctgatccttttacaatcagctgtaaaattcttaaacaaaaattcgggacacctatgaatgcaatatttgacttatttgatttcaaaattattattctttctcactaatcttcaaatgcaagtcgatgcaagtgctcactgaccttgagatgcaagttgatgcagcgatgcaggcgcttattgatcttcacgtggaggacaatgcaaccgcgacgatacacaaggtataagaagttcaatcaacattttccctccatgagtgaatgcagatcgatcaaattgagaagatgactacttcaattgaagatgatcggaagataagtgtttgtgatatttttttattgccactttttgttcctaaatcaatcatttgctgtggttccagaaagtaactgaggagtgataaaacgacaattttgagcttcaacgctttgctaggttggcaaaaaacttaaagcaacagagtgttcaagctaatgttttggtgctagaaaaggctttaatgcatcaggcttgtgttcctgtgttggataatgcttagagaagtttagcagtgataatgcttcactattcgaaaatcagtaaaaagtttagaccatttatgtgacatttttggatagttcctatgttgtgttgcaaccattaactatattaactgtatattttcacatggtgggacagatagaggacttcatagtgttcattcgaataatgttgatgtataagttaactttccacttttcttggttacttaatgaaattaacttttatagatttgtgtctacatagtgttcatgcaaatattgttgtatattatattatatttaagactcttaattagtgtcatttaacaacaataaaaaaaaattacacaatacattgttgatatgagataatcaagtccaaaaaatgtagaattatacgggcgcggcgaagcgcgcctgccatcctagtaataatgctaacaagaagagtcctctctcccttcacgttctgtatgttcttttttgttcttttggaggagcagggcgtctttgtcaatttaatgcaagtaaatcaggagaaagttttgttgattgatattgacaatgatcatattcaaaatcctattggtgatggcttttcagcatttaaatcaactagccccaaatgcatgtgattttttatctgaacagcattagtatatgacaaagtaattatacattatgttgataagcttaaaataattagttacatgttttcgtctatcggtcccgtgcatcgcacgggtttt

SEQ ID NO: 31631 - DNA, 1631 bp, Zea Mays
ttcagatcagctcaacaaagataaccttgcgccgcctcctaagaagatcaagactacccagccaggttctacagaccctcaaaaccttaatcgttagatcatcgccgttctcatgaagaattccggaggaggcgccgcccatggcgatggcggcgacatctacaatgtccgggccgccgagatcctcgccaacgaggccctcctgctccccatcaatgaggccgccccaatctacgagaatctgctcgccactttccccacggccgccaaatactggaagcagtatgtcgaagcctacatggccaccaacaacgatgaagccgccaagcagattttcagcagatgcctgctcaactgccttcacattagtctatggcgctgttacatcaactttatcaggagaattaacgataaaaggggctctgagggtcttgatgagacgaagaaggcttttgatttcatgctcaactacgttgggaatgatgcagcttctggccctgtttggatggagtatattaatttcctcaagtccatgccggttgtgacgccccatgaagagtcgcatcgcatgactactgttcgtaaagtgtaccagaaggcaattttagttccaactaatcatgtagagcagttgtggaaggattacgagaacttcgaaaattctgttagccgcaccttggcaaaaggcttgttatctgaataccaaccaaagtttaacagtgctaaggctgtatatagagagcgaaaaaagtacattgatgatattgattggaatgtactggccaccccccctacaggctcgtacaaggaagagcaacagtgtatggcatggaaaagactcttggtatttgaaaaggggaaccctcaaagaattgatgctacaacagctaataggcgtatcacctttacttatgagcaatgcctgatgtatctatatcatcatcctgatatatggtacgattatgctatgtggcatgtgaagaatggttctatggattctgcatcaaaaatatttcagcgagctctaaaagcaatccatgattctgaagtacttaagtatgcctttgctgaaatggaagagtccagaggggcgatacagactgctaagacagtatacgaatctcttctaggtgaaaatgctagtgagacctcacttgcaaatattcagtttattcgatttctaaggagaactgaaggcactgaagcagcccgtggcacaaagtgtttttgaagcaggtttaaagaggtttatgcatgagccaggatatatccttgaatacacagacttcttgtgtcgtttaaatgacgatagaaatgtacgtgctttgtttgagagggcactgagcttacttcctcccgaggaatccacagaggtatggagacgatttgcacaatttgaacagaactatggggatttatcaagcatgcttaaggttgaacaaagaaggaaagaggctctatctaggacatctgaagatgccttatctgcatcggaaaacacacttcatgacatagtttctcgatacagttaccacaatctgccaaagttgttcgtcctgagacttctcaaatggttatttatgatccaagacagatgaaagagtgggaaatcaccgtggattcttgggcag

SEQ ID NO: 31632 - DNA, 1161 bp, Zea Mays
cccaactccaactcccgcttcacgcccacaccaatggacccgcagccgccaccgatttgccgggaggcgtgggagggctgcagcgtcctcctcgacatcaatgacggcgaccgcctagccttcttccgcctcacccccggcgcgacggtgaagattgggaacaagacttgttcactgaagccgctcgtgggacgcccctttggctccctattccgcctcggcgccggcggactcgttccctgcgccgccgcggacgccacatctcgtgatcataacacgccagatgatgccaatggacaaacgcaggatgaaaccagagacaataggtctctggttgataataatacagctcaaaatttatctagcgatgacatagaggcaatgaagagggatggtgcaactggtgacgagattgtagaagctttaatagcaaacagctcaacatttggaaataaaactgtcttctcacaggagaagtacaagttaaagaaacaaaagaaatatgcgcctaaagttcttttgcgacgcccttctgctcgaagcatttgtgagacatacttcaagaaaactccagctcgtatagggtttatgcgagttgacacactatctctcttgttgtctatggcaaacattggtgcgtattcagatgtgcttgtggttgatatggttggaggtttagttgttggagctgtagccgaacgtttaggaggtaaaatatattcctctttttctcttgttgtctatggcaaacattggctccggagtggtcacatggcatgacatatgatgacactggacacacagacgtggccaagaggggaaggtttttggattgaggttgaccgacgaagacgtcggtcttctaaggggggtagattgtgatatcctgacccctgtggatggtgatatcctggtccaatgcttaataaaattaatagagtactcatatcaacaaggtgcatcttctttttcggaaggctatctcgaaagaacctccaaattaagcgagcttggcttggagcaatttgggatgggtgactggccgagaagttttctcgggtgcgcatgagtgaggacaaagtgcacacaaaagacttgtgttggtctgtgaggacaatatatgattctagtgagctgacaggagtaagtaccgccggttcg

SEQ ID NO: 31633 - DNA, 1124 bp, Zea Mays
ctccccgcgcccacgtgaacgccctccccaccaccccgcttttttcctcccgcgcccgctccgtgcgctcggtgcagaggctcaagccccggcgaggcggcgcccactctcactggccgtcgccgcggccagtgagcgggtggaggagccgtggacctctcccatcgaggcgccgggcggcaggcggtgtcctcatccgtggcgcaagtatatgtaggatcgtccccgggtcgactctgcagtctgcacggcgccttatcatcacacacggaaccagattgcgggcagccatagacgaagagagaaagaaaggtcaacagggcactgcttgcctgctgcgtagtgactagtgtgcctcaaccaaaaggatccatggctcccggagacgactctaaccccgccgcctcctatatccacacgcacctgatagagaggtgcatgacgttcgggatgagcatggaggagtgcatggaggcgctggctaagcgcgccgacgtcctgcccgtcgtcacctccacagtgtggaaggagctggagaaggagaacaaggagttcttcgacaagtaccaggagtggatatcggagaagcgaagcgcaggcacctcctagcgcggtggcactgaactagctgctggctttgcttagattagccatgatgtgtattgtttggttattcttggattcgttacttaggcattgtttagttattcttggattcgttacttaggctttctctagtgctaaaatctagggagtgtttggtttatagggactaatgtttagtcccttcattttattctattttagtctataaattgccaaatatagaaactaaaatagagttctaatttctatatttggtaattttggaactaaaatagaataaaatgtagggactaaaaattagtcactagaaaccaaacacccccttagtatctaataaaatttagcatatgctaaactttagcgcttgctgtcccttggtgtccacgaggagcatgcaactaatggtaagaaagagataaagcggtattcaatgtaaaatggggttgaagactacttttggcacagtttagcatctttgatggagctaaattgctaatagatactatatataacgggcc

SEQ ID NO: 31634 - DNA, 1212 bp, Zea Mays
gagtagaaaaatatctagtgggggtgccatattgtcccttctctgaacaccaattttgttgatagtggtagtaatgatctgcaacagctttgcattgacttttgtggacgaattttttgtcctaacttgttagggaggatccagaaaccgaagttactggagagagtgctgcagatgacagtgctggaagcacagacgaaactccatctattattgtgacaacactgcaatcatacagagtagctctgattaatgatgatgacgcaaaagctgctgagatagaatcctttttactttctatcgaggatgagaagaactctcttttgaacaaaatcactgctctagatgtggaactagcaactcaacgagaacgtatcttgcggattagtgctgattttgacaatttcaggaaaaggacagaaaatgagaagcttaacatgatggaaaatgtgcaaggggaacttatagagagttttttgcctgttctcgataactttgaaagagcaaaaatgcaaataaaggtggaaacagagggagaggagaaaataaacaatagctatcagagcattaataagcaattcatcgagattcttaattcattgggtgttgaagatgttgaaactgttggcaaaccatttgatcctatgctgcacgaggctattatgagagaagaatcatcggagtatgaagaggggatcatactccaggaattcagaaaaggcttcaaacttggggaaagactacttcgcccagcaatggtcaaggtgtctgcagggccaggccctgaaaattctggagatgatgaccctacagttgttgaagatagtgtggcacctcaaaaggttgaggatgttgaagaagacggttttgatgacggcgatgcagaataggtggctggagcttcagctgtgaatcaacaagaacaggtccagaaattttgatgtttttctggagcgtgccaagcaggtaataggatagtgccaattcgttcaagctagagttaggtccccaaatgtgctgttctttactgctactgacatgggggtgttggtattgcgacaaatttgtgtttctacccgccgtggtcaactttttgttcttacgaaggggaattttcgtggttcatacatgaaaaaaaaaatgatatttgtaaggactaaattggctcagtttgctattgataatcaatatatgaattccattgtttgtaca

SEQ ID NO: 31635 - DNA, 2227 bp, Zea Mays
gctcgacagccccgcctcgttgggttgctcgacgggtatttgttcggtaggcgggctggtcggtttggcgggccgtcccgggggtccttttagaccttcacgccgagctgcttggcaggtgggccgcccagttcgtgggccgtctttgggaggccttcggtccttctttgggtaccctgttctcaggggcatatgtatttatttcttcaccatatatgcttctactctaacatatttggatatgagactaagaaaacaatacctttgcaagaggtaacagatgttcgtaaagcaaagacggctgccattttttctaatgccattgaaattgttgctggtagtagaaggcacttctttggatctttcttgtcacgtgatgaagcctatcaaattatagtagatggctgggaacaacatgttagtaatgcaagattactccttgaacgtcaggagacaaagtcagctagtagcagtgaagaaaatggttatgttttattggaaggagcaaaggaacctaaacaagatgaagattcatcaccgctggacaggtctgtcaatagtacggctgtctccagtggtagtgctgatggtggtgattcgaacatcaacatttccagaaggttttcaaatgttgaggagaatggactcgaagacaacatcatcacactaaacccattcaatttggagccagttgatgatactcctagtgtacctgaatcttacacttcggtcacggagtcaaagtttcaggtttgcaaggttccatttctttgtagtagtattgacaattgcgtttacaacactaacatctttaaaacaggtgcctgtggaggttctttttaatttgttattgtctgatggtgcttttggctttttggatgatttccacaaaaattgtggtgacaaagaatttagttgctccaaatggcgtacagatgaacaagggggacttgtaagggatgtctcatttttgcacccaataaaaatttatcttggtgcaaaatttgggacttgtcaagaggtccagaaacttcgtctttacaaaaacaggcgtctagtgattcaaacctctcagtcaataggtgatgccccatatggggaccatttcactgtagagggcatctgggatgttgaacaagatagcctagatgagaactgttgttacctcaggatatatattaatgtagccttctcaaagaaaacaatatttagagggaaaatagagcagtcaacaaaagatgaatgccgagaagttttcagtctctggattaagctcggccatgatcttttgaagcaggagtatgatcgatcaaaaggcacttccagcacaactgattctggtgctcaatcaggggctataacgaacgaggaaaataccggggaagtagcagtacccatggtgagtacctcacaggatgtatctggtgcgaggagcctcattcctccttttcaagatccccagcagagaacaggaagagattcttccatcgggtccacttcacaagaactgtggggttcactaacgtcacacatgagatcaagccaacttggtccagtactagcagtggcgctggtggctatcattgtcctattgcaggtaaccatcatagttctgctaactaggtccccccaggtccagatggctcctcacgggatctcgacgggcagtttcgggtacagcaaagaaagcatggagtgggcgcagaagcgcctcagcctactcagggaggagatgcaggtggctgaggcgcacatggagaggatgaggcacgagtttgcctggctcagatcttacctggagggactggagaggctgaggcgccgcacatgaccgcagcgcgtgtacacgacaggggcacgattccgcgatgcggattcgttggtatacagtacgaactcggagacgttgttcaggtttcttcttcttctgtgttgctacagaccgtacagatgcaaacggagagctggtgccgtggtggtggtgttgcagaggtattgccgtaaggcagaactgccagatcccggtacagcattcaatgtaaatagctgggggacgtgtcattgccatgacgatacagcggcgtgatgttagaaacctcgcactacttttttttttcagaaatctctctatatatgtatcccatctcctatcaatacaacggttcatcagttctacatatagaaaacacaaactataaaaaaagtgtcacaactcacctgcctcacg

SEQ ID NO: 31636 - DNA, 2732 bp, Zea Mays
ccgccgctttaaaccccgtccgtgtcccgctagccgccattgcagagcactgactgagcacaccacccaccagctccgaagtcatgtcccacctcgacgcggcctcgctcctcgccccctcgccgccgctggcaaagccccacccgcgcagccgcttcctctgcctcatctcctccatgctcgccgtcctcggcgcctccctcgcgggtctcctcttattcgcgctccaccccgcgccgaacccggtcccgaactacgcgtcgctcttcctctccctcggatccaacgacaccgccgcctcgcacctccgagcgctcactctccacccgcacgtcgcggggaccaaggcgaacgccctcaccgcccgctacgtgttcgacgcgctctccgcgctctccttccccacccacatcacgccttactccgtcctcctctcctaccccgtccaccgctccctctccctctcggcgccaggccgcggcgtcgtcacctccttctccctaaagcaggagacctaccccaacgacccctacgcagcagccgcggcggagaccatcccgacgttctacgcgtactcggcctccgggtcggtctccgcggaggccgtgtatgctaactacggccgcgaggaggacttctcttacctcgcctcccgcggcgtggacgtcgcgggcaaggtcgcgttcgcgcggtacgggaggatccactgcgaggacatagcgcacaacgcgcgcgccgccggcgccgcggccgcggtggtgtacactgacccgctgcagtacggcggcgcacccggtgaggggtggttccccgactcgcggtggctgccgcccagcggtgtgcaggtggggagcctcttccggggcgtgggggacccgacgacgccgatgtgggcatcgtccgagggctgcgagcgcgtcagcttggaggaggccatgaataccgatgacatgccgctcatcccagccctgccggtatcggctcaggacgcgatggagatacacagagccatgggcggggccgtggcgccggaggactggcagggccgtgaagacggacccgtttaccgcctcgggccagggccggcagttttgaacctgacatatcttgggaatgattcgatggcaacgattgagaatgtcttcgccattatcgagggcgccgaagagcccgatagatatgtcattcttggtaaccatcgtgatgcttggacgttcggtgcatctgatcccaacagtggaacagcagctatgattgagttagctaaaaggttttcaatgctgcaaaaacaaggatggaggcctcgaagaactattatcttctgtagttgggacgcggaagaatacggactgacagggtcaactgaatgggttgaagaaaaccgggagatgttgtattctagagctgttgcttatctgaatattgacgtttcagtcgttggtccaggattcctgccttctacaactccccaacttgatgagttacttcagcaagtaactaaagtggttcaagaccctgataattcatctcagactgtgtatgattcatggattaaatcgagcactcctctccggctgctagcatatggggaatgatggctttgaggttggcaaatgaagacatcctacccttcaattacatgtcctatgcaattgagcttgaggcatacacaaaaacggtagagaatgaagtgaagggaacaactgtcacttgttcccctctgtacaactcaatcagaactctcggagcggcagctaccaaagtgaataacgaacaaaaggaacttcaaaagctactcttgagcaagcagctgaacaaggattcactgaaaatccgacaactcaatgaccgtcttatgcagaccgagcgtgcattcactagcagggaaggcatcttcaagctagaatggtttaagcatctggtgtatggaccttcagaccagaatgactgggatactgcagtctatccaggtatagccaatgccatagccagcgcccggagcagcaacacttcggagtcctggaagtttgtacagcatgagatctacagagtagccagggccgtgacacaagcatctgctatactgagtggccgtctgacatgacaggattcaaaccatattcgttaaaaaagattgttactgtggatttcggaagttttgacattttttgaaactttcgactatgaaatatctgagttgcagagaaagaccgtgcaccacattagggcttgttcgttttgctctcaatccatgtggattgggtgggattggatgagtttcaatcccaaacaagtcaaaatctttcacaattttttccaatcccatccaatccacatgagataggaataaccgaacaagcccttaaaaggatttggtataggtcagaactttccgatagggggttggaaatttcaacttgggcatactttccaaacacaaaaaagaagtgtgcagtgttgtgcttagtgtctctcagttttatattaaagaatttgttatgcacttaagcacaactagtagtgagagttgagccgctttttagtacaggttccctatactcaagaatagaaaacaagtttacaaagcattgaggttgaagcttgattgaaagctctcatttcctgtacatctattggacaaatctccatttgtgcttaacaactataatcatatcccatatgacttgttggatcctaaatttcttgtcatcaatacaccaaaaacccacttc

SEQ ID NO: 31637 - DNA, 2992 bp, Zea Mays
ccgagaccccgacccaccccgcctcccccgccgccgcgctcgcgctcccccgcgacagccgccatacgccctatctccgccgtgcctgcgcctcctcccccgcccgcccgagacccgccaagtttcccttccttgcacggcgagatccaccatcggcgcccccttccctggcgagccacagccgtccatgttcctggccaccggcgacctcccttctctagcccttggcggcgagccaacacctcctcccatggctgccccccagaccccagtcccgtccgcgcatccgctcttccgtcagcgacgcacctattctcccctctctccccgacgtcgcccatggcgtggacggcgacctccctcaccctgcaactctgcacgtgtaagggccgtgttgcccgcctcctttccccacaccggcgcagccccctgtcgccgcggccccttccccaaacagcacggcaccacatgctccccctgccgcgcccgcactctccttccccaaataacacggccccacatcgctggttgcctcgcctcgccggggacccagcacgatggtcagggagctggtgggtgggggagacagggaggagcggaggaggaggtcaagctcaacatggacattgtgttcgtgacgctgccttccccaccgacaccaacgactcactccagaacccggatctggggcccttcctcctcaagccatggtattgggcgagggtggcgccgcctcgcgtgcttgagttcgccgagcgcgccgccagggtgctcgagcgaagaggtgagggcaccgagctcgagctcgccatgaatctccacatcgctgctggcatccactgcggactcagccaccaagccctgacattgtagccagtttcttgcaatcagaacgaatgccagttggtaaccatttaacatttcttttgctgtgtcaacttattggagttggagagaggctatcactatactgacctttatatcatcagaattgacataaatgtgatttacacgtagatacaagtttgtggcagagatttctctgacacgccaatcagtcttcgatgcgaatgcttgttgctcatatggacttgtggttgtgataatgagttcatctccgtgcacatttgtcgtccttgtggttacagcagttaactgagtagtctctcttgactgcaaaacaagcaatctgttgcctctgctgtgatggtggagcaatttcagcgccaagaatgatatctcgcattttagattgtgtcagtgcagaagtattaacattgtttttctttgcataatcagaaaggatgaggtcccttagtgcacactcaaccttcaaccactgttcatcattcagagatggccatatatgatgtgtttcagtaataattgttttgtcagttctgtgaagacaggtatggttcatatattcaaatatccaaacctcatttggagttgtgataccagcaacctttgacatcgattcaagatgctactggagtgttattcatgtgagtgtaatttagtacatgatccaactggtaacaaactttatgatactagcatatcacataatagatgagattactagaaacagctcatgttattgaatatagaaatttcagttctattgtttttacacaaatttgtttgtgatgcttcaaaccgctaatgattttttttaaaaaagttgtgcaatgagcatatcacataatatatgagaatcttaggaataaaccaagttgctaatgagtaaaattttggctttgctttttaaaaaatatgggttcaagttgttcctgacagatgccactgcacaaatggacgttgacacgttgtagtgatcacactgtcacgagagctgagcaaactacagcctgcaagagctacacgtggtagcctatactcctgccttgctataattttcttaattttcttttgttaatgagtgcagtttctctggctaatggtaaaaataatttgttctacaggcatgcttgaccacatcatggtggagaatgcaagtgttaaagttgcattgaatcgcattgccgttgtttctgtcctggatgcacataccctgtcagtgatgtcttatgaagcttggaggctcatacatctgtttctgttggctctctctagctatatgcagtggagctgctaatatgcatgaagtttgggctaggtgagcttcctctttcacttttcaaaccagtataggtattggccgatgtcaagaagacaaggccggcgacgagaggacgacagcgtgcaagaagagaaggcccatgttaggcgcaactatagggctcaaggtcaatcagttgtggtcacacttttccatttttacgttcagctaaactgaccccctgtctcatggtgcaactgtgcaaggataggcaacaagtgttcaacaatatgtctgtggatcaattgacctgcatttcagcttttagttgaggatcaaaatctcgtgtcgttcagggccctcggtagagagacattaatgtgtcggcaccgtggatcgtcgcagttgtgggtcactgtaacggcactggtcacaggcaccatctgcctctgttcgtcctcctctattggcctcctcagcacctacagggtccagtgctactactcaaggatgttgttgcaaatgagttgtggagaaccgtagatgcaaatggttggagagcatcttctgcaccacacatctattggcctcacataccagctgaatctgagagcaatgggtacttgtgtgtccggtgcaacggcggcttgaccttacaaatcagtgttgtatgactaatataaaactctctctctctaaagtagcatagttcaccatgcaagttttgtgtattcatggcaacatatctgaaagatttaagattacttctaccttgattttgtagatatgaaatgttgttgtcattgcacgaatcattaatgacttgattttgctctctatatgctatcttagaagtttcagagttca

SEQ ID NO: 31638 - DNA, 2011 bp, Zea Mays
ggcgaagcgaacttgagccagagagagaatctcgcaccgcagcaggaggggaccgagagagaagcgaactcgagaaagggattcaaggaggctgttgccgatggccatggcggcgcggctgctgcgagcaaccgaggtggcatctcgatttctatctgcttcccatggtttcgtccagcgagctgcatacacagctggtgggatagtcgatgttggccaaccaacaccccagtctcatccagaggcatcacaaacgaggaatacatctctagaagaaaaaaacttttagaggtgctaccagagaagagcttggccattattgcttctgctgatcagcagatgatgactgatgtagtgccatatccattcagacagaatggtgattacctgtatattacaggttgtacacaacccggtggagtagcagttttgagtgaagaaacagggttctgcatgttcatgccagatacaaataaggaggatttagtttggcaaggtgaaactgctggagttgaggctgctgtggatttctttaaagcagataaagcatttccacttagtcagatgcaaaagatccttcctgaactgattgagcaatcaaaaggggtgtatcacaatgtgaatacaacatcttcttataagaacttggatgcctttcgtagggcatcactcaacaataaagtaaaagatcttacaaattacactgatgaattacggtgggtcaagtcgaaatcagaaattaagttgatgagggaatcagcatctattgtttctcagtctcttttacaaacaatgttgatgtcgaggacccacagagaggaaagccagttggcagctaagattgaatacgagtgcaaaatgagaggtgcccaaagaatggcgttccatcccgtagttggtggaggagcaaatggcagcattatacattattcaagaaacgatagaaaaatcaggacaggtgatcttctgctcatggatgttggctgcgagtatcatggctaccttagcgatctgactcgaacatggccaccctgtggcaggttttcacctgctcaggaagagctgtacagcctaatactggagacaaataaggagtgcataaagctctgtaaacccggcacaagcattaacgagatacacaatcattcggtaaagctgttgataaagggattccaagaactgaggatcctggagaaggggaaatccatccaatacaactacttgaacccaaccgcaataggccactcgttaggcatggatattcatgactccatgacactccccaaggacaagcccttggagcctggcgtcgtaataacgatcgagcccggggtgtacatcccggcggccccggtcctgaacgagcgcgcgccgagcaggtaccgcggtatggggatccggatcgaggacgaggtcctcatcaccgacgacggccacgaggtgctgacggcgtcggtgcccaaggaggtctcgcacctgaccaccctgatgaacatgggcaggggcggctcggctgcggacgcccatggccatgagctgcgagccgcctgcagctagctgaggcggctgcgtgcgtgaggtcatgcccgtggcggcggccggacctagtagacctggcacgacgtcgtggagcagaatctacgtgctctgcgaatacccgttgcatccattgattggactgttgtaatcacgggaacagatagcgaattgggcaggtgtttttttaaggtaatgggaggtgttatattctggacccttaccatggcgcgtcattgtatttgcatgcgcagttgtgttgtggccgcattcagcttctttatattgttttgtcgccgttcagaacggttagccgaatcttaccgtgagccatggcatggtgaccacacggattacagccagccgtgtggcgctagcagatgcatgcaacagtcggctggggcggccatgaatgcgggaggctgtagacctgtagtgatgtcctgtttgtttcagtttatacattatataatct

SEQ ID NO: 31639 - DNA, 2391 bp, Zea Mays
catttcagctatgaaccagcgaggtagttgccaattgcctacatgcattgcaggagatctggaccctagaagctgctaactcagaggcagcagcaagagagattgagacattgtatagcaagccagtggtattttacctgttaaacaagatcaaagagttcagtgaatgggcacagtgtattgttcttgagttggcatcaaagttccttccatctgataataacgaaatatttgacataatgaatctgctggaggatagacttcagcatgcaaatggagctgttgttttggcaacgattaaagtttttctccatttgacaatgtctatgactgatgtccatcaacaggtttatgaacgtattaaagcacccttgcttactctggtgggtgctggcagtcctgaacagtcatactctgtgctatgccatctacatcttctggtgatgcgtgctccaatgttattttcctcggactataaaagcttctactgccaatttagtgatccttcatatgtgaagaagttgaaacttgagatgttgactgctatagcaaatgaaagcaacacatatgagattgtcactgaactatgtgaatatgctggaaatgttgatgtaccaattgcaagagagtctatccgggcagttggaaaaatagcactgcagcagtatgatgttaatgccattgtggacaggcttctacaatttcttgaaatggataaggattatgtgactgctgaaactctagtcttggtgaaagatcttctcagaaaatatcctcaatggagtcatgattgtatagcagttgtgggaaatatcagcagcaaaaacattcaggagccaaaaggaaaagcagctctcatatggatgttgggagaatattcacaggacatgcatgatgctccatacatccttgaaagtcttgttgaaaactgggatgaagagcactctcctgaggttcgcttgcatctcctgacagcagtgatgaaatgtttctttaaaagacccccagagacacagaaggcactaggggatacattagcagctggtctatctgacaccctacaggcttttgcaatacagtcctaatgtagcagaacgtgtagtaaaccctcccaagcaagctgtctctgtatttgcagacacacagagcagtgaaatcaaagatcggatattcgatgagttcaacagtctatcagttgtatatcagaagccatcgtacatgtttacagataaggagcatcgcggaccatttgagtactcagaggatcttacaggcttgactgaggatccagaaaatgtaatttctgcccaaagatatcaagaaaatgataatgatcttttgctaagtacttcagataaagaggacaatggtacaagagccagcaatggttcttccacctctacatacaatgctccttccgatttgattagtccttcattgataagctcgcaagcaccagctgaaacttcactagtaaatactggtgggacatattcctcacaatcaaacttcagtctcgatgaccttcttggccttagcgttactgaagctcctgctttaccacaaccaacactggcccttaactcaaagcctgtgctagatcctggtacgttccagaggaaatggggccagctagcattggcactgtctcaggaatgttctttgagtccacaaggggcagtagctttgatgaatccccaatcactcatccgtcatatgcaaagcaatcacatccaatgtattgcttcaggcggtcagcctccgaactacaagttctttttctatgctcaaaaagatggggctgctgctttcttccttgttgaatgtattgtcaacacagcatcagcgaaggcacagctcaaaatcaaggctgatgatggaactgctgctgaggcattctcgagtttgtttcagtcagccttgtccaaatttgggctttcttgatcctgagtaatttgtctgagcgattcaccggtccacagttttttatgggtttcacagtttgccccaactccactgtcttggcttgtccagtacttgtgatcatattattggagaatcagagtagaaggtgcaaaagggtactggagttttgcggagctaaaaatcctatttgtactatttgggtgaactgtgcatttgtacatgactacatgtcacccagataaatagctgggttatttaggactgtactgtttgatgttctgggttatttaggattgtgatagtttgatgccttgatctcttctgaagggtttcgtttccttgaaggatgtagaaacaacacgcaacaacccctttcatgtatgctatttaccatttcttgcacagatgatcaataagatgtttcgtcttccattttgattcgtattatttagtactattttgaca

SEQ ID NO: 31640 - DNA, 856 bp, Zea Mays
gttatacctgcatattagaaattgattggtgtaaattgaactctgccattatctaagggggaatgcaaactgaaggataaatattaaatagtaactccaactaacaaatgacctaaaaatcaaattgtataatatgagcttttcactaattcaaacaattgtgtaagtatatcagcaagttttaatgcaccaaaaaataccacaactgacaaaggacaacaaataaaggtgcacaaaaaaatcaacactcacaacctacttgaacaggtagatgttttggtacagtttgaagcacgctcaagataaacgagcaaatctcaaatcatttttgagatttaaactgactaatcaattagagtagctgaagacgtctcagatagacatgcttctatatcaaaacaagatatttcaagctgaatgtcacggtttatgcatccaaactttcatattataactatacacaattatatgtccattcaagcaatcacaatatacaaacaaagttaaaattttttttgcagtttacctaggcctgaaatacacatgcaggtgcatggcaccaaagcaaactgttaataaatcaagttatttgtgattacacgagtcaaatggaaaaaacatgctttgttagcttagctcttcattcaagctaacaatgaataagcatgcacagataaatattttgcaataagaggagatagaaagatagctaatattttattgtgcttaattgtggcaataagcatgtaggctttataaagtttgcatcagttctcaaaagataaaactcacgagcaagttgactctgtatggagaatcatcagtgggaagtaattaatacataaacctccatacg

SEQ ID NO: 31641 - DNA, 277 bp, Zea Mays
ttaacttctcaacaaactagatatcgataacctagacgtgtatttattttgagactgatgaaataggttctatacacatcttccgtcaagtcgctgaatattggacgaaacttcttcaacggttgttcatcccgaaggaacaaaatacaagacaaaaaaaagtcacctggcactaataatatgccaccgccattgtttgggcccaaacaaaattactgcactgcaactcaaagtataccatcgcccactccactaccctgaaatgtcctgacattag

SEQ ID NO: 31642 - DNA, 1748 bp, Zea Mays
cgcaccgatgcacctctccagactccagctctgctccgcttcgcagccagctcctcctcccctgcttcacctgcgcttcaattgtcgccatcctccaccggctagttacattataaataccccatccatggattggctgttagcaccgtcatccatcctagcaccgtcatccatccatcggctggatttcccaagcacgctgctgccagggtctccagctgcaagcacgcatcagcattccacaagcgaaatggcggcgacggcagccgtgccttcttggcgccgggcattcgcggcgctcttgctggtcctgcagctgcgcggcgcgcggtcggcgacgttcaccatcgcgaacaactgcggctacacggtgtggccggggctgctgtccagcgcgggctccgcgccgctgcccaccacggggttcgcgctggcgccttcggagtcccgtgccgtggcggcgcccgcggggtggtcgggccgcctctggggccgcacgctctgcgccgccgacgccgccacggggcggttcgcgtgcgccacgggggactgcgggtccggcgacgtgcagtgcagcggcggcggcgccgccccgcccgcgacgctggcggagttcacgctggacggcagcggcgggctggacttctacgacgtcagcctcgtggacgggtacaacctgcccatgatcgtcgcgcccagcagcgcctccaccacggcagccggcggcaagtgcgcgccgacggggtgcgccgcggagctgaactccgcgtgcccggcgggcctgcgggtggaggccgcggcggacgggcccgtggcgtgccggagcgcgtgcgacgccttcggggacgcgcagtactgctgcagcggcgcgtacggcacccccaccgcgtgccgcccgtcggcctactccgagttcttcaagaccgcgtgcccgcgcgcctacagctacgcgtacgacgacgccacctccacattcacctgcgccgccggcagcaccgactacaccatcaccttctgccccgccgtgcccaccagcgtgaagtcgacggggcagaaccctcaggccgccgggttaccgcagcagctgaacaacggcaccaccatggtcttcttcggcggcaacacacagaccagcagcgccgccgcctcatctgccaactctctcttcgccgtcaccgtcaccatcacagcagccgtcgcgctcgcgctctcgcgctcgactcgcctgtgaccggtcatcatcgctgtcaggtgggccacgcttatcagaagaccggtgagcatacatacagtatgttgagcccctagcgactgcgacggaacatgagcatagtattctaggcttgtagcttaggtaggacgagtagaatttcttcttttgttttttggcttcgaaaatattcttttcatccgttgggcagagactacaggtggtgtggggcaattctttcactgttctttctcctagttaggtcgtatgcatcgggaggatgtgctgtaacctcaaaagcgattattggttgattgattcgattggggggataatcaaaatttaagcttctttcttctcacacttcattacgctctcaacatttttcaacaaccgacagcaactatgccagtgaatgattgggagtgctcgggtgctaaataatcaacgtgttgtcgcgagccggctatattcctggactcgtgtattgacactagttaaatatctgcacgtcacatacagaaaataaaataacaca

SEQ ID NO: 31643 - DNA, 314 bp, Zea Mays
ataaaaaaatggcgaaatgaaattcacggtaccagggtcaaccgagcacggacgcgtaaagccaacaaggggggaccgggggagcacgaggaaaccgaggagactgacccaacccgtgcttgcggcggcgctgcgctggtgccggccacggccatgatcggcggcgggcgggcagcggatagccacccggcgtcctgctcgtcctcgtcctcgtcttcctcctcgccgtcaggcccgtcgacggggggctcccgccttcaccgcagcaagaggcgtcccgacatcctcaacatgctcatggatgacgaaggtga

SEQ ID NO: 31644 - DNA, 1472 bp, Zea Mays
actttccaggccatcgtctccttccccttctttcaccggcctcgagtcacacgcgtgagatctgtgccttccgccgcggccacatgccacacaacgacgcccggcgagcttcaccgcgatagaggtaggcccgcccgataccaaggaggatggcggcagtgggcgttggtgcagcggacgagcggtgggcttcgttgtgcaactgcgtggtgaacttcttgctggaggagcggtatcacctcacggcgctagagctattgcaggagctccaggaggacggccgctccgcgcacgccctccgcctccgcgctttcttctccgacccagcgcttttcccgcccgatctcgtcgcccgctcatcctctgcgccgcccggtgctgatccacagattttgctagaagagaaaatagcagcagaagaaaagttggcactcacggagtatgatctgcgcctagccaaagaagacctttcacagttgaagcttgaattacaaaaacaaaaagaatcatctcctgatgattcaaatgggctccttttgggtgcttctatacgcgaaggatatactaggcaacaagaaaattgggatgtgaaaatttcagcattaggccctctaaaggataatgaacgaaaagatcttaattgcgctgtaaaagaatacttgcttttggcagggtatcgacttgctgttatgacattcattgaggaggttcctgatcaagaccttgatgtttggccaaacagttcagcttgtgttcctgatgcccttcgtcgttattactatcagtatctttcttctactgcagaggctgcagaggcttgtgtagaattagcaaagagcgttggtgagatgaggacagaaactgagttacttccacaatgttgggagcagataaaccaccaatatgaggagcgcagattgcttgttgctcagtcgtgcggtgaacttgccgtttatgtccgtccagagatacgagattccctcattttatccattgtgcaacaacttgtcgaagatgctgcaacagttgtaagggaagctgcaacacataacctggcattgcttcttcctatgtttccaaatctggacaaatattataaggttgaggagctaatgttccaattggtctgtgacccgtctggggcggttgtggaagttgcactcaaggaacttgttcctgctgtagtaagatggggagataaattggatcagatatcaagagtactattggctcatatcctggcatctgctcagcgatgtccacctatttcaggtgttgaaggtacaatagactctcatcttcgtgttttaggagaacaagagcgctggaatattggtgtccttcttcggatgttgactgagttgcttccatttattcatcagaaagctatacaaacttgcccctttgcatcagctgatccaacaagctctacaccagagaacttctcagcatcctgcctaaaatcatatgca

SEQ ID NO: 31645 - DNA, 2317 bp, Zea Mays
aagatatataattattattcgcagcaaagaggggcacaagcaagagaaggattaggacacaaacgctagagagagagagagagaggtggtggccggtgggacgtccgtggtggtggtggagttagatcggctgtgcttgttcctcgctcctcgctggttcagaggagagaacaacttagcaaacactccttggccagctagtccactgaagtctgagttcagcagctcatcatacactcctctttcatcccagcttgagtgtgataatttgtctgcactcagcaatactccagataaccagagctccacagaaaccatttcagcacaatcaatatcaccactggaagtagacagctcatacaaacaggcagctatccttcgggagaacacccaagtgagacctgatccattgtacacaacatcaaggcataatatgcaacacgctttacgagaaatagagactgttctgatggcacctgatgctgatgatgcagctactagcaccaagcatgaatttgaggaacataaacctgctcagctgatgaggcagcggtcaaggacatggagtcatgaatctaggcagccatcaccaggagttgtacggacacaacttgcatctggataccccacagcaagctatgagttccgcccagagaaacggctaagggagttaagggaggatccgcagagcatggtgaagcagctattaaccaagtgtgctgaagcattaagtgaggagaggatagaggagttccttaaccttgttcagcaagctcgtggagttgtatcaattactggggagccaatccagcggttaggtgcttacctccttgagggtttggttgctagacatgcaaactcaggtacaaacatatatcgtgccctgaagtgccgtgagccagagagtaatgaactcttgtcttacatgaagattttgtataacatctgtccgtacttgaagtttggctatatggctgccaatggggcaattgcagaggcattaagaaatgaggacaggatccatattattgatttccagattgcccaagggacacagtggataacactgatacaagcgctagctgcaaggcctgggggtccaccacacgtgcggatcactggaatagatgacccagtgtcagagtatgcccgtggtgaaggtctggaccttgtagggaagatgttgaaaagcatgtctgaggaattcaggatacctttggagtttacccctctgcccggtatttatgcaactcaagttacaaaagaaatgctggacattaggtcaggcgaagcacttgctgtcaacttcactctgcagctgcaccacaccccggatgagagcgtggacgtgaacaacccacgggacgggctactccggatggtgaaaggcctgtctccgaaggtgaccacgcttgtggagcaggagtcgcacaccaacacgaccccgttcttgatgcggttcaccgagaccttggactactattcggccatgttcgagtcaatcgacacgaacctgccacgggacaacaaggagcggatcaacgtggagcagcactgtcttgccaaggacatcgtgaacatcatcgcctgcgaggggaaggaccgggtggagcgtcacgagctcctgggcaaatggcggtcgaggctgaccatggccgggttcagaccatacccgctgagctcgtacgtgaactcggtgatcaggaagctccttgcctgctactcggacaagtacaccctggaagagaaggatggcgcgatgctgctcggctggaagaacaggaagttgatatctgcttctgcttggcactgacagtaacgttttcagaagaccggaagtacacgtcaactcttacatatatatatgtatgtatgcataatgaattacctggtctgctttccgcaaaaaaggacgccctttgttgtacatgtacatgatgctgtacccttagttttcctgaagtgcagaccagagaagagaacattgacattagattgtagctgctaagctgtatggtaattacagttttcttttgctctcatgtattcacccctgtcatggacttctccaagcgtattcttagctaatcagcatgcatacatgctgagatgcttcttagtctttctttcatgctcttgagcgtgcaatgatgtcaacaagttaacatgccctgatgcccctccgagggaagatggatctcaagtcttccatctgcgagatccaagtttgggcaggcaaagtgtgctgatttttatcatctgactgtgaaccatcatcatcgttgaaaaggtggagcgcataggcaccattccattc

SEQ ID NO: 31646 - DNA, 276 bp, Zea Mays
ttaacactcatctatgaacataatatgaaatattagggattaagtagtctttgtcccttctcgtccatcattgtacttggtcttcgtcatcacttcaagccgaagcttttttgctatagcttcgtcgtccattttaatcaccttcagattgtatttccatcttgtcataagagaaaaccttcatccgaagtcgaagctccactctgaaataacccatgtcacactagaaacatatggttagtcgtgtttttgaggaccttcggaggaagaaggccc

SEQ ID NO: 31647 - DNA, 1817 bp, Zea Mays
atctcaacgcaaacccaactgtcttggttgcgcaagcaccaagcaggtggaagatgatggaggtggcgggggctcaggcccgcgcggttcccctcctgctccgcaacaccgcctccctgcggacctccgtctccgtctcctgcacgggctcccgccggagctgggtggcggcggccacggcggagggggacgagacccgcggcttcgacaaggtgcccatggacacccccggcgcgtaccgcctggtagaccgggacaccggccgcagcgtcatcgtgtggggcggcaccgacgacagcgacgaggcctccatgccgtccccggcggtgctctcccggaccaccgaccgccgccacagccaaggtatcgggaatttcggcaggttcaaggcacagaaaataaaatccttggtcacgaggtcagctcaccgcaagagggagagttctaatcgctcaagcactgcctggtctgatgaatcttctttcaatggctctgatgatgaagaggaaagctattttgagagaagaaagcatgtctcagactctgaacgccacccgaagatgagcagtggctccagagatggaagaactcgaagtgcacattctctgagttctgttttgagccaatacagaggcgatgatgatacagacttccctggttcagaggctacttctggttccaaacgatggggtaatgttgccgatgttacttatggacggcagaatcagaagcaaagggagcctctgaatttccctcaaagaaaagggcctctggacggcggatttttcagtcgcagatctttcaaggagattggctgcagcgatgaaatgctaggtgcgttgagaaattttgatttccctcgtccgtctcatatccaggctatggcatatgggcctatcttagaggggaggagttgtgttgttgctgatcaaagtgggtctggcaagacactggcatatctttgccctataatacaaaacttaaggaacgaagaagttcaagggctccataaatcatcccctaggaaccccagggtgatagtattgacccctactgctgaacttgcttctcaggtccttaacaactgccggttgatatcaaaatctggggttccatttaggtctatggttgcaaccggaggatttcgacaaaagactcagttagagagccttgaccaagagctcgatgtaattatagcaacacctggccgtttcttgtatctgcttcaagaaggctttgtgcaactagctaacctcagatgtgttgtgttggatgaagtggacattttatttggtgaagaaggtttcgagcaagtgcttcatcagttgatcaccgtggcaccagtgacaacgcagtatcttttcgtgactgccactcttcctcttgacatctataacaaggtcgttgaaacctttcctgactgtgaggtgatcatgggacccggtgtccaccgaacaagctctcgccttgaagagatccttgtggactgcagcggagatgacaacgaagaaaagaatccagaaaccgccttttcgaacaagaaaacagcgcttttgaagattatcgaggagtctcctgtccgcaaaacaattgttttctgcaacaagattgagacatgtagaaaagttgagaatgcgctgaggcgggtggacaggaaggcctcgcagatcaaagttctccccttccatgctgcgctggatcaggcccagcgcatcgcaaacatcaaggagttcctgaacaagcaaacggctgactccatgttccttgtgtgcacagatagcgctgatgctaccatttgagtttgacgacggtcggtg

SEQ ID NO: 31648 - DNA, 3242 bp, Zea Mays
ctgcaggagagctactccgcatactgcacgtcgaggtttggacgcctcatcaaccgtccatcaatttttgatatggagaatgaagagtatgctgaggatctttgtcgagatgtctgggctactcatttcccatccgagccatttgaccttgactcgaatgagattggtggaaacagtgttgataatataacatgtgacaatgtcaatggtgaaattgtcaaaatggtgagacagtacgctggcctagcagaccgttttgcctcactctttgtgcaggaaggtgtctaccatgttgctgctaggcggcgatatgtgcgtttcctggaccttatgaagaaggttgcgtgtgcaacccaagagtgcacacggcttgtgcctagcctagacatattactgatgtggcttgctcaccaggtatacgtagaccttagattcaattgaacatgtaatttgttctcacaagtattttagtttccacaattgcgatgaatccatgccagagttttcctgtgtgttatgccacggatatggtagcgatgggcatcagtgacaatgttgcaaaagtgggtgtttgttatggcgaagtggtgagcaatgaggcggtaaggaggacaaaggaactgtgggaggatgcatatgatgaaccatatgatatggctggatcagaggttgatgtgggagcagttagcacagcaagggaggcattttactgggtgccagcagcatcagaggaggatgccaaccggctatacaagagtttgcagccaagattccttattgaggtatatgtgttcttgaagggagaatttgataaggagcccaccagcaaggagttcctacgattgcgaacacagaggtgtcacagatcactaaagctcaacatatcgatgtccaatttatcctgcaaaagctggcagaaagtatggcacttgtattgtgaatttgcaactcggggcctcttcattgagttcaggcgcacccttagtgggtgcttcaggaaaagcaagttcctcaagaacatctcattctcatggagcgatgtgttgcatgagaaagcacttgctctcacagaagaacttgatgtcaggatgagagcgatggcatcaattacccctccagttcaagcaccatacttgttgaagtgtgtgcctgatcgagtaactgatgatggtggggccatgatttctgatgtcatattgcgcatgagaaattaccgtccccaagaaggacgttggctgacacgcactgtacttgatcacagtgggagagaatgttttgtcatccggatgagagtaggcagagggatttggcggagaggtgctgaaactcccatggcagtgaaatgggaggataggagcattgaggttcgagaaggatcatggtcatacattgccagtacaagctctgttggttatgctcctgatagtgggcacaggaacagtgatgaaagatcatcaggagaataaggtagtttggagcttatcaacaggagatacgctgacaatacgtttgggagatgaactcagctttcagttaaaaaatgacagctcagaagaggaggtatgatcagtacatttatgtaggggttagggtgcatatggattgtacttcctccaccctgaaaaaaatgcaattctacttctatttttagtcaaactattcttagcaacagtgatattttttacacaaataggtatattatggaaacatattccatgatgaatctaacaatgcttatctgatattataaatattaatatactttttgtataaacttggtcaaactctatatggtttgactccgtactatgttataattagaattaaattgttttcatgggggagtaataaacaaagaaccattattggtgctcacagctgaaagaactggcagcacaagaatcttgatttctatagtaaacaagtttttctatgcaatatacaaatgagtgcatgctgtagagttcatcattttccttttcaaaaatgtaacaccgcattggcaacctctgaagagaagattgaagacatatggtaactgtattatcacaaacttaatttgcaccattatgtttgttgtttaactttgttcttaaaaaggtagtattctagaatttcatatagacacattccttagcaacgaggtccgctgattaaactgtagaatagcctttgtattggtccctaagtttcagtttcatatgattttcatgtgtcatttaaatgtaattgaaacattctgttctattaaaatgtaaaatataagttggtttactacactgttgatatatgacttcattttttgtcactgttctaaaaatatacaaagccatttcatgccttttagatgcactgcgatgtactatttaccaggcaaggctgcttgtcgggaggaggttgagctacagagtaaacacagataatgcgtcgagcaacctagtcgaggaggagcaatacctgacacttgttcagatcaggagagaagatgtggctgggcttttagtgcggcggaggataagtgaagcaagggccgggcagagagactggggttcggtgatgcttcctggctcgctttcaccggatcctcatctgcagccttggtaccggaacgcaacgcaggttttgagctctgcggagacaggaccagtgctcacaaagtactcacctgctgacgggaaggacatgttgtacaggaaaaaaaaaatagaatggcaccattctagccgaaaaggactcagtgagaatgtaagatggaagatgaaaatccttcgacgtgtgatagtgctttgtgcgttggggtgtgactgtgactgccgctccagccggctttgattgcctctattgctttttgtatctcctcaatgaggatggcaatgggcactgtctacgctcccagtcttcccagatgatatcttcttgtgcgccttctgcaagtggagcttcagtgagctgctgctgagaccagcattcttgccacagatgagatgggacacaccttcattgcagttgaaggcctcttgcgttaccattccatggagattttcccgtgcagtttcttgtcaagatccagcaagaccttagcaaactcatcattgggatgcgcacgtcggtgcaccttcagcatgttccatgcttccatcttcagatttaccttcaactcataagaatccacagcagtgctattatcagtgccttcaaaaaaaaaaacctgtgtgaaaattgttgtccttacacgactgtac

SEQ ID NO: 31649 - DNA, 3601 bp, Zea Mays
cgtggtcattggcctccaccagatccgatgccttctttttcgctcttgctctgctctcatgggcagggcagggcatgcccatctacttgaattgcgatgcgtacatacatcgctgtctccatctagctgcacacatatatacatacatgcatacagagtgagagagaaacagatcgatctcacttagctgctgctgctgctgctgcttgctggtggcctgggcctggctgctgtgtctgtatcgatgtgtccgtattttctccatctcgtctgcatacgctgcaattggtaaggagctagctggcctttcatgtcttccatgctgccatagccatacggccggccggcaggcaggaggataccccatcgctcgctgcacatgcatgtatgcatggggatacatgttcatcatcagcagcacagtggctctgtatcccccatcccaatctgatcctatataggaggagaaggaggagcagcagcagcagccaggcgcggccggcggccggagtagtatccgaatccgctcaacacccaccggctggtctctagctttcctatcgatcaatggctttcaaaggactcccgcgtgattcccgagggtccctcgaagtcttcaatccagacgcccctgtttcagatcgagcaaccacctccccgtttctcctccctcctgcggccgcgtcccatcccagcctcctcgccgccggagatggcggcgatgctgacgtgggtcgggcgacacagagggccgccgagtggggcctcgtcctccagaccgacgagcacaccggccgcccccagggtgtcgtcgcccgtccctccggttccaaccgcaccagcgagagtggcaactccatcgacgagagggccgccgccgccggtgctggtagagctctcccccgggtgtcggaggagcttcgcgccgcgctctcagcgttccagcagaccttcgtcgtgtccgatgccacccgccctgaccaccccatcctctacgccagcgctggattcttcaacatgacgggctactcctccaatgaggtcgtcggaaggaactgccgcttccttcaaggttctgggaccgaccccgtagagatttccaagatcagacaggctctcgcagctgggtcaaattactgtggccgtatcctcaactacaagaaggatggtacaccattctggaacctcctaaccgttgcccccataaaggatgaggatggcagggtcctcaagttcattgggatgcaagtggaagtaagtaagtacacggaaggtaacaaagatactgctcttcgtccaaatggattgccagagtcactcatcaaatatgatgcaaggcagaaggatcatgctcgtagctcagtctcggagctcctacttgccctgaaggatccacggtcattgtcagaatcaagaaacaataccttaaaaaggaaatcacaggaatcagcaggttcagctctagttcccggcaagagaagctccgaaactggatcccgtcgtaactcacatagtggaatgagaaactctctacaaaaaatcagtgaggtgcctgaaggagggaataagaccaggaaatctggtttgcgttcttttatgggccttattggtatgggacatgggaatgtagagaagaacattctaaaaccaagggaagatcccctacttgatagcgatgatgagagaccagatagcttcgatgacgatttcaggaagaaagaaatgagaaagggcatagatttggctaccacacttgaacgtattgaaaagaattttgtcatcaccgacccgaggttaccagataatccaattatatttgcatcggatagctttttgcgtttgacagagtattgccgcgaagaaatattgggaagaaactgcaggtttcttcaaggacctgaaactgaccgtgggacagtaaagaagataagagatgccatagataaccaaacagaagttactgttcagctgataaattatacaaagagcggtaagaaattctggaacctctttcacttgcagcctatgcgtgatcagaagggtgatgttcaatacttcattggggttcaattggatggaactgagcgtgttcgagaggctgctgcaaaagatggtgccatactggttaagaaaactgcagacaatattgatgaggctgcaaaggagcttccggatgctaatttgagacctgaggatctatgggctaatcactcaaaaccagtcttgccaaagccacatatgaaggatactgcatcgtggagagccatccaaaaggttcttgagaacggtgaaagcattgatttgaaacatttcagaccagtaaggcctttaggatctggtgatactggcagtgtccacttggtggagttgcttggcacaggtgaatactttgccatgaaagctatggataaaagtgtcatgcttaaccgaaacaaggtccatagagctaccgctgaacgacaaatccttgatatgttggaccacccattccttccgacattgtatgcatcatttcagacaaagacacatatatgtcttattgttgactattgtgctggtggggaactctttatgctccttgataggcaacctatgaaggttctgaaggaggatgcggtcaggttctatgctgcagaagtggtcacagcacttgaatacctacattgccaaggtgtttcttccacacgatattgataagaagaaaaagaggaggaagagcaggagtaatcccatattttttgctgaaccaatgcgagcatcaaattcttttgttggtacagaggagtacattgcaccggagattattaccggagctggccatacgagtgctgtagattggtgggcgctaggaattcttctatatgagatgttatatggttatacaccgttcagagggaaaacaagacaaaggacatttgctaatattctgcacaaggatatcagatttcctgcgagcatacaggtgagcctggcggcaaggcagctgatataccggttgttacaccgagaccctgcaaataggctaggttcctatgagggcgctatggagatcaaacaacaccccttctttcgtggcataaactgggctctagttcgtgccgccacgcccccagagctggaggctcccctccaggatacattggaggccacactgcctcctcctgcagctgatggggctcacaccgatatgttctgatcatacattggtccatgatgctacatgttaatttgcttaaaggaagaaaaaatattagatgatgaagatgcatgactttggcatagatgagaacaataatgtatgttaaggactaattatcttgatccatctatgcatgctcacaattagaataagattggatgtgtatattgtttctgtggttgcaatatacgcacgagtctatgaaaggacctatggatagcttgaggggatgacagacactaggcatgttgattagtactccctccgtttcgttttacaagtcgtttccaacagcttcgtgctgattaaggaatctatgaatcaatgattctgccctcccacaagcctcggcttaggccttggcatttcgtccaaccttatccggtaaacacctgctgtaag

SEQ ID NO: 31650 - DNA, 400 bp, Zea Mays
tttgttgagattttatcgatcacccgttataatcggagattcaacgtgctcatccttttgtggctatataaatcagtcatcggcaccccttcgacccatagctcgagtcggcgcttgaattcgagagtctaccataccatcgccatctaccaagcaagctgcgccatcgaagatggatagcagagagagaaaggaactcgtcgtcgtcctaagctcgacatgccgtcctgtaggccgggcctgggatcccacaccggtgcgtgggcgtcgtcgtcgggccgccatgcatcagggcaccgctgcgtcgcgtagtccggatccacgtcgcccagacctgagcgtgaggtcacgagtcagctgaagaccaagttggtacctggaatctcaagtcccaggcaag

SEQ ID NO: 31651 - DNA, 2408 bp, Zea Mays
aatgtaaatgaaactccgatccaacgggcggcagggcctgctggtcgttgcggaatagtaacgcaacttgactgcaatgtttggctgcgcctacaaatccaacgcaccaacacaccgcgcgcgtcctcatcctcacttcaggtctgcagcccccaactacccccagcctcggaaggaaccttccagaagcgcaagactctaaaggccgtcgccttcccattcttcctcgccgcgggggtcgcctgaggtatgatgcctaacaaaaccttcaaggattcctggggcttgttcgcctcactctgatgttgttgcttcgtataacctggtctccgaaatccgaataccccgtagcagctgcggttggatctcagatcggtgctgcggtccctcttttaatttgtttcccctccgcttccgttagcgccgactgatcgtcgagtcagatcttacaccctatatatagtctcatctagccgtcactagtgagactcgatttgattcgttccactggattaagcgctttgagcgcgctagatacgtgtcatgttagtgcctactgcctttgtttagtgctgttgcttgttctgggattgggatgaatggtcgtgtgtatattacctaccttggattcctttatgctactcgtcgtggactggtggtgtgtgctgttcgtacgtagactgttgtggaagtgttagctatagatttttgtgtgtgtgctttctgttgtgtttagctttgatgaaacggatcaccactaagccttcagttttacccctggccaagaatacctgatgaaagaatgatatttcaaaggtcgtactggtatcactattcgtgccaagaaaaagtgtggctaaatcatgcagtttaacttctagaagttcagatgtcatagcatcatgatgtttgggtacccgtgtcctgttatggtttgtgtaggatgacttggactagcaaggggaccagtctaaatcacctctaccttcatgattaattttttgaagttcacttttgagaatctgagttgtgtgtattatttgtacccaattgtgtggtgtgattctcctagagttgtgttgttcatgtggcaaagttcatgcattttgttttttattatcttgaataagtgtacaggtctgtgtggtctctagtatgtggagaactggaaagagccacttgcaacatagtgatagtgtctcatatttcttcgtggttcacttttgatgtcttgatgtcacaaatgaaggcatagctcatatcttttgattaaaatatttcatcttccacttacgatgagattatgtagatgctctatatatctaggggttaacgtccaatatgtactgaaatatctcactgcttgcctgtagtttgtgttactttaacccgtactgaaatgcccagtgacttgtggagttgtttgcagatcacataaacaatggtgaaggctgttgctgtgcttggtagcagcgatggtgtcaagggcaccatctttttcacccaagagggagatggccctaccgctgtcaccggaagtgtctctggcctcaagcctggcctccatgggttccatgtacatgcacttggtgacaccaccaatggatgcatgtcaactggtgtttatttttctttttctttggcttgcttatgtgatcagggtgtgtgctaagttaatatcagtcattgaactttctacttgttggtgaaatcaaggaccacactacaatcctgcgagcaaggagcatggggcaccagaagatgagaaccgccatgctggtgatcttggaaacgtgacagctggagcagatggtgttgctaatatcaatgtcaccgacagccagatcccactgactgggccaaactcaatcattggcagagctgttgttgttcacgctgatcctgatgatcttggaaagggtgggcacgagctcagcaagagcactggaaacgccggtggccgtgttgcttgtgggatcattggactccagggctgaaaacgatcgccggacttgggggtgcctgagaggtccgtctcctgccgtccccagcagacgagcctgaacattcggagacatcgtgaaataagagcgtcgctgatctgtgatcatcgtatttgtcattatgcacctgtagcaaccgatggactgaactgtgctggattatgctgttggatcacctgagtatgtgttacatgtcggttttgatgtgacatcctatcgtttcgatgtgttttgtggaagtgttgttgcaagatttcaacagtcacgacttggttttgatatgcagtcagcagcagctcctgagttgtgattgctcagctgcggtccttttctttttttgggataactgatttcttgttgaaatacgctcgctgcatcacctgtgtttagtgctgtcggctagat

SEQ ID NO: 31652 - DNA, 3184 bp, Zea Mays
ctatccccttcgtccgactccgagaaagaaccaccgcagggcaccggccgcccgcaaggaatggcggcagcgatcatcatgcctccacatacagacccaccacggccagccacagcgagtaatcccaccgctcccgcttcccatccccaacgccagcgagacgccccgacaccgtccctacgcgcgctcttcctccgcgccgtggacccttcccgcccctcgtcatggtccacggccgtcgctgatcttctctcctccggtgaccccgtcgccgcgctggccgtgttcgctgccgccctccgagccaaccccgctgcgctccggccggccctgcccccagcccttcgcgccgccgccgccgccacctccctctccgccggtcgccagctccacctcctcgcgctccgctcgggcctcttcccctccgacgcctactgcgcctccgccctcctccacatgtaccaccattgcttccgtcccctcgatgcccgcagggcgttcgacgaaatccccacccccaaccccgtcattgtcactgccatggcgtccggttgcatgcgcaacaacctcgtatataccacgctctctatcttccgctccatggtggcctctggttctgcgggagtggtcgacgaggcggctgcactggtagcgctctctgcatctgctcgtgtccctgaccgtggcattaccggtggtattcatgcacttgtctccaagattggcttggacgggcagacaggggtagcaaacacgataatagacgcgtatgcaaagggcggtggtcatgacctgggggctgcgaggaagctctttgatatgatggatagggatgtggtgtcctggaacacgatgattgcattatacgcgcagaatggactgtcaactgaggcacttgggttgtatagcaagatgctgattgtgggaggtgatgttagatgcaatgcggtaaccttgtcagccgtgctattggcctgtgcgcatgcaggggcaatacaaactggaaagcgcatccataatcaggtggtaagaatggggttggaggacaatgtctatgttgggacttctgtagttgatatgtacagcaagtgtggaaaagttgaaatggcatggaaagcctttcaaaaaattaagggaaagaatatcctttcatggtctgccatgattgctggctatggcatgcatggatatggccaagaagcccttcatgttttcactgacatgaggaagtcagggctaaagccaaactacataacctttatcacagttttagctgcttgcagtcatgctggtcttttgagtgagggccgttattggtacaataccatgaaaactgagttcggaattgaacctggtgtcgagcactatggatgcatggtcgatcttcttggccgtgctggttgtcttgatgaagcttatggccttattaaagaaatgaaagtcaaacctgatgctgctttgtggggagctcttcttagtgcatgccgaatatacaaaaatgttgagttggcaaaaatttgtgcagaaagattgtttgagttggatgcaactaactctgggtattatgttctcttgtcaaatatatatgcagaagctggaatgtggaaagaagtggaaagaatgagagttctggttaaaaccagaggaatagaaaaacctccagggtatagctcggttgagttgaaaggttctgttcttcatgatttggatgtagaagagagagaatccatgttgcgcatccatagtgaaaagcttgctgttgcctttgccctgatgaactctgtacaagggtcagtaatccatgtcataaagaatctccgggtctgcactgattgccatgcagcaataaagattattacaaagcttactggacgagagataattattagagacctaaagcgctttcatcatttcaaggatggattatgctcatgtggggattattggtgacattatgcaaagaagcttagtttgtgatgccatattggtagtatcagaatatcacaaattgagataactgtttacgatactctcagtgcatctgtccatccaggacacaaaggccaatacatcagtgagatagtttataacttctcaacctgattaggataaaatggtctgaactacatagctagctgacgcagttggtcaacttatctgtggtgaagatgaaggacattagggctttcaatagtcctgcacaatacacttgcactttcatgtgcaagacatggatttttatcatgatatgaagggcttgtaacataatggctcagccttgaccatttgtagaagcagcacaaagtcattttgaagtacatggatttctgtgaggattaatttttttaatatttacttgtgttgagaaatagaagggagtggtgagagctatctcgttgaaacaccaggttacgtgttagaagcagcatctccgcatttgcagtgggaggcttgcctcggtttatcccttcccctatcctactcatgtaggagcctccgacagcaggtctgtcccctttttacatgtgatgacaaacactgcacacttcagaagcatggatttgtcaatcccagaaatgtgccccagagagtaaaattgggacatgaccatttctcaatatcaactctgttccataacatcatagaagccacaatcccattgcttagcccatgccctgtcaaacatggcatgcctggaggcgacagggatgtgcatacgaggtgaacagatctgctggatggtgcatcacatggaaggcatgatttcgacgtggtctcccatttaccaaatcagctgtcgacagttggcaccactgttcctcctcttcctcaaattatctgaccgaagtaatccaacaaagaagacaaggggtgtagcagaaacggagggagcacagagtacacgcttgtgttcaagtgtttgtctcggtgattttggttaggagaaatgaagaataggggtgaagggtttgattttgtgttgtagggttttattttttttcggttgcaaggatccaagttgaattgttagaatttgtaccgagtttcctatatctgttgaattaataggtgtatgtggtattcaattaggtcccgtttgttcctttcattttgaggaattgaaatcttactaatagaataagctatttttttagaatgtgacattccaccacttttgaaagtt

SEQ ID NO: 31653 - DNA, 2120 bp, Zea Mays
ccgtgatttaaaattaattaaagcgtgctagtcacaattaagcaggggcctttcctttcccggtggtggcggaacggtcacttctccggtctgcagcctgcccgaccgaatgagcgcgtgcaaattgctaaaggcaccccacgtttataaagcggaggcccagcctgtcttctgcccgcacgaattcgaatccgccggaggcggaggagacagcagccgggtgattgggttgggtacgcctctcgtctcggccgatggcgtcgctgttcggcaacggcggctacatctactcctcggggtcggagggggaggacgaggacgagggcacggaggggtaccggaaaggcgggtaccacgccgctcgccccggggatcgcttcgccggtgggcggttcgtcgcgcagcggaagatcggctggggcaacttctccaccgtctggctagcctacgacaccctccacagcagatttgtcgccctgaagatccagaagagcgcaagggattacgcgcacgcggctctccacgaaatcgagctactgtcggctgtggccaaaggagacccgacgaattcaaagtgcgtgcttcggttgttggaccatttcaagcacgctggccccaacgggcagcacgtttgcctggtcaccgagttcctcggtgatagcctgctccggctgatacggtacaatcggaacaagggcattgggctgagcagagtgaaggaaatctgccgatcagtcatggtcggccttgattacctgcacagcgagctcggcatcatccacacggatttgaaaccagagaacgttcttctggaatcaacaattaacccggccaaggacccagtgcgctctgggttcacaccgatcctcgaccggcctgtggggaaccagtacggtggcacagtgatcagtttcagtgagaagatgctcaagatgagagcaaggcgtgcagtggctaagatttcgcagagacgggtttcccttggtggggttggggcagaactggagaaagagaggtgcctggatgggatcagtttgaagtgtaagattgtcgattttgggaatgcctgctgggccgatcagcagcacgctggtgaaatacagacaaggcagtacagagctcctgaggttatcattggttctgggtactcatattccgctgacatctggtcgtttgcttgcattgcctttgagcttgccaccggtgacttgttgtttgctcccatgaatcgccagggatgcagcgaagatgagacagcacgatatttggtgtattcatccactaaactttcaaacactcccttgcaattattcggacatttaaaaattgcactgacacaaatatatatatcaggaccacttggctttgatgatggaaactcttgggaagatgcctcggaagattgctagctcaggaactcgttccaaggattactttgatcggtatggagatttgaaaagggtcaggagactgaagttctggcccctagaccgtgtgctcgtagaaaggtacagtttcagcgaacccgacgccaaagggttcgctgactttcttcggccaatgttagatttcgctccggaggacaggccatctgccgcgcagtgcttgaaacactcttggcttaattgatccaacgcgacacgaaagtctgaccaatagatgtttacatacatcctacgtgcaaattcgctgccgaagactctttgtgactgtgattgcagatatccacggactttgatttgatgtaaccaaggctgagaatcaggagccactttttaggcgcagcctgatgagaacgggacatgagattcagctcggatgtagcaagcgtttcgctggtgtgtttgggggtgcagactgcagagctaatgtgatgttaacctgcatgtgtgttagtagggccaaaatattgatgtattattattttttggtaatgtgatctggccaacaaccttttcctttagctgagaagatgaactgctacagcactgcagtgtagtggttcagctagttatccaatggattgtgtgctgtaacctgtaacatttgtttgaaattgaccttatggatatcggaaaccaaccacttggtggtgcaaatgggacaaaaccaggggcggt

SEQ ID NO: 31654 - DNA, 1124 bp, Zea Mays
cttccatctgttgtctcgttctctctttccgcacgaccgcaccgtgtgagttcaaaaaacttacccccaaaaactgtcctcccttggttccttcccgctctccagccaaagtcgccgctcccgctcggacacgcgtctagaagcttctggatccgtccctgacgccgatggagcagctcgactacaagttccacgagaagtacactgctctgaagaagcggaagctactggacgaggggctggagcggaagcgggaggcggaactcaatgagctttacgatgccatgaaagattgggtcagcgaactcaggaaagacaatgcggaactcaacgagaagctggtggagaagcaggatgagctcgagaaggcccgtcaggaattccttgaagatattcgtacaagggacgctgaaattctgaagctgaagcagctcttagatgagaaggctgaaaaaaacaattctgcagctactgggtttccttgcctagcgcctgaagctgtcctagaaaattcaactccattgtcacctaaaagaaagacaccattttcccacggcaagctagaatgctccagaagacatacacgcatctcagggaataggacaacagagattcggagtgctcatatgctttctttgctgcttcaatctttagttcgcatgaagatctcggttacagtttcatcctcacctggctagaaacatctgatgaatggtcatataagctctcctcgttgggcacactggaaaggatagccgttgattggatgaggcaagacataagattcagcatgaaaatgtgccgcatgttctttgagcggatatcaagcatcataacaaaaggatgacgacatgctcttcgcttcagctagttatatcagtctgcctactgtacatggaagcatcctgatgtaaaaatgatttgatgcactatcttattgcagagctgtctttcatgctcatgccagtggtgtgtttggttgccggacatttagggacagccacgacagggaatccctgtcatcctctctcgttcctttaatttccctttaatttcgaggtataaccgaggacaagacattgaatcaaataatattattaaatcaagccaaaaaggattatcct

SEQ ID NO: 31655 - DNA, 1461 bp, Zea Mays
gagtgacgtcttcccttccccaccgcgcccctgcccccactctcccacttcagatctcctcgtccactccgtcgccgtcgtcttcctctctcccctcccgccggccgatgcatcccaaaccctagccctccggcgcaaaaccctagatcccgcccccgcctgcatggatccctcatccggatccacgtcccgccacgggcgtctcctcatctcgccgtcgctatccaccccgaccttctccacccactccccgtccccctcatcggccgcgtcccccgcgccgcaccgcaactccacatcctctccgaagcccctcgtatctttcccctcaccctcttccgccaacaggccccgatcctcctacgtcggcgctggaccgcgcgctgccaccgcagcggcctcggcctcgggtccggcgttcgcccacaacgcgcgccttgcggcggccctggtccctgccgcggccttccttctcgaccttggcgggctccccgtcttcgccgtcctcgccatcggcctagcggcggcataccttctcgacgcgctccagctgcgccagggctccttcttcaccgtctgggcggcgctgctcgcggccgatgtcgcttttttcttctccgcctccctatcgtccgcggccgctgcctcgctgccgctgaccgtcctcgcgctgcttctctgcgctgagacctccttcctcattggcgtctgggcgtcgctgcagttccgatggatccagctcgagaacccgactattgttgctgccctggagcggctgctctttgcctgtgtgcccattgccgcccccgccctcttcacgtgggctctcgtgtctgcggtcggcatggccaatgcatcctactattttgccacgttctgcatggtgttctactggctgttctctataccccgtcggtccagcttcaatagccggaagcaggatgctccaatgctggacagtgatggcattcttggtcccttggagagctgtgtgcattctctgtatgtgctgttcgtgccggtgttgttccatgccgtgtcccatcgtgcaacactcttcacatcgttggccagtgtgtgtgaattgttgttgctgttcttcataccgttcttgttccagctgtatgcatccactcgtggtgcactgtggtggatcaccagggatgcacgcaccatggaccagataagaattgtgaatgggttcgtcgcactggtcgtggtggtgctttgccttgaggtgagagttgtgttccactcgtttggaaggtacattcatgctccaccaccgctgaattacctgcttgtaactgtcacaatgcttggtggcgctttgggtcttgcagcacatgctgcgggcaaggttggggatgctgctagttctgtggcttttacaggattggcagtgctagtcagtggagcaggagctgtagtcattggattccccatggtgtttttaaggcg

SEQ ID NO: 31656 - DNA, 2255 bp, Zea Mays
cctaaacctaactactgctgagcggcagcggcccagccccgtccgtacgcgcctggccacctcctccgcaggaccgcagccctaccctctatcgcagcacgcgcgcgcctgttcacctccgccgcagcactagcgcggcacgcgcctgctcgcctccatccccggccaccgcggcgtcgcccacgcacgggcacgactcactctagccgaccagctccggccgccgcccaccgccacgcaggcgtgcactccagcagtgagcggtccagcctcggccaccgctcgtgccccgtggcccacgtgcgtcgctgcatccaggatcgacccaccggcgcggtcgtccggccagccgcagctccggcccggaacccgccccgccccgcccctgccggctgtgtccagcgcggcagcgcccagtggcccagcggctggcgccccctcgattcctccacacccgctccgtctcagccccctgcccctactgccacctgcgattgtctctgcagtatgtggcaaatgttcaaatcctaggtccgccattgcacctgaagcgtagctctaggaacaagacgtgtctagttgtgtgcgttgggactgggggaggaataagggattgatggccaacagcgagtatgagtacgtgaagagggagttcgagtttgatcgctgcctcccgccctctaactggatcgttgtccgtatcgacggttgccacttccacaggttctcaaaggtccacgcctttgagaaaccaaatgatgagaacgctctaagattaatgaacgcttgtgccactgctgtgctcgagaaatttcctgacatagcctttgcttatggtgttagtgatgagtacagtttcattttcagagaggaaacagagttctatcaccggcgagaaaggtcatataaataatcagtacaatacctgcttctggatgttggtgaaatctggaaaaagtgaacaagaggcccagctagctttgaagggaacatttgcaaaggacaagaatgagctgcttgctaaacaattccaaataaactatgatgatgaactggctatgttccgcaaaggatctagtgtttaccgagagaaggtagaaacaactgtgaagattgatgactatggggagcccataaaaagaccaagattgaaagttacagtggcacatgttgataccatagggactgcgttttgggaaaaccatccacacattcttcgagaaggaaaatttatgcacgggtttgtaaagaaatttggcatcaatcacatattttcaccttgtaattggatcattgttcgcatcattgcttgccaatttgaccaattctcaacaattcattcatttgacaagccaaatgatgagactgcactaaggctgatgaatgaatctgcatctttgatgatggagcaataccctgacattgtctttggctatggttttagcaatgagtatagttttgtgttccatgagaagagtgaactataccagagacgggaaagcctaatcctttcatcatgttcttcatatttcacttctctttacatgacgaaatggaaagagttcttcccctacacagaattaatgcagacaccacactttgaggcagatgctctatgttatccaaaactaaagatcatatgtgaatacttatcatggaggcaagcagagtgtcatgctggcaaccaatacaacacatgcttttggatgctagtgaaatctggaaaaagcgaaaaagaagcccatgagatattgaagggaacgttgtctaaagataaaaacgagttgctttttcagcaattccaaatgaactacaacaatgaacctgctatgttccgaaagggttcatgtgtctatcggcgaaaggtggaagaacttgcgggggctgaggacggcggcaatggcacatcaagagagcggtggcatgtgaaggtggaccacgttgacctagggcccggtttctggcgaaagcacccgtggttaatgactaattgcactcagtagtcccgactgatacatggtttttgtactggtttatcagtgtatgtaactcttgctgacacaggtctagaaacgaaagacggttgtttgttcacacatcgaggcttctcttcaccctctattatgttctgatggttttctgagtcgtctgcctgaagccttgctagcgttgttttccttctgagctgtgaaaaccttttttcccatttttttaaaaatagctgccatgaacgcacgcacctcacgctttgcctg

SEQ ID NO: 31657 - DNA, 1263 bp, Zea Mays
gtatgcgttcggcgacgcgacgcgcacggcgcaccattccgcggccacgaagagcacaatcctgttcgccacgccatgcctctccacgcccgcgcaccgccgctccgccactcccaccttctactcaccgccgccaccgctcggctccgcccgtgcgcagcgccagcgaccaagccccgccgccgctccctcgtcctcgtccgcgcctccagctcggaccctccgcagcagcagctcaacctctccgtgctccgcttcaccctcggtcatagcaattggggatctcttgtgcgtacgaggatactggaatccacctgcaaatacttcaaaatattccacgatcgagtggttcaaaagtcagatgcagcaactaggacttgttgatttgaggggtgctttatacttccctaattcgtcaggaaagtttctcttacgctgtcaatcatgctactctgaccagattctcagcttgcgaagattctgccagatgggattctttctgtgctagcgcaacctattctgagtcctgatccagctaataatgaaacaaaaactgaaggtgtcatcctgttggcctgcaatgcaaattatgcatatagtgagaaagatagggcttggataagaacagttgcagacaaatttcaacgtgcttaatttagaggtaccaaagaaatgttgacagtcaggcagtactggaaaatggaccgggaaagattggggagtgtaaagtagactgactggtccaagaaggatttggagtcttggcaacgtggactgagcagaataagagagttttgcagttgggaggaaatcagcattaagctactgtttattagggttggcgctagttgaagcaaaatagtccagcaatagtttgttcagttggctagagactatgtggtgatgtgtttggtttgtctctgtgcctcttgctttggtatgtatgtctgattggatttggcattgaagcagaaaggctgctccagagattagtgacatgtgcaaagtagcaatgctgtcataatttacgcatactccagcccaattgaggcagttgatcacctggctgcatttatataagcagtaaaagcatttttagttcaaagtgttgtcacatttaagattgcaaatactgctgatcaatcacattccttcatatatgtacctagattttctattgcaggcttgcagctagtgaccttttcagttgctattgctagtatacacaaacttaacagacaagggaaatgtttgaatcttctg

SEQ ID NO: 31658 - DNA, 2621 bp, Zea Mays
gtctccttcctccacccactgcaaatgcaaaaaccctagccgcaactccctccgcctccacggttctcatccgcgacctatctctatctctccaaggcatcggccacgggctcgaaggtgatggcgggcggcggaaagaaggagaagggtgaggggctcgggcgcgcgctgatccggcagcggaacaaggcggccgcggccgctaaggaacggggcgaggcgctcgcctttggccaccgccgcgcgatgccgctcgagtctgtcattgacgtcagtgacatcgatgccgtgctccagcgggccgcggaggccgaccagctcgctgaggccgcgtccgtctcttccgactccgacctcgtcatcgacctggatgcgacgggggagacggaagacgacaggcggcggcttcgcaaggagcaggaggccctgcacgccagcagcctcagggtccccaggcgaccgccatggcatagtcagatgactgtggaggagcttgatgtgaacgagcgtcgggcctttctggtgtggcgcaggaatcttgcaagattggaagagaatgataagcttatcctgactccctttgagaagaatattgacatttggagacaactctggagagtgcttgaacgcagtgatttggtaagttatcacttatgtgctctactgaattgttagtgtcagtgttttggcttggttgtttccttacagatctccctctctgagtgtgtgcttctactgaccatttgttaaactacactaggaaagtaacatacaccaatacagaaatttgaggtgtatctgctggtgctgacatcatttttttcttggaattatgctactctgattgaagagggacatcttttgatacggtttcttatgcaaattactgactgttacttccctttcttctgtgaagttggttatggtggttgatgctcgggatcctttgttctaccgctgccctgaccttgaggcatatgcaaaggaaattgatgaacacaagagaacaatactccttgttaacaaggctgatctgttgccgttaaatatcaggaagagatgggctgattattttaaggcacatgacattctctatgtgttctggtcggctaaggctgccactgccacattagaaggcaaaaagttaagtggatactctgaaggagaatctgcttcacttgatttggataccaagatatatgaaagggatgaactcttgatgaagctgcaagctgaggcagaatctattgtagctcagaggaggatctcacctactgtagatgatcacgaagccagttcttcagattctgtttcttcagtgactaagcatgtagttgttggatttgttggctatccaaatgttgggaagagttcaactataaatgctttggttggcgagaagaggactggtgttactcacacacctggcaagacaaaacatttccagacactgataatctctgaagagctcactctttgtgattgccctggtctggtcttcccttccttttcaagctcaaggcatgagatggtggcatgtggtgtgttgccgattgataggatgacaaagcaccgggaagctattcaagtggtggcagatcgtgtcccaagggacatccttgagcagatttacaaaattgcattgccaaagccaaagccatatgaaccccagtcccggccgccaactgctgctgagctgttgcgggcctactgcgcgtctcgtgggcatgtcagccatgctgggctgcctgatgagaccagggctgctcgacagatactgaaggattacattgatggtaaaatcccacactttgagctccctcctggcgtgacaggccctgaggtggactttgaacaaatcgctggatcagaaagtccaactacttcagcagctaatgaatcagttactgatgatctcgatgaagaggatgatgatgcagttgatcctgctgaatcaaacatgagagatgtcctagatgaccttgaatcttttgacttgggtaatggagggtccaaaactacagcaaagaagaaagaggcgtcccacaagcaccacaagaagccccagcggaagaaggatcggtcctggagggttggcaatgatggtggcgacggaacagcagttgtaagagtgtaccagaaacccgcagttaatttgtccacggtctctttaagtggcagggtctgatgccccaacttttactgctcgcacaaccccggcacacatgggcaagggcatgggacctcttactgtagcaacggctgaactctgaagctacttcgatggaaggaagaaaggagtactgagcatacgagagtttgaaaaccttagaaacaacattggtagtcgttgccggaacttgtgctgcccttccggcctttctcgtatgtatatgctgtgagttgtagcacggttgattcatactaaacgtggtggtatgtgttgttttgttttttcatgtctcacatagctgcagatacagctttgggatgcagatttgacgtggaaaaaatatgtagacgatttatacttgctaagttgctacatttttattttttacgctccttccatttccattttgtatggatttgttcgcttcagattaaagctagctccagat

SEQ ID NO: 31659 - DNA, 3020 bp, Zea Mays
gaaaattcaagcaggcaacccaaaaagaagaggaaaggattggaaaagctagggttttcgccatggccgtcgcccacctcgaactcccctccctcgaatccacccatcccacgctctcctagctcccgcatctcgcatctccacaaaaagccgccgccttcgattcccctccccgctgcctcgcccccattcgagggtttcccctccccccccccctaaatcgaaacgcagcattaccgaccgagcaagcaacccccgccacccgtcttcaagggtccgagccgagcgacggcgctggcgatccagcagggcgtgagggcggcggagggcggataatcaatgtgtacgctgtgcgccgtgcagcgctggtcgcggcgcgtcgccaccatgctcccgtggctcgtcgtcccgctcatcgtcatctgggccgccacccagctgctcctcccggccgcctaccgcttcgaggtcacctccccgcgcctcgcctgcgtctccgtcctcctcctcaccctcttctggtacgagatcctcctcccgcgcctctccctctggcgcgcccgccgctctgcgcgcctccgcgaggagcgccgcgcccacgccctcgagctgcacaagctccgcaagaccgcaacgcggcgctgccgcaactgcagcaacccgtacagggaccagaaccctggcggtggtaagttcatgtgctcttactgcggtcatgtctccaagcgccccgtgcttgacctcaattcagccgggaaggcccccaccggatggccttgtgctcaggattgtggatattggctcgacttgcgctgctcctccggcaataacagctccttcttgggattctcctggcgcttgctttcgtccttttgctcgacagcaatgaggtggttattgaggaatatattcagacttacgtcctcaggagatggtgagggcttgagcatagatggtaaaaggttggcaaagagaggggagaatggaggaaaaaccgaggagagcaagaccgagaaggcgagaaggaaggcggaggagaagagactggcaaggctggagagagaaatgctggaggaagaggaaaggaagcagcgagaggagatggctaagctagtggaggaacgcaggaagctgagggatgaaaaagcagaggccgaggagcggtcaaaaagtgctacacctgtcggggagaaggatgctaagagggaggcagagaagcggcgccaggagaggaagaagaaagaggacaaggggtcaagcaagagcaattcagattgtgaggacattgataggagattggtccgagaaggcgataggaagagagactttgacagaaagagtgacttggataggcgtgagggttacaagcctcattactttgattctaacaatcacagtaataaaacaggtgagagcagatcgaaatactttggccgtatgacaggtggttttttatcttcttcaagagggtttggcagcagttcattctttggcagaagtgctcaggcccctgcccctcaagttagcaaggttagtagacctgtagttcctgcaactgaccagggtaatacagtcaaaagagatgtccctcatgcagccacacaagctacaggcaaatctgctacagctggagaaactagaaatgcatggactaattttaatcgacctgttagtccaaatgtgcatccataccctactggccttaaaaagtcatggcatcagttatttagtcgttcagcatcagtgtctccttgtcctgacgttacaacttcagctcatgatatggttcggaaggcagaaccaaatggagctcaaatatacaatgctcatacatttctctctcagtatccgcctctggactacaagccaagttcaagccagtctatgcaatttccagaatcaacactacttgaagaaccagagcaatttgaggacccatgctatgatccagatgcaattgcattacttgggccagtttcagaatctctagataacttcccgttggacttagattgtgggtttttctcgagtgatgttgctaaagagtcacatgggaggccttcaccaattgagtctcctctctcaagatctcgtacggttgaagaaaagcctatcgagcccccacactcctcagttgcaagaggccctggtggttccattctacccgagtctagcagtgaacaaggcacatggcaaatgtggagcacaccattggttcaggaaagtttaggtctgcaaggtcctcagagccagtggcttcgacaaaacacaaatcaattcaaccatagtgccaaccttttcagcagcggaggcggagcaataagtccccttggtactggtttgaatgacagtgatccatggctgcagaaagcacctttccagcaattgccacctgatacaccaagcctgttcctttcacatgaaatgccaggaaaattacacaatgacttggtttttgggtctccaaacaaatcagcccgtgaacgcccatttggaccgcctggttatttgtggcccaaggaggaactggcgctgaatggagctcaggacggtggcggtgggcatatcctgtcgccgtctggtggcgcacgagttggcggcggcgttggcttattttcttcagcaagtccagatgtacagtcactgtggtcattccatgaaacattcaatgaaaaagagagcatagaatgaacaaacttttataatagaaggaagggaaaaagtgtggagccaaggcttccttgcctcctctctcttgtagggttttaccgtctttaccgaggtgataagctggactgtgttccttaatgatgcaaaaaaagaagaagatatggggtcattttgtttcctagcactcaccctcacctgttaacatgcgtcgatgcactgcattaggccttgtttcacctgatgtcattttttaccccggttccgcattgtttttgtcgcgcacaggtgatccatccgtccacggctgtagttatcaactgtgtttctgggacgattttggttttatatat

SEQ ID NO: 31660 - DNA, 1666 bp, Zea Mays
gtggactcacatgtaagtgagatagtaatggtatgaatccaaagtggtgatcttttaatggtatgaatccaaatttccccttttaaaaatagtatagattgaattctccccctcaaacaaaccactcttcgcttcgactcccactcccactctccctttccactctcaggctcccactccccccctaccggctaccctacccatcacacacaaacagccactcctcacctcccccgtcctccggttcatgtcctgctgctccccatgtcgcccccactcgacctcgactacataggcctctcgccggcggcggctgccgccgctgcccacgacgacctgaagggtaccgagctccgccttggtctgccggggtccggttcgccggaccgccgtgttgtggctgccaccgcaaccaccctggacctgctcccggctaagggcgccaagcgcgggttttctgacgaggcgccgacgccatcgcccggtgcagcttccgggaagggaaagaaggtagcggaagaggaggacgacaagaaggttgcagcgacgccgcagccggtcgcaaaagctcaggtggtgggatggccaccaatccgaagctaccgcaagaacacgatgtctaccacccagctgaagggcagcaaggaggatgctgaggccaagcaggaccaggggttcctgtacgtcaaggtcagcatggatggcgcgccgtacctcaggaagattgacctcaagacttacaagaactacaaggacctgtcgactgcgcttgagaagatgttcagtggcttcagtactggttagtatgggtgtaatgccatatcaggcaaggatggcttatctgagtaccgcaaggatggtgaatatgttctgacttacgaggacaaggatggagattggatgcttgttggcgatgtaccatgggagatgttcgctgactcttgccgcaggctcaggatcatgaaaggatcagatgcaattggacttgctccaagggcagctgataagtccaagaatcgcaactagaatggttgcttcttacagtccagagcaagagggagatatccagtgactgtagggatctttgtggaagccggaaaacgtctaacagtttcaagaagaattctgccttatggtctgtaccacatgtttttgctgctacgcaagtaaagaactccacgtctgtcaatgttagttttacaacatcgtctacggacaaaaaaaaaaccccccgctatttgattgttgctaagccttcgtacgacgtgtaaatggtttggtacaatgagtgctgcgactacgattgagcacccctctacctagtttgcaaaaaaacagtgtcccatggactgtctgttgtccctctatataaatgtccaatgaagcttgctaatgtgtggtcatcgtgttcatgttctggtccattcatctcgacagtgttgaaaccctgacgaagcaacttgtttcgaaagtgggcctcctctgtggagcagtttctttgtggaaactttgattcctctttttttttcttttttttgttaccagctttgatgcctaattgctggtggggcatgcagcgtatgcgattatttgtctgctgctgaaggtcatgatggttaccatctatgatcccacaccaaagtgtcattttttttaaaaaaaaaga

SEQ ID NO: 31661 - DNA, 1876 bp, Zea Mays
gtgttgtgtgtgagtttgagtgaggtactcacttgtgtgggccggcttgatcctaacacatgtgagcttgcatgtttccttgatcagtacagtttttactccttatgaacatcttgctgcaatgaactcacctattctagtcactactggtcaaatggtcctgattggggaacatttcgctatgctagtgttcatgcacatcttgggagaacaggtagcaggagggatgatttagaatctctagcatatacactagtctttcttctacgaggatgtctaccttggcaaggttatcagggtgacaacaaaagcttccttgtctgcaagaagaaaatggccacctttccagtatctctctgttgcttttgcccacatcctttcagaaagtttgtagagtatgttgtcaacttgaagtttgatgaagaacccgactatgcaaaatgtgcatcactttttcatagtgtactaagtgtagtaggttcaaatccagatgtcagaccaattaacactgatggtgctcagaagcttatacatcaatttggtcaaaagagaggccgattttttatagaggaagaagcagatgaacaaccaaagaagaagatcagggtgggaatgcctgcaacacagtggataagtgtctataatggcagagtacctatgaaacaaaggtaccactacaatgtttcagattcaagagttggacagcacatcgaaaaagggaatgccgatggactgtttatcagttgcataacatcttgttccgatctatgggctctaatcatggatgctggaactggtttcacatcccaaatttatgagctcattccacatttccttcacaaagaatgggtaatggaccaatgggagagggactactatataactgcggttgctggggcaaacaatggcagctcgttggtagtgatgtctaaaggcacaaagtacacacaacaatcctacaaagttagcaatagtttcccctacaaatggataaacaagaaatggcaagatggtttctatgtaacttccatggcaactgctggaagtaggtgggctgttgtcatgtctcataatgctgggttttctaatcaggtggttgaactggatttcttgtatcccagcgagggaattcataaaaggtgggacaggggttactggataaccgcagctcctgctacttgtgatcaggctgctttcgttttaagtgtaccaaggaggcgacttacagatgaaacccaagagacactgaggacaattaatttccctagtaaacatgtgaaggacaaatggtctaagaatctctacctagcatcggtatgctatggtcgtactatatcctagggatcttttcgagcggaatcctgccagcaccatcttttgacgtagagcaggagatatccagagccacctgccagaagaaagcagaggaagaaaaaaacaaaacaaattattagtcggtgtatggatatacagtgatatacggccagaaaaagtggaagaagagcacccctacaagcatctacggatgaccaaattggcatggccacaagcacggaagtttattaggattattattcatttagattaaattagttcctattttctagagtaagtcagttttatgtttggtcagggataaactagaaagtgaagttgtttagatatttatggagtcggttcctattttctagggtgagtcggttgtagatggattataaagccttattgtaataatgcagagagggcaagacctacagttatcatttcatttaatctagtatctattatcttcattcctctttggtgctttgccgagaaaagcattcgagtttctctgcgaaagtgagatcaacgcctgctgctcaaccaatttctg

SEQ ID NO: 31662 - DNA, 4533 bp, Zea Mays
ccttcctcggcatccttcggtcccggaatatgcccccggcgtctccctcctcgcgttcctctcgtcggtgagctcctgccgcctggctcgcacagccgatttgcctcagtccagatcgtgcctccttcttcctagatcgggtccgaattcggctaccctcgccaccgccctacgccaggtgccgaggcctccgccgatctcttcgccggcgaagagcggccaccagaattctggtggttcctgtagcttgtggatggaggaggaggcgctgggtcgtggtggtggtgaaaagctttgatttcgtagccgtggtggacgccgctgctaatgcccttgccgtgcctcgttggtggcgtgcaagatgtatgccgtggggaaggtgggcagcctcatctcccgcagcgtgtacaccgtctccggcccgttccacccgttcggcggcgcggtcgacatagtcgttgtgcagcagcaggacggcagcttcaagagctcgccgtggtacgtgcggttcggcaagttccagggggttctcaagtcgagggagaaggttgtcgacatctccgtcaatggcgtcgacgcagggttccacatgtacctggacagcaacggcgaggcttacttcctcaggaacgcggacccgaatggtgaggaaggggagttcattgtctcccccgcctcgtcgggagatgagcgagaggtgccgatccaggaagctcagctgaggaagtcgaagagcacttcgtgtgatagctcgacgatggaagccgacgtcggtgagggcaagattcttgcgaggacaacctcgaggcggataaccatacttgaaaggatgtttggccggaaatcgattaagaacaatgcccatgctgtggatagggtgagttcattggagcgtgcagaggtcgctgcagaactcctagataccaagtggtcaacaaatctcccacgtagttcaaaacctaatggttcaaatgatgagccttccaagagcaacaatgatcagatggaaacctcaaaacctgtattttcggaacatagtttggatcatgggaaagagatggactctaactgtgacaatgctcactgcaattcatgcagccctcgtggaggaagaaacagttcagcagatgaaaccgatccgtgtttacaagccactattgtgaagaaagaggtggttgagatacacgcgcgtgagagcagcgacttcactgataatatcacttcaatcacacatcaacaagggtcagaatcttcgtcaaatgatctgggaacagataaacttatgcagcagtctgtcgatactcaagatgagttgctgcatgatgttgaagatgtaactgaaagggagacacatgcagaggaggttatttccaatgacatttttgaaatccatgttgttgagacagacattacaagtggtaagagcgaggtggattctgagattgttactgtggatccagaaccagatcgagctaaccagaattttacagatacaaattaccaaaattatggcaccacagatatttcatctgaaagacatgaggtttcattgatcccttctgcacaggatgcagttcaagagaaaatagttatcctcagcagttctgaggctgtggagggctcactagatgcagttccagagaaagtagtcattctcagcagttctgagactgtggatagctcatatgctgtgtcctgtattttggatgacacagttcatgatgcttctgatatctcacaggctgacggtgtacaacatgaggagcactctagtatctctgatgggagtacagaaaagctaatttctgaggaaagttcattagtatgctatggtgttcccagcaacaaaaaagacttggttaatatagctgttcaagaaagtaaagcctttatcttaaaaaatcctgcctcccaaatcttggaagagagtggtccaggtttggatgtatctacagacagtgtttccctttcacatgcagactcagctcctgatttagcttgtcagcatgtttctcctaatgttgaagatacaacaagttatgagcctggcattggtcctgaagatgtaacaaaaaactcagttgtggaaaatggagcatgcagcggggaacttgttgtttctgttattcagacctcagcgggagatggactgacaaaatgcattgctcatccagctgttttttctaataaaatagaagtagaaggctcaccaacttctgctggattttccagtttgatcagtgttgaagtgcaaaacacaaaactagaagatgacacaaacaaatctagttctgtgattggagatgaagctggttttgtgcctgaggctacagctgagcttgatgaagaagcagaaccagttatatcattatctgaatatacagaagaaattcagtttcaatttagtgatgctgaaaattttgcagatagaaaggccacggatgacatggtggctaacaaaacaacaggtgaagtagaacatgatgaatctgattgtgacacagagaaacaggaagaaggtgatgtaggtcttgtaaatgacttggagaactgttctgcgtcattaaagcctgtgagtagccctgtttctattcctgcaattgacttccagtcaggaaatagtaacagagaggctaaatctctaccaaatctccgttctcatatacatgatcttgaaaggtcttatagttttcagctaagccgctcactgcaatcaactgctgaaaataatggaattgatctagtcaagagcatgaattatgcttttcttgagcagaaatcagaagctattggtgatttttcagaagaaaataacagccctcctgaggttaccaacactgtagcacttgatggcaaccatgctgatgatctgaaagttgatgcgttcattccttttgcagaattatcactatgcagacacctgttatctgaaggcatgggggaggatgctgcttgcagtgcatttgattctgagaaggtaaccttagaggagttccgtaacatgaagcaatcactgatgcgaaacaacaaactagttgttaggattgctggccgctactttccctgggatgctgctgcacctatagtactcggtatgatttctttcagtgaggaacaagtttttgaacccaaaggaatgataaatgtggagcgagttgagcaaagtgcagctccaggtggcagctggagcatctggccatttagtttcagacgaacaaggactattactgctatccagccagtttgtgaaagtattgttgagacttctgtatccactcctaaagaattgacacattttaaagaactagatagagaaaggaataaatccagggtaaagaggattgagaggaaggtgcgatcactcactccaacatctgacgagcttgcatctcttgatctcagagagggcaggaacgtggtaacatttacgttctcaactgcaattgttgggaaacagcaggttgattgccacatatatttatggagatggaatacacgcattgtaatatctgatgtggatggaactatcaccaagaaaatggataccagcttctatttctgagtgcacgcgctatttcacaagcccacatcacaagacagtttcttttcaacctaaagcaggacggcaaagcacttcctgatggccctgttgttatatctccagatggtctcttcccgtcactttacagagaagtcatcagaagagctccgcatgaattcaagatttcgtgtctagaggccatcaaagatttatttccacacgactcaaatccgttttatgctggatttggaaatagagacacagacgagcttagctacctcaaggttggtattcctatgggcaagatcttcataataaaccccaagggtgaagtcgcagtgaaccgacgggtcgatacaaagtcgtacacatccttgcatgctcttgtccacgggatgttccctccaatattgtcgtcatctgagcaggaggactacaatgcttggaattactggaagatgccattgcctgatgttgatttgtgaggtacaagtcgagtctgcacaacagcactgcactaattttatgatgtgccgtagtgatcatgagaaggccattacttggttggctacatgtggatgctcctgctcctgatataagttcctgcaagatggaattttgtatatataggatcataatagatgtagtagctatttcttgtgtctcctgttgttgttgttgttgtcgtcgtaggactggaaatcatacctccgtgtgtcctgtaactgaaggtacaaaatttactggatggagggatctgatagtatgttgcagccccccctttttcgtttcatccttgatgtaattgtggtaccgatgtattttgtacaagaacaaatcaataataatgcaatcgaaagcgagctgttcatacgcagacacaacatgttgcattgaccctaggtgcattcggtaactgaaaatcggagctgtgtatactgtggacatgtcatctttggtatgcctgcgacttttagctgcagctaatgtgc

SEQ ID NO: 31663 - DNA, 2433 bp, Zea Mays
caaagccacaaaggcctgttaggctagctgcttgccttggctgacggctcccccacggaccacggttgtttggctgcgcggcgtgtgcccttgcggtcattcgtcgtccagccagccgtccagtggccttgcccggcggccggagcgggcgagcggcggtccggccttctcggctcctcgccgtccggcgtcctccgtcactctcgctcagccgctgtgtccggccagcaggtagcagctgtgtccgtccgagtgtccgacgtcctccggcgctcagccattgtctccggcgctcagccgccttgtccggccagccggccaggccgacagggccagcgccgagcgccgctccagcctccaggctcaactccaagtcagaattgagaaataagatggaaaatgattggttgaatcatagaatgcagcacaagcaggcgcatcacttcgccttccatgcgtactagacggtgttggtcgcgctcgaggtttacttacggggctccgttagcgtcgagcccccggatgtgcctctccttcgggacctgttcctaatcgagggcaagtgtcctagttctttggaccccggtggctgccacgacacccgacacccgccgcctgctccaccgtcgcggctgctcatgccctcgctgctgacctagcgcatgcaaacctcacatttcgaggcctaaaaccctcagcgtcagtggccggcacgtggcctctctagtgcccatcggtgccatggcagctctcgcgccgtggatcctacggcggcgacccgtccgctctgtcgcttctctggtctccattcgtgattcatggcatcgaaggtgtgggtcctcttcctcatatccttcagcatcgttcaagtgtttgtggggatggtttggaccagaggcacacgggcggaggaggccgtggtttcagcagcccgtgaggtgcgggagcacgacgatcacacttgatacagatggcaagtttgcgaggtttggagtcggcgatatgggtgtcaccaagcagaagtggaggcagcagccgcctccaaagaagaagatgtcgagaaaggccaaggtcaaccagctcaagtggtaccgcctgaaggccaagaagaagatgaagtcacccaaccccgaagttaggatcagatacaagcttgaaaaggctaagaggaaggaggaatggttgattgagaagctgaggaagtatgaggtcccgaggacaccggagccagttcatgaccctgagattcttactgaggaggaaaagttttatctcaagcgaacgggggagaagaagaagaattatgttcctgttgggaggagaggggtatttggtggtgtggttctcaacatgcacctccattggaagaagcatgagaccgtgaaggtggtttgcaagccttgtcggcctggccaagtttacgagtatgctgaggaattgacaaggctcagcaaaggcacagtcattgatattaaacctaataatacgattatgttttatcgcgggaagaactatgtgcaaccaaaggtgatgtcacctcctgaaactctttcgaagcagaaggccttagagaaatatagatatctacaatcccttgagcataccagccagtttattgagaagctggagaaggagcttgaagattacaagaagcatgttgctttattcaagaaccataataagggggttgctattgagaaaatcagcaatgaagataccactgttgatgatcctgcaactacctcagattctaaatgagctaactatttggacatgctggcatgatagatctttcagtcgtcaaatcttgcaagcctacatagctcaatgttcactattcatattaaatatgctggcttcagttgtggtgatatagggagctagcttgaaaactcagattcagatagaagaagtaatagccataggattttaaaggcttgcaagattaaaatcctggttgatggaaagctgtattacttgaaaaatacctcgttcatcaatctatctctataaggaaaggctagtagcatgatactgagtgcagatcagccttttaatatttctgcaatctttcctgtaaacacttttatgataaaataggacattcttttgaattgtggcccccttttatgtaggcttttcacttcttgggccttccttgctacataaaagacaatgaaattgtaattttggagctggaatagttctgcaggaccctctcagaaatgaagacatttactgtgccacacgttcacgtactcagtattcatacaccaatgatggacgtcagaagtgcacaagatttctgtactgggccgttcctgagctgagaagatgggcatgtgcagaagcacaatgatgactttaaggatttggcttgataaaaaggaagcgaaaagacagcttcgtcagagatagagctctagtcctacg

SEQ ID NO: 31664 - DNA, 1544 bp, Zea Mays
acagctcataaatcagtaacttttgtataagtcgaataaagtttgtgctcctaatatagggaaataatatgcaaacttgctgaaaagcgtttgttcagctgcttgctgggtcaaactactctcgcccttagacggaccgaatcctgctcaacttgggccgaagtaagtgaagaaaatatcagaaaaaaataaagtaaaatcaattggacttgtctattttttttaaaaaaaaaacggcaggagagttgccgaaatttttattagaaggttgatctaattgaagaaaaattgtgctgacttgccgaggcaggcccatccaccaatcatcgatccataattaggtccctgataaatgaattaagaggaggtagaactactttttttttcttcttcacccgttctaacttgtctgagttctgtagcaactagcaaggaaccagaacaacaaagagtcgtcgcaatatgattttggcttctgtgaattcaattctaataacttctctaaattgttctagctactgtaggtcagtgcgcgtcatagcttgagttaatagacgcacagggtcgtcaatcctcttgccaacagtactcgatatactccatgcattcacaaaaaaaaagatgcaagttcaggttatttggttgagacaaacgatttaaagttcaggttaccggcagcacggcacgggcggcggcccctcctgacgtgtgagcaaccgcgcactatcatagtagggatgatgagcagctagcagcaagcatgctcccggcgcagctcctgcccccggagagatctcgtctcgtcgcgccgtccgacgaccctgtgattgaaccattaaaatctcccgtgctttagggggggggggggggggggggggggggtgcaaaggcccggcgcaaaaagagggcttcttttgatggagcagaatggaaagaagagaagccaagaaaaggaagccccctgcgctggcatccctcccctgaccctccctcatgccatgttgtgcgcaggcaggcggatccatggacggatgcggcgcggtggtgagtggcatgtgatgggcgacagcttttgcgcgggcgcgccggcccccacgggtggtgacctgacctgacccctcccggcatgcgttgaacatgtctgctgagaatgaaagacaccagcgcatggggtgggggggttctttcagggttcgttcaaagttgcaggcatcttcgttcgtcggtcgcttcttctccgttccgctccgctccgttccgttcgtctcgctttcctcgctcgctctgcctctgacgaacacatgccaccgcccacccgctgaccgctccgccaaagcggcccgctgcagcgggagatggagagaaagctctgagggtcaagactcgggaggagaggactggcagaagaatctcatattgatgcagggcgctgatgctttgaggaaatgggacgagggggggcgtctttcaggaacagtgccgcggttatccatccacctttttttaagagagagagagagagatcatttcgagccacacaccgg

SEQ ID NO: 31665 - DNA, 1995 bp, Zea Mays
ttcggcggatggggaggaaatttgtgcctctccgctggctggcttgctggcattgggaagggccctattactcgaaccgaggcatggaggacgaagaaaacatcgagggagaactgttgctcgtggagtcacaactccacgacatccaaggacaaattaaaacattactcgatcgccaagaggagttgtatgaacgccaggcacagttgaaggctttgctcgaagcatctaaattgaccagaaatacaacaattaacacatcttcagttgctccggaagattggtctgggagcttcccatgggatctggaggctgacgataccaggttcaatatatttggcatttcctcctaccgatcaaatcaacgagaagtaagtttataggagactggtctgacattttaaactctttcactcctcttgagtactgcaggtgaaaactcaaattgcaagtttttattttttaatcagtaccattcggagttgctataaatttcattagcgaacaacaaatggttgcagttattttcttcttaacgctgttttgatcttgtttggatacagggactaaactttagtctctatcatgttggatgtttaaatgctagttagaagtattaaatatattctaattataaaactaattacataggttaggactaaacgaaatctattaaacctaattagtacatgattcgctcatatgacactatagtaaacatttgctagtcatggattaattaggtttaataaatttttctcgtcgtttagtcttcatctctgtaatttgttttataattaggatatatttaatatccgtaattgacattcaaacgttcgatgtgacacatactaaactttagtcaggggaaccaaacacccccttcgtattgtacagtttcctcttgtacagtttcctctcattttgcacccattaaacatattctgcttatagataattaatgcagtcatgagtggaagagatgttctggtcataatggcagctggtggagggaagagtctatgttaccagctcccagctgtacttcgtgatggaattgcactggttgtcagtcctttactttcccttattcaggaccaggtcatgggactgtcagctttaggtataccagcatacatgctaacttcaactaccaacaaggaagttgagaagttcatctataagacacttgataaaggagaaggagaactaaagatattatatgtgacacctgaaaagatctcaaaaagtaaaaggttcatgtctaagctcgagaaatgccatcatgccggtcgtctttctctgattgcaatagatgaggctcactgctgtagccaatggggtcatgattttcgtcctgactacaagaatcttggcattttgaaaattcaatttcccagtgttccaatgatagctttaactgcaactgcaacaagtaaggtccaaatggatttaatggagatgctccacatcccgagatgcatcaagtttgtcagcacagttaacaggcccaaccttttttataaggtgtctgagaaatcgccagttggaaaggttgtcattgatgagatcacaaagtttataagtgaatcatacccaaataatgagtctggaattatatactgcttttcaaggaaggaatgtgaacaggttgcaaaagaactgcgcgaaaggggtatttcagcagattattatcatgcagacatggatatcgttaatcgtgagaaaattcatatgcgacagtggtataatgactcaacatgttgatttatccgacaaatttctatgctgaatgcaatccatgaagcacatggaaaggaaaaccgtcagggtcaccgaataaaatgagaatcacagcatgactggttaggttcacttaaaaagccttacccggtattcgttctagccaaaaagggtatctaggagtgagttcagtagttaacctcataagggaagggtgttggttggttaagtttagattgtgggggcaggctg

SEQ ID NO: 31666 - DNA, 407 bp, Zea Mays
aaataactgactttattaataactacaccaagttgcaggggatacccacaccttggtgacaatcattacaaagatccaacttcagtacatgtcacacccggtttcagaaggcaaaccgaatgcgaaccatgtacgtgccaggatcagaattcacgtacacaacgattacataaatgaacatcatcgcacagtgctcgaataataacataaaagagtattaacttattacatcacagagtcagagacatccacatagtcatcaacttaacaggtaaatcaaagtgctaagcgaaacgcagtaaagatagggccttcacaggcagctgactgggggttgccgccaacccacacctagaactcgtcgtagtcctggaactcctggaagtctccttccacgacttcgtctt

SEQ ID NO: 31667 - DNA, 4389 bp, Zea Mays
aatccaagtcagatttattccacaccttcattccatgcgaaacgaatagaccctcaattctctttaatccactatgatcctcttgcaaccgaacctgaccttatatgctgtacccttttgagtaaaaatacctttttttcagggaatctgtgtttcagaaatctaaacacacccctaatccgattccgatgctgtgctgccgcgccaccgcatccctgccgtctccgcctcccccctcgcatgctgccgacccccacgcgcgcctcaggggcggcggccggcccgctacgaccttccgggcgcgctcgccgccttcgtctccatgtcgtcaccctcctccgccgcccacgcggccgcgggccccgtcctacgcaccttcacagcgctcctcaagctctgcgcggcgcgcgccgatctcgccacgggccgcgccgtccacgcgcagctcgaggcgcgggggctcgcctccgagtccatcgcttccacggcgctcgccaacatgtacttcaagtgccgccgccccgccgacgcgcgcagggtgttcgaccggatgccttccagggaccgcgtcgcctggaacgcggtcgtcgctgggtacgcgcgaaacgggcttccatcgtccgcgatggaggcggtcgtgcggatgcagggggaggagggcggggagcggcccgactccgtcacgcttgtgtccgtgctgccggcctgcgccgacgcccgggcgctccacgcgtgcagggaggtacacgccttcgcgctccgcgccgggctcgatgagctcgtcaatgtctccacggcggtacttgacgcctactgcaagtgcggcgcggtggaggcggcaagggctgtcttcgattgtatgcctgtcaggaactccgtgtcttggaacgccatgattgacggcactacaagcgtgcggggagcttggatatctcgatgaggtgaggcgtgtccatgagctacttgtgagagttggcttgagctccaatgtgtcggtgacgaacgcgcttatcaccacatacgccaagtgcaagagggcagacctcgctgcccaggtgttcaacgagctgggcaacaaaaagacacggatctcatggaatgccatgatcctcggcttcacgcagaacgaatgccccgaggatgcagagaggctcttcgctaggatgcagttggaaaatgtgagaccagattcgttcaccctggtcagcgtgattcctgcagtcgcggacatttctgatccgctgcaagcaagatggatccatggatattctatcaggcaccaactagaccaggatgtctatgtcctgacagcccttattgacatgtactccaaatgtgggcgtgtcagcatagctagaaggctcttcgattccgcaagggacagacatgttatcacctggaatgcgatgatccatggttatggttcacatggttttggccaggctgcagttgagctatttgaagagatgaagggcactggcagtttgcccaacgagacaacattcctctcggttcttgcagcttgcagtcatgctggtttggttgatgaagggcagaaatattttgctagcatgaagaaggactatgggcttgaacctggaatggagcactacggtaccatggtggatctacttggacgagctgggaagctagacgaagcttggtctttcatcaaaaacatgcctatagaacctggcattagtgtttatggtgcaatgttaggtgcttgcaagttgcacaagaatgttgaattggctgaagaatcagcacagataatctttgagctgggcccagaggagggggtgtatcatgtccttttggcaaacatttatgcaaacgcttcaatgtggaaagacgtcgcgagggtgaggactgctatggagaagaaaggactccagaagactcctggatggagtattatccagctcaaaaatgaggtccataccttctactctggaagcacaaatcaccagcacgcgaaggacatatacgcaagactggctaagctcatcgaagagatcaaagatatgggctatgtgccagacactgattcaatacatgatgtggaggatgatgtcaaggcacagctgcttaacacccacagtgagaagcttgctattgcatatgggctcattcgaacagcccctggcacgacaattcagataaagaagaaccttcgagtttgtaacgactgtcataatgcaaccaagttaatatctctactgacaggacgggaaataatcatgagagacattcaacgctttcaccattttaaggatggtaaatgttcatgtggagactactggtagtgaaatgttgaaggcagtctgaatatccatttccgagatgatatacagctgctatacaagtatacaattagactaacaggtaaagctaactattctatctttttcaccgaccatgttttgaatttgatcgggggcattcgatatgttgatttaatgaggaatgtataccatgttcttttttagtctgtgtagccaccctttgcattgatggctcttggtttaagctagtgaacctattgtagagttacaggtttcagtccattcggctttgtcattgatacatttttttattattatttctaaataaaagtagtgcacaagatatttatgtctattgagggcactgcttttcatcatcatgccttgtctgaagcagtgaagctaaatgtacacgatgagatgagcactggaaactgaaggaaataagctaaacgccttgtctgattcagctgacttgtacttgccaattgctgccaaggttcagcaagcttgacgatgactgccttggttcctctccagcgaaaccagacactccccgtaatacaatcacaggtacaggtacgctagaagacgttgtctgttacttgaatcagtataagagaattcgcttaattgtggcgcaatcttaagttgcatgattgagatatactgcaaatattgggaggcatataaaatgagaagagacctgtggtctattagaaaaggagctttctgtatgctgcgttgtcaacaaatatgtcaggtgttgatcctttaagacccacagacaacttttggatctgccagtaagcaaaaaaaaaaaagatcagaaagagtgtacggccggtgagcaagcatgggctgcatggcatcggtgttggctatcggaatgacaggtgaaggactgaaaccctgacgtgcaggccgggccattggttagcctgaccaatcctggtaggtgtctgccatttatgatggctgggctggctctcggagcaactctctccaatgagggctttccgtcattgatgccggtgcagaccgtttttcttcgccttgctctcagctagctctttgatccctgttggattggatggaggtccgtggcagtgcacccagcatgaagccaaaggtggagccgccgttggaggcttcacacgactgggaggtgaccccgctgtccggcgacaaccccttcttcaccagcgtcatgcgcaagagccaagtccagaacccctttcagctggtcatcccggttcgcttccaccgccacctcccggaggcgcgcgcgcccgcggtgctcctctgccgcgaccggtcgtggacggtgagctacgcgggcgtcggcaagtggaagaggctccagggggcgtggagggacttcgcccgcgacaacgggctccgcctcggggacgcctgcgtcttcgagctccttgtgcccagtactgatgcaacccaaggagacggagacggcagcaaggatcagggggaggtggtgttccgtgtgcaggtgctccgcggcggcctgccggctgagatcacctcccggggcgccacctccgacgatccactcgtcattgtggactagatccaactgcggggagagtagtacgtagtagactagtagtggtgcagtgcagtctgtagaggagacgagacgctcaggagctaggtagcatcgtcgttgtattttgttgttgcccctgctctagctagctcgctggtcctcgtggatcttgtagccagtttctttctttcagctgcagaccttcctcttcctgtggacacggttgctccatcaccaagtgtgctgatgctaccagctttctgctgtgacagtacatagtagacgctatcaccaagtgtgctgatgctaccacattccagtagacgcggcatgcttgaagagatgtgttcaatgagcatcatcctttgtgtccatccatcgtgtcaataactagagctgaatagctcgaccgagtttagtgtttaggctatctcgagcagcgttatctaaatgaatattctgtgtcctttaaaggaatattctgtgtcatttacagtgcactataaaagattatatcatctatatcatctcgtt

SEQ ID NO: 31668 - DNA, 490 bp, Zea Mays
ccatgatgcaatcctatatccactgcaggcaaggaatcatctgcatctccattctccaggaatgtgtagtcgcataaccagtttgaatattgttagggttggcatgaaggttcagcccacgactaggctccacatgtttgtcatcactcagttctttggagtttggacaacccccgagggcaccaaatctaggaggctcttcttcgcactaaaatcacaagaatgcgctcgaaaactgagggcagatttggcaattgaagaacagtgggaacaagaactgagaagaatgctgaagggcatagtaacagatacaagctaaaattgagacacatataaatgaccatgaatgagactgtatgagcctgatcagctcaattctaggttatgtgcattgtttgctcagtagactacagaccataagatgctcgacgttaaacttatgctgtcatgtagatgcttagtcctctcctcgcctttcgcagtcgcaggc

SEQ ID NO: 31669 - DNA, 1793 bp, Zea Mays
atctgcttctggttcttcggttttgtctaccggccgctctgcttcatgaggagtgtgccgtgagacaactctgcgagtcaagaacaactggtgaggcgaaggtgagaatgggatgatgattgattaatcactaaggcctgccttgcccttttgttttgcttggattctctgagtgatgactgcccatatgaattgcttcctactcctctcatgctttgttcactgaattaatatatgttgcttacaagcgaagaaatctattattaaaacaaaaatagagaagatgctgcgagttcattaaaccctatcagtccgtctgttgattgcgtagtatcgattgctgctgcttgtgaaatgatttcctatccataagggaaaaaatgattcatttaattctgttttgatacggtcaagatcttgttctgaaactgatagcatgagttaacttgtctccagaattgtggatgttcaaactagtagtggtaaataagtcaaactttaccaagttagtagaaatttaaaggcgatgccacatgtctaagttattaactccaaattaatgcagcgaagaaagccgagaggggagaccaaatggcaactgattcctcagctctgcaggcttcctctgagtcgattgcgcaaaagatggggttcttcagagtccctgaccttcttgtaaaactgagcgccaaatgtttgagcgatctggatgtggttcgcagcccaacatcgcccttggacctcaagtttttcactggccttggcaacaaatcacccggtgacgccagccagaaccagaagatcttgcttggtgacagggttgggcttggacttgtggattccctcactgatgacaaccccgcaccactaggtggtagaaaggttctttttcttggatctgagatgaggattattgataacctgtctcgcaagaacagctccaccgctcctgatcaagctggggaagttgaacagaaggatgataatatgtctgacggactgatgggcagtgccatgtcccttggtgacatcatcaactcagaggattacactcgtgttgtctcccgtggccctaatcctaggactacccacttttttggagatcgtgtttttgagcttcaagctgagcagctgatgcctgttgagagtaaggtcgatcagagtacgtctcctgtggaagacggtctgatgagcttctgttatttttgcagtgagaagctcaaagaagcggaagacatctacatctatcagggtgacaaatccttttgcagcgtggagtgcagggaaaatttcatggtagattatgagatggaagaagcatatcatcctgcgtctcctaggagcccaccctctgacggtggtcggattttccaactgatccgttgagtcagcatcagtaacaactcgatatggtcatatctgaagtgctgtctgaggttaataagttgcagccatggatgtgatcatgtttgcagtagttgttgcccggagattttgtttgtcgcggcactgatgaatttacctcacctattgatttcttttgttttgcgtacttggatcctcgaatttttggaggagtccaaaaaatgactacctccggtcataatattatcttgatcggagatgagtgtgtgtgtgtgtcctcgcgtctcaacttgagttgtttgcttcgaccgcattttcagtggctcactcatatgtggacgcctcttattaatatcatgtatctgaacctatgttttgatattttctgaaatgaaatggtaaagaataaagttttatgttacttgttg

SEQ ID NO: 31670 - DNA, 2086 bp, Zea Mays
gctttcagcctcatggccagcgcgggactccaccactcctcctccccctctccgcggatcacccaccgaacccacgcgaaaccggcgtccagatcttctcccccgcggttcagatccccggacgcagccggcgccttctgacttgggttggcacagccgtacaggttgctttgcgctgcggtggatctcctggcgtggcgacatgggcctgggtttgggagctcttctcaaatccggcgggctctcggtctcggatcacgacgccatcgtctcgattaacatcttcatcgcgctgctctgcagctgcattgtcatcggccacttgctggaagggaaccgatgggtgaacgagtccatcaccgcgcttgtcatgggcctcatcaccggaggcgtcatcctgctggttactaatgggacaaactcacgcattcttgtgttcagcgaggacctgtttttcatatatttacttccgccgataatcttcaatgccgggtgctatggggttgttcaagaaacttgatgttggtccactcgagcttggggactatcttgcaattggtgctattttctcggcaacagattctgtttgcaccttacaggtgcttaaccaggatgaaacacccctactctatagtctagtttttggtgaaggtgttgttaatgatgccacatctgttgtgctcttcaatgcaattgaaaaccttgatattgataattttgatgctattgttctgttgaatttcgtcggaaaatttctctacttgttcttcaccagcaccatacttggagtagctaccgggttgcttagtgcatacattatcaagaagctctgctttgccagacattcaactgatagagaagtttctatcatgatactcatggcatacctttcatacatgatatcaatgctgttggacctgagtggaattcttactgtcttcttctgtggaatagtaatgtcacattacacttggcataatgtgacagaaagttctagggttaccaccaagcatacttttgcaactttatcattcattgcagaaattttccttttcctctatgttgggatggatgcattggacattgagaagtggaaattagctagtagcagtcctaagaaaccaattgctttaagtgcaattattttgggcttggttatggttggaagagcggcatttgtattccctttgtcgttcttatccaacctaagcaaaaaggaggcccgtccaaagatctccttcaagcaacaagtaatcatatggtgggctggtctcatgagaggagcagtgtcaattgcgcttgcctataacaagtttacagcatctggtcacactgaagtgcgagtcaatgctatcatgatcaccagcacagttattgttgttctattcagcacaatggttttcggcctgctgacgaagccgcttctcagtctcctcatcccaccaaggactggactgaacacgtcgtctctgctctcaagccagtctatgctggacccactccttactagcatgatggggtctgactttgatgtagggcagatcaactcccctcaatacaacctccagttcattctcaccgcgccagctcgctccgtccatcgcctttggcgcaagtttgacgatcggttcatgcgcccggtgttcggggggcgaggtttcgtcccctttgtgcctggttcgccggtggagaggagtgtccctgaatctcacctgggcactgtgacggaggctgagcgcagttgaaatgaggcaagagggatgccgacaattttctgtagatcttcagacagataccactcatactcctattttattttcagaatccactggtgcgaattgttctttgtagtaccttgtgcatatagttttatatagagctgctacacaagctgctgtaaatttctgggaggcactcccaactgtagattactgcaattcatctgtaaatttcaatcttgttcaagaagaatgatcatatattggcatgttttttcttagcagttgtataattgtgagcctgacacaacaaatcccttttaccccaagaatgttaaatgtagaaaagacaagattgtcaaaactcc

SEQ ID NO: 31671 - DNA, 5565 bp, Zea Mays
ctgctgtgcgcttcgcctccaacagcgtcagcaacagtacgcttcagcgccttctgctcatgcccaaaccccgaagcggaagccccccgaccccaaacctcgcaagcgaccccagtaatggcgaccaaggcgctatccgtctcctcgctcacctccacggcctttgcctccttttccttgccgcggccccgcaggccttcaccttcgcctcccctcctccgccttctcggtcctcgcccccgcgcctccactctctccgccgccgctcccgacgacgaggacggcgtcgacaccgtggagcagctcctccacccacgcccgcctgagacctcagcccccgccggatcccgcggccggatcgaccgcctcatgaagctccagcgccgcgccgacggcgacgccgtgcccggggggcggaggaggtggttcccttacctggacgcgttccggcccgcggccgggggcgcggagctgtccagcggggaggtcatagatgtgctggagccgcacatcctagaggcgcggcgggaccggattcgacaagccgttggcaaccggagctacgccgtttgcctcgtggtggaaggcctctccgacttcggcaacgtctcggccgcgttccgctccgcggacgcgctcggcgtgcagtccgtgcacgtcatttcctgtgatagcagcaaaaggtatagagacaacaggcatgtgagcatgggtgctgagaaatggcttgacattgagatatggaactcacctgcagaatgtttcagtgcattaaaaaaacgcggttatcgcattgcgaccacttatttgggaactgattcggtatttttttcacacttcaacattttggggatttggtatccttttcactcttgtacatcgttatctatcggtttccttggaaatctacgatccactattctgcacgaatttcagatgccatgtgtcattgaatgcacggtcatatgttcttttctgtgaaaaactgcagttgttttgtacaaacagtgaaaatagtatgtccagtgatttatagagacaagatgcgtctattaaagaaaatatttgctgtcaaactgtattgtttgtgcgtttggtcatcaagaatacccagagtattaagttatgcgtgtcacaaatggatggttgaagtgaaattgatgacatatgtatccgtttttcaccattcatcaggatttaacttttctgactaaaggtggtttattctggctgaagggataattgtgttccaaattttcttaggtttgtgtgtatgatatggattggtctcaaccaacagctattgttgtgggcaatgagcttaggggtataagtgatgatgctctagaattgtcagatttgcactgcagcattccaatgaaaggcatggtggattcgtttaatgtatctgttgcagctggaatcctcatgcaccatgctgtttgtgatagagtttcccgcctgggccatcacggtgatctcttgcctgaagaaaataggatattgcttgctgagttctatctgcgacacagagaaagcacggctactatagttcatgaatatgccaaaatgaaggcaggaaaagttatgaccagactttgaaaacatcctgagaagctgagtgacgtgtctgccaatcaagtcttggattatctggtgcatttttctaacagaaaacgaggctattttttcctggagtttaccgctgatccctaccagattgctgggaagacgaggatccaagcccaatcattgagcagagctgttaacgattacgcatatggttttcagtgacgtggacttttgctcccaaaacagtcgcccgttaactatttttgtatgtttttgttaggatgaaagcttaatatgtttccacttgtttttcacaaacgttggcggtggttgggtttgggcggcaacgctccatgttctacagacggttacgaccggaagcttggtgtaaccgtaccagtataacctgtccttggagggttgagagcttgagatgtaaacgaactgcacttgtctacggcaggatgatgcgtctgtaacgcaaagctgtgcaactggtgaatctcgccaccgaattctgctagggaaagctacggacgtgttgaaaactggaacataaaagtcgtgccattgattctggcctcaacgatgctcgattgcatagccactcctttttctagagaatatgcaacgcgatcactgatcaggattgaaggggggatgagaaggtggacatcgttgctctagtgatttgatcaccagagatggtgttggtggtgaagcagcatcgctgcacgcactctgtgagctgtgtttgcatcaagggccatctcagtgaggatgctctgttcctcgtcttccgccacatgaactggaacccaaggctgattgctatcctgtcatgtgtgtgcaagtggtttgacgaggttgccaagcaggtgctgtggaaggagttctgtcatgcaagggcttcaaagatgatgctggatttgcattcaggtggtagccacattgttgatgggaactggaaagcgctggggaagctgctcatctattgcaatggctgcacaaaaggggggctcttcaataacatccatgttccaggccattttgtgttcaggacacgcttttctaggactgcgggcaggagtttcctgcctctgccatgcaagtcagacgtgttgtatgtgtcagatccatgtgagcatcttgatcaaggggaagaaggcgacttaggtttctttcgaggcatctttaagtcattcgccacttcaagagtgaagaagatgttgattgagaagcgggctaggtttcatccaagggagttgtgctcttattgtaagtcgaagctatggaacatgttccaggaaaatatgattccaaggagtgcttctgctagactgggtgcctatgatgattccgtcgagtattttgtatgcttgaatgggcatgttattggacttggtaccctgctaccactctcagactcggaggaggcagcagatgagtaatcatcaagaatgagtcaggtgatcatatattttctgttggctatttgtgaagaatagatagattctttacatgatgtattaaaatatatacactgaaatacaggttggtctatctctattccatggcaaatttcttcttgaaacttttcagtaaacatcaagtttcatgcgcagacatgtctggatgtacaacatagactggttcctcttcaatattagtttgtgtttgcatacacttaatgcttaatcctatttatttaatgcatagcttgatcagcatttcatattgtataccaacattttctccttggaacagcgaaggaactttgcataagcttgttgggatatcatatcacataatgcttatttgagattttttaggaatttttgacatttaaaaaggaaacattagtagcaaaactattctcaagggtttgtatgcttattttgtgatggcatcagagttagtgaatcgattcttagaatcccaaatgtttaacgtggtctctgtctatttctcacacccttatgtttgcctctacttttgaagttatatatactagtagatatttgtatggtacagcaagtcacaattggtgatcattatcttcattttagaagtggcagtacacaagtttcgggtggcagttagaatgctttgacccaaacaaaattcaccatttaaattctcacttcttgcactcgacaaatagtagagcactagagaagtaaatctatgttgatggtataatgcagttgttttgaattctgtttaatcaaatatctacatgacaacaattcgttaatataaatctagacgtactggttatcttcagaagagccatattgtccggtcagtttgttctttttattttatttgtgaaaaatatgaggaaaatgtgcattgctgacatcctgttttatttgtgattgctactttacgttgctttatctactaggccataacaaattaacaacatccggtgacaagtgcgccagtttaaggaaggtagcagagtctctgtctcaaataaaagggtgccagggctatgatctagtacgtatttaccactaatagtagataaaaattgcattgtactgacagcgcatctatgtagggtaaaagctagtctaaacagaaattcttgtcctggtgaagtaacaaacatgtgttcagaattgatccccatcctgttgacaggtttggaagattgaagcccaggacttgcgaaaatggtactgaatcttggttgtgactagcagagagtgggatgacattggttcagcaaactgttgcacgacaagaatctgtggtgggctctgcgtcggactacccctgtgttcttgcacctgataacaaaaaaagaacccaatttcgaaggacgagaaagaaccaaatgcacacggttcagctcatccttttgaattgatcatccatcagagctagcataacataactatatacattgataagtaggttaaaatagatcaaacaatctcggagataaataatgtactcttgtagtcttgtgagtagctaacacgatatttggtataagtttcatatccttacttttcacatatgagcattcatatctgctagttataagcagcatgttgtaaaagtgttgtggaaatgattgagtaaatttgacggtggttgatagttagacaccattttctatatattgtgcacaaagagaagtatgcctaagaaacatggtacatttattaaaaaacttgaccaacatagaaaggtttttaattaagggtttttaattaagaacacatacaaaaatttgcctcgacaatgacttggacttgagggatcgggtgtgggcgtacatgcatactatccaccaactagcttcttcaaattttcattttaattaagaacacatataaaaattttgcctctacaagaacacatgcagcgtgagcgaagggagacacagggcctagctttggaggctagttgcatgcttgcatgcaacatgagtggatgagggggcacctataacttgcatagttgcatgcttgcatgcagtgtgagtgggagagtagtgcatggtgagcgggggcacgttttggtctacattaccttcttaatagttataattgtgcacaaagagaagtatgcctaagaaacagggtatatttattaaaaaacttgaccaacatagaaaggtttttaattaagggtttttaattaagaacacatacaaaaatttgcctcgacaatgacttggacttgagggatcgggtgtgggcgtacatgcatactatccaccaactgagctacacttagcttcttcaaattttcattttaattaagaacacatgtaaaaatttgcctcgacaaaaacacatgcagcgtgagcgaagggagacacagggcctagcttcggaggctagttgcatgcttgcatgcagcatgagtagatgagggggcacctataacttccatagttgcatgcttgcatgcagtgtgagtgggagagtaggtgcatggtgagcgggggcacgttttggtctacattac

SEQ ID NO: 31672 - DNA, 978 bp, Zea Mays
cgcacgaataataaatttgcttaccctgtctaatttgacgtcgcaagcacgactatgggttccggttgacgtcacccaggggtcttcttttcttcggtagtcaattgcttgaagatcttttcctcgactgaataattctgacgagtcgaacttgagtcgcgcaggatgtttgagcttttgtcgcgcacttggtgaacaccacactgttggcttcgtcttcacctgattctttagatttcttgatgactcgcggaacgacgacgagatcgtttttggagcgagctggtaaggtggggatcgagcaggggatgacgagtttgacggctcgacgataaacgtgaatatgccgaaacccaaaggatgaggagtgagcgcatgcggggcaagcaacacgtatttgaagtgtggagaaattacccacggcgaaataaattgagcaaagagcgctcgtgaactttatggcggaatcggcggcagccgatgccagagcacatggtgaggaagcttcgcaatttgatgaaatcatggccgggtgaactctatggcgcggactacttcacgaccaagacaactgtcgcgacgcgcacgacgtcgccacgccataatatcaattatcaccacggccatgaacagatgtgcgcacaaggagctagagaccgagcgtggcgagatagacagtaccaagctcggcagggaatagcacgcgcagccaccagggcgcacgcaagggaactgagcagagaactttgagcggaactgtggctggcgagacctcggctggccggagagtgcatagagaaggggcctcggcgagcagaggagcgcgcacgaccagagcggagctggggagagcaggacgtgcccggcgaagcatgcctgcgcgtgggcgaacagagggagaaaggacagagctgagcgccgccaggaagatggagcaggccgacaggggaccgagtagaggaagctccagcgcgcgta

SEQ ID NO: 31673 - DNA, 626 bp, Zea Mays
cagatccaattcgcccaacccctgctcgcccagagctccttcgctccaaatccggccatccccgcctggccgtggagttcctcgagcagccccacctggccgccatcctccccagcgctctcgcctgctcgacagaatgccacagcgtgaagcagccatggatcctccctgtgtcgcgccctcgccgtgcgacgtattgcagcagcagcgacgcccttcgctgcgacgcgctcgccaggtcggtccactcgccgtcgatctgcgcagcccctgcacgtcgtcgtcgaaacccgcgccctccgtcgatgtcacgcctcgtgctatgcctatgcgacgcaatgctagccggtggacaacacatgcgactcaccgatccggccaggttgcttttgtttcatttacgatttagtcgatgacgtgaatatgtgcgtgaaaatataattgtatgaatggacgcgagtagaaagaaaatgaagtagaaaagaactcggatgtttttatatttttattttgattggaaaatatgtgatgcgttgtttaatacgaaaactaagttacaaaatgtggattatgttttgggaaatgcatcgatatgtgtttatgtgaaaagtgtatttgttttatac

SEQ ID NO: 31674 - DNA, 2017 bp, Zea Mays
gcccgccaccaccatggcctctcctttcccctgcccgcgcctccggccggcgcgtgccgcccccgtgctggacgaccgacgagacactcgcgctcgcgcgggcctacaccgcacgccgcctcgccgtcggccgggagcgcctgacctccgctgactgggccgccgtcgccgcggccgccccgtctaagacggccaggcagtgccgccacaaggtcgagaagctccgccgacgcctccgatccaactgccgccgcccgtgcccgctcctcgacgccatcgacctcctcgacgttccttccccgcccttcttctccaagtcccagtcccgatccacgtcccggtcctcgtcgccgccggcggcggcggtctcttcgccgtttcccccttcccctcccgcatccccgcccagaaagaggcggcgggactatgccggggacgaggaagaggaggctcatggacctcggccggggctggcgaggctggtcgaccacggctggggctcgcacaccaccgtcctcgccgacacgatggggtacatggacccggagtgcatggtcaccggcagggccaacgccgagtcggacgtctacagcttcggcgtcgtccttctggagatcgcgtgcggccggcgccccctggtgcctcgccacggcgtgggaatgcgaatccctcgcctacgcctccaaatcgtcgaagccgcatcccataatagcaaatttctctttctcgcctcgtgcgctccgcccgctggcatcgtgctcgttgagtttccaaagtctcagccaccccagtatactcctccggatccgtgttccatcacggctacaaaaatactccgcctgcatctccaaagcacacggctccctctggtttcccgcctcctcttcacctccttcgcgtcccgacgctccctcatggccgccgctgccgcagcagcagcagcagtttcctccccgattgctccacgcgctgtggccgccgcggcctcccgccgggggttcgtcacgtttggtggaggcgccgcccgctcctcgcccacgctgcggtccggccgcgggttctctggtgtgcaaacccatgttgccgctgttgaacaagcagttgtaaaagatgctacgaagctggaagctccagttgttgttgttacaggtgcctctagagggattggaaaggcaactgctctagcccttggaaaagcaggatgcaaggttctggtaaattatgctcggtcttcgaaagaggctgaagaggtctccaaagagattgaagcatctggtggtgaggctatcacctttggaggagatgtttcaaaagaagctgatgtagagtctatgatgaaagcagctctagataaatggggaacgatagatgtgctggtaaataatgcaggaattacacgagacacattattgatgaggatgaagaaatctcagtggcaagatgtaattgatctgaatcttacaggcgtctgcctgtgtacacaggctgcaacaaaagtaatgatgaagaagaaaaaggggaaaattatcaacattgcatccgtcgttggccttactggcaatgttggccaagctaattatagtgcagccaaggctggggtgattggtttcacgaaaacagttgccagggagtatgcaagcagaaatatcaatgtgaatgctattgcaccagggtttattgcatctgatatgactgccgaacttggagaagagcttgagaagaaaatcttgtcaaccattccattagggagatatggccaaccagaggaagttgcagggttagtcgagttcctggcccttagccctgcagctagctatatgaccggacaggtgcttacaattgacggagggatggtaatgtaaggttcgagttggcttgatgcacttctacttttgcttaacatttaggcgacgttggttcactttcttgtgcacgggcgattttgggcaacggaattagggttctctttttcttttaatactcaccgtggataaaccaggcatgtggaagttgaaat

SEQ ID NO: 31675 - DNA, 4465 bp, Zea Mays
ccgacctctcccgccacaccaaccaccaatagccgccgccgccgctcccgcttccccctagctgcggcgccccgcctaccccgctccgctcgctgatcgtctgtccctgccgtcgcgtctccatccgtacatcgaggagtaacacccaccatggcgggcactcgcggcgactccggaaaccggctctgcgccgttccgtcgagcaccttcctccatcgggaacgcgctccacatcttgcccagcaggaagcggccgatgaccgtcctgcatgacgtaagcgggatcgtcaagccccggaggatgactctgctgctcggacctcccggctcggggaagaccaccttgctcctggcgctggcggggaagctcgacaaggacctcagggtctcggggaaggttacctacaacgggcacgggatgaacgagttcgtcccggagaggacagcggcctacatcagccagcacgacctccacatcggggagatgactgtgagggagaccttggccttctcggcgcggtgccaaggtgttggcaccagatacgaaatgctcactgagttggcgagaagggagaaggcagccaacatcaagccagatcatgacattgatgtctatatgaaggcctcagctatgggtgggcaagaatccagtattgttacggactacacactgaagatattaggcttggaggtctgtgctgatacgctggtaggaaatgagatgatgaggggtatttctggtggtcaacgaaagcgtgtcacaacaggtgaaatgcttgttggtccggcaagagctctgttcatggatgagatatccactggactggacagctcaaccacataccagattgtgaattcccttaggcagactatccacatccttggtggaactgcagtcatttccttgctccagccagcgcctgaaacatacaacttgttcgatgacattatactcctatctgatgggcatgttgtataccagggcccccgtgaacatgtgctcgagttctttgagttcatgggcttcagatgccctgccagaaagggtgttgctgacttcttgcaggaagtgacatcaaggaaagaccaggggcagtattggtatcggcaggacaggccataccgctttgtgcctgtgaagaaatttgcagatgcattcagtatattccacgtgggccggtccacacaaaatgaactttcagagccatttgataggacccggagccaccctgctgccctagcaacttcaaagttcggtgccagcaggatggagttgctcaaagccactattgatagggagcttctactcatgaagaggaacgcatttatgtacattttcaaagctgttaaccttactgttatgtcgtttatcgtgatgaccacatttttccgtaccaatatgaaacgagacgcatcttatggaaacatctacatgggggcactcttctttgctctcgacacaatcatgttcaatggttttgctgagcttgccatgactgtcatgaagctgccggttttcttcaagcagagggatcttttcttcttccctgcatgggcctacaccataccttcatggattgttcagatccctatcacatttttggaagtcggggtttatgttttcaccacatactatgtcattggatttgatcccaatgtgttcaggttcttgaagcaatatctgctgctccttgcactcaatcagatgtcatctgcccttttccgcttcattgctggaattggaagagacatggttgtgtctcatacctttggccccttagcactgttggcttttcaagcactgggtggctttatacttgcaagacctgatgtgaagaaatggtggatttggggttactggatctctcctctatcgtatgcacagaatgccatttcaacaaatgaatttttggggcacagttggagcaaaattcaaaatggaacaaccgtgggaattggggttcttcaaagtcgtggtgtctttactgaagctaagtggtattggattgggctcggtgtcttggttggatatgctctcctcttcaacctgctctacactgtagctcttgcagttttgagtccattcactgattcccacggatcaatgtctgaagaggaattgaaagaaaagcatgccaatttaactggtgaagtcatagaggtccgcaaggaaaagacatctaggaggcaggaattggagctgtcccacagtgttggccaaaactctgtgcatagcagtgaggattctagtcagaacaggaagggaatggcactcccatttccaccactatcacttacttttaacgacataagatactcggtggacatgccagaggcgatgaaagcgcaaggagtgacagaagatcgtttgcttcttttgaagggcgttagtggttcttttaggccaggagttctaactgcattgatgggtgttagtggtgctggaaagaccacccttatggatgtcttagctggcagaaaaactgggggatatatcgagggagatattaccatctcaggatatccaaagaagcaagagacgtttgcacgcatatcaggatactgtgagcaaaatgatattcattctccacatgtaacagtgtatgagtcactcctattttctgcatggctacgccttccttcaggcatcaacttagaaacaagaaagatgttcattgaggaggtcatggatcttgtagagctcacatcactgaggggtgcacttgttgggcttcctggagtgagtggcctgtcaactgagcaacgcaagaggctaactattgctgttgagcttgttgccaatccttcgatcattttcatggatgagcctacctccggtcttgatgctcgtgcagctgcaattgtgatgaggactgttaggaacactgtcaatactggaaggactgttgtttgcaccattcaccagccaagcattgacatatttgaagcatttgatgagcttttcttaatgaagagaggtggagaagagatatatgttggtccagtgggccagaattcatcaaaattgattgagtactttgagggaattgaaggtattagccagataaaggatgggtataacccagccacgtggatgttggaagtgagctctagttctcaggaagagatccttggggttgatttcagtgaaatctacaggcaatcagaattataccaaaggaacaaggcactcatagaggagctgagcaccccacctcctggctctagtgacctcaatttccctacacagtactccagatcgttctttactcagtgcctagcctgcttctggaagcagaaaaagtcgtattggaggaacccaacctacacagcagtgaggctactgttcactgtagtcattgcgctcatgtttgggaccatgttctgggaccttggacgaaaaactaataaacagcaggatctgttcaatgccatgggatcaatgtatgccgcagttgtatacatcggaatgcagaactctggctctgttcaaccagtggtggtggtggagcgaacagtcttctaccgagaacgagcagcgggcatgtattcagctttcccgtatgcatttggacaggtcgcaattgaaattccttatatctttgtacagactttgctatatggagtgctagtctattcaatgattgggtttgagtggactgttgccaagttcctctggtacctgttcttcatgtacttcacactgctttacttcacgttctacggaatgatggcggttggcttgactcccaacgaaaccatagccgtcattacctcatcggcgttctacaacgtgtggaacctcttctcaggatatctgatcccccgacctaaactgcctgtctggtggaggtggtacagctggatctgcccagtcgcatggacactctacggattggttgcctcccagttcggcgacatcgcgcatccgctggaggactcaccgacaggccagacggtggcgcagttcatcacggattacttcggcttccatcacgacttcctgtgggttgtcgcaggggtgcacgtcgggctgaccgtgctcttcgcgttcctgttcagttttgccatcatgaagttcaacttccagaatagatgaggacaggaggcccaggccattggcaatttttgcattcgtttgttggctgtgggtgggtgggtggacaagcatacctgctgtgcgtgtagcatctacggcccatcgattaggctgagcaagctaccatagtaccatgtaacggtgtatagagtttattttgtatttcaagcttatagaattagaaacactagaagttgtaggcgaacaaaagccttgacaagagttgagcctcctgctgccatggccagctgtagctttatacctgtcagaggcacggagcgcttctcagagaatgtaaaccgtatactggcattctaatgaatcagtgggagcagaattttgaccaagtacctctgcagatgtctt

SEQ ID NO: 31676 - DNA, 3372 bp, Zea Mays
ttttttaacgcaactggctggttttcgagataacagtgggggttaagcatggtaaccgaggtgacagtaaaagcgttagaaaaagggtaaaggtaacttgcgagccatttggcactcgagcaccaccccccgggcttatgcacatgggtctccctccctctcccgtccatatccacatatataaatacgccttcccccccccaccgctccaggcctcgcccccccgtgccctcccccgtcccactgacggtggcccccaccgcccggccccgctcgtcggcgagcgccccttccccacgctgcaccgctgtcctgggcttcctgcccaagagatccgcccgactccggtcgctcggaggccggcgagccgcgcgtgctgggcgccgggatgcaggcggccggcgccagccggtggcccggatctcgctggcggcgcgtctcggcgaggtgaggcagctcaattctctcgtgctcacctcttccgtttccgttccaaagcggggtgctgtttttttttgttcttgtctgttattgttatcttttcccttttcactcatcggtttcagagtttgtgcaaaccgtagtggcgagctgccaaacaaactttacttttgctggtggcgtagttccatctggtggaggtctgggctctggagacaatggcagtgaattcgtcggggaaaggttcttgtttccttcctcctttgggaggtggagtgggttggagccagagagtccctgatttttttagtgcattttgttgcagagcagccacatggtatgcgctgttttctgctggctgatggcccgatttccagtttgaataggctggtatttttgccggcatctggtaattattcgctagtttactccctgttcgtagagtgaaggcttttggccttttgccttgcgtctgcaacaaataataatgaataatggaatcagcggggcatcatccgtacattttatatattttttcttctgttttgagataatgcagataacagggatgcgcctagtaaatgcctctccgtgtttctcgcgcgaaacttgtttacgagttaaggcagtatgcgcatcaagctttgttaaatcaggaaaaggtcgagttagcttggtgttgattttgttttaatcttgtcgcatcagttttgttacaattgttgcttagtcatggtaacgactcatcaagtgcttgttcttgtgtggtttattagtttatttgtatggttatggttgattgatatgatattttagctggctgaattaggagtctgccgtgcagcagtattcttgccgccttggcgatactggtatcaacaacgaaagaagagtagttttacctcaaacagaatttctacaagggagtatctttgagatttttagcactgtagtttatgattttagtagattctggatactgcaaagcttcagatcagcaatgaagatattccttagcaagagttcaaatatgaagttgaatgtctcactgtggtctagtatctgccatttgtgtgaaaattatcaaagaacatcatgcatttcctgatagtttgtcccttgattttttccagaggagacctctgaactttctgacctcaagtcctcgattttgtcatagatcagacaaataatggaagagttacaagattgcaactcaagaagcctggttgcccttccgggctctttggttctgcgtctctttaggctgtttggccagcaggatcagagttcatggcagaaatttggatagtgaagaacttgaactgaaggagcagaaacccattacgaaggctcaatcaggaggtgattcaagtggcaacagatcgaatgattgctacttccccggccttcatgatgatctgtctcaagactgccttgcttgggcaagcagatcagactacccttccctttcttgtctgaacaaaagattcaatttgttaattaacagtggatatttgtacagactgcgaaggaaatatgacattgttgagcactgggtctatcttgcttgtagcttgatgccctgggaagcatttgatccttcacgaaagcgctggatgaggctaccgagaatgccatgcgacgagtgcttctcctgtgcagacaaggaatcacttgccgtcggaacacagctgcttgtcttcggccgtgaatatactggccttgctatttggatgtacaacttactgactcgcagttggtccccatgcactccaatgaatctgccccgctgcctttttgcctcgggaagctcagagattgggcactgggagactatcccagacatgaacctgcccaggcggctctcttcaggtttcttcatggatggcaagttttatgtcattgggggcgtgtccagtcagagggattcattaacttgtggagaggaatataaccttgaaacaaggacctggagaagaatacttgatatgtaccctggtggaaccagtgcatctcaatcgcctcctcttgttgctgttgtgaataaccagctctacgccgctgaccagtcgacaaatgtggtcaagaagtatgacaaggcaaacaatgcctggaacatactgaagccattgcctgttagagctgactcatccaatggttggggtctagctttcaaagcttgtggcgatcgattgctggtaatcgggggccatagaggacctcgtggcgaggtaatattgctgcattcctggtgccctgaaggtggggaagatggtgctgactgggaggttctctcggtgaaggaacgtgcaggcgtcttcgtttacaactgtgcaataatggggtgctgagttacctttgcttcagtacatgccactggtttagcaagccaaccatttcttgctgccatttagctgccctttataatgacttgtaattcagaaatgacaccccctcccctcatttcgcggagctctcaattgattgaatgttttgtagagagcaaagagcattcagttcagtttacctggaactacttttttttcttcttctgttaaactcgttcagaattctttgttcttgtccagtacgaattttatgcagtattcgttattcatcatttttgcaaagcttgtctgccccattgttctgagacaaatctaaggcctcgattttcaatgcaccgtacttgcgtactggtgttcagagatcttgggtcagctcaaacagttcaggaagatagtcagaagtcagaactttgttgtgtataatacttaaaaatgtactgcatattagccataccttaatattattctgtactgatattcagaaatcttgtagtcagctcaaacagttcagcaaggcagtcagaagtcagaacattgttttgtataaatattccagattattatgaaatgcatattaccc

SEQ ID NO: 31677 - DNA, 1147 bp, Zea Mays
cctccttcgtccctcgatcacaactgctcctctctccactcccctcttcctcgacagatcctcaatcaagcttcatctgtgccgtcgtcggcaatggctccggccttcccacgccgccgtccaacctcccccgactctcctcctcacaccgccgccgctcccatggcccaccctccctgctcgcctccatggccacctggaggcggattcggcctccccgagtcaccgcccaacgtctcgccgcccaaccaaagcgagaaatccactgggcgaagcttctgcacctcccgaacgggggaggggaggggagcacgccagcactatgtgcctgcgggtagggtttctcccggtccgatggcgtccgccatgtcgtcgaggtcacgacccgccggccacttcggagtgttcccggtgaacgctatggccggcacgggaggcagcgacggtggggtgcagctcgcggacaagctcaagataatcaagactgacaactttgaccccgacgcctacgtgcagtccaagtgccgcgccatggacgagaagaaaatggttgtctttgtcatgcaacaagctgtttggaatgttgacactaataatgaggcagttcaaggtttcaggagatctttacatgatgagacaagattatcctacatgttgtcttgtggttcactggagaggctgctcaacatgaggaatctgaagttatggatggtgaggatgacgatgatgaagacgatgatgacgaggatgatgatgattatgatacaaagaagaacaagggaactgctggaggggaagggcaacagggaaaacgacctacaaagtgcaagcagcagtgaggacaggcagagagccttggaaccgaactcttggagatggtgcctagcagggaagaggagattaagttgaaagaatacagggaggatgctgtgtcgacttttgtagttgatgattatgtgagacttgagtttaagggctcaactttttccggttcttggaagtcatttagtagccctaagatttcatcaacattcttggtagtaattgctatagtatcaaatgagattgtggtacgagttgctcgagtactaacgttgttgtacattgtgaagctaagtgggtaatatcaaaagggattaagatttat

SEQ ID NO: 31678 - DNA, 1098 bp, Zea Mays
ggcatacgccaccacgcacgcagtaggcagtactagaggcatgggcgttgccgccccccgagttactgaagaaaacctggcagcactatttataaattgtggacaggttgtggactgtcgcatgtgtggagacccaaactcagtccttcggttcgccttcatagagttcactgatgaggagggtgcaagggctgctctgaatctgtcaggaactgtgctcggatattatcctgtcagggttctgccatcgaaaactgccattgcaccagtcaatccaacattcctacccaggtctgatgatgaacgggaaatgtgtgcgaggactatttactgcacaaacattgacaagaaggtcactcaggcagatctgaaattgttctttgagtctatatgtggagagtatcattggctcatcgcaatgactgctacaggtctttcggctgaggttgcttggtgactaccatcattctactcgcatcgcttttgtggaatttgtgatggcagaaagtgctaccgctgccctgaactgcagtggcgtgatactgggatccttgccaataagggtgagcccctcgaagactcccgtgcgtccccgtgcgcctcgccagctgatgcactagaggtgtcctaggtacaggaggtgcggaaggcactgcttatatatcatcatcatatatatataatagagaatagacatatatgaaagaggggaggggaaaagtggcgtcacttgttctaagttatgggctcggcctttttgttttgggttcttgcttcaccaccgtgtgactgagtactaaagtgcctacgtacgccccgggtcgacgccggctggcagggcccttttgtttactaccttgcacatagaaggagaggagatggagagcttctcactagaaggatcggaagcgcgcgcgggggggtctgcctgatgctcttgtccttgatgcaacaacaggcggaaaactcctggacttttaccctgctgttcagttgtttgctgctgtgtcctggttgctactgaaacaaactggttaaaaaaaacttgggtattggagactatgtgccctgcctgttggtttggttgctactgtctgt

SEQ ID NO: 31679 - DNA, 1067 bp, Zea Mays
gcaagcggtgagacaactccctcgggaggcagcgaggacctccttgacggcgcccctcgacggcgtaccggcggttccacctccatttggcggcgcgcggggggctgcacctcctttgggcggcgtgcgcgaacaagagccgcagcctctcccgcttgtctttgggagggaacgctggcaacctcatcttctttcgacgctagatttggacagtaaagtcccgcagtgacttgccagttgccactgccagagcggtcaccgaatctgagccggcgccggggcctccggcggaagcgggagcagcgtgcggccgtggggttcgagcggcgggacatcggtgtcttcatctgggaaacggatacagaaggagctgctggacctcaacgcctccgactgctccgcggggcccaagggcgacaacctctaccactggctctccactatcatcgggccccaaggatcgccgtatgaaggagggatatttttccttgacatagtgtttcctcctgattatcccttcaaacctcccatggtaacattcaaaacgaggatttaccactgcaatattgattccactggtaaagtgcatttggacattctgaaggatggctggagtccagctttcactatttctaaggtgttattggccatcaaagacatcatcagcaatccagatccatactccccgcttatgatgagcatttcacgtcagtatctgactgatagagctaaacacgatgaaatagcagctgagtggacaatgagatttgcaagataggggatctatttgtatctaagcatggttgacattgtaaaaaaacaactcttaatgtggcctgagatggtgaatgttggcaacggagccatgtttggtttggtgtgacgtgacataaatgtgtactttatgcttgagtattatttaactgctccttttaggtgaagaataatcttttagattttgtacttatgccaagttgtacaagcatctattcagaacctgctatctgagtttatttcttgaaatgatttctattgaaactggcatcaggtcctggttgatgatgtca

SEQ ID NO: 31680 - DNA, 936 bp, Zea Mays
taactatgttttattaacatgcacagatctagagtgggagcaactgcgcgttagaggaccttgtcaacaccgctgggatgaaattgataatctgaatacaccaaggatctagagtgggagcaactgcgcgttagaggaccttgtcaacaccgctgggatgaaattgataatctgaatacaccaagggaagagagggatccagaatctttttgtactttcaaagagcgtttgtgttatttacagaaaacagagcatggtagagtatgctttggtagatcagggattcataggtggggtctttttgctcggagagacattcaagaaggagaaatggtccttgagtatcgcggtgagctggtcagatgaagtgtagctgacttacgggaagaaaaataccgtgtgcaagccaaggattgctatcttttcaagatcagtgaggaagtggttgttgatgccacagacaaaggaaacatggcacgactgatcaatcattcttgcacaccaaactgctatgcgaggattatgagtgttggacatgatgaaagtcgtattgttctaatagccaagaaaaatgtttgtgctggtgatgagctaacgtatgactacctgtttgatccagatgagggtgatgaacgcgaagtgccatgcctttgccagactgctaactgccggaaattcatgaattagtttacttagatgttagaggatcactgacagtctttctttcttatttacccccgtttttggtatatattgatccttccctattttttgtttacattcattttagaataagtttagttagagctcaaaagtcgagcttccattcctgttaataccacagttgtattcactacggccagttcattctttaaataaatttttttgtaccatgtttagcttgatcatgcacgttagcagacattgacatgtcca

SEQ ID NO: 31681 - DNA, 537 bp, Zea Mays
aaatccaactgatctcgttaaagttaggttgcaagctgatggaaaggctaacacagtcaagaggagttattctggagcccttaatgtatatgctacaataatcagacatgttactttaaccatcatgggcagtgtgattacatgagtcatatctgcagcatggctcatttttgaatgtttgctggtgggaggatcgtctcttctatgtctacaagaatattttgccagtgatgacggtgtttagaggatgggatccttgcaattgtcaaacaagatgagagaccccttgaattgcttgctaaagaatatgctatcaactcttttgacatagatcctcaaaacccctctgatgttgttttcacgttagaatgggaatcaatcggtgtcctaccttgtggctagaagaaagaaaatttttactaccgagggatctcaattagaattttaggctcattcatacattcactacaatgccttcgaactcatgaacatttatctctggctctattgtggtgggttacatgaatagagtttttg

SEQ ID NO: 31682 - DNA, 2139 bp, Zea Mays
cctgcttatggtgattactatttcctccactttgcctccactttcatccattgaagatagccctgttcatatgatttggtctcaacctgacaaaaccttcttctcaatgcgatacataactctctagtgtaagaaaaaagagcaaactcaatgccggaggctcttacatgggtggggtctagggaagggataaactgaggcaagtcttctatctgcaaacgcggagaggctgctttgaacccgtgacctagtgactcagtgagacaactctcaccactacaccaagcctgccctttgtgctctcttgtgtattcaagaaaaaataaagaccagtcaaaaccatgtatggaggccacatatgggttgtgctggacctggttcaaaatcgattaacccaaggaggttcacagatgtgtcaggcaaatgcatgccatagtggaggcatggagacgatgacgctgacagcggctgtaccagcgacaccattgatggcaggggagttgtcagaaaggacagtgaagatatgggagccctggaggattgaatggacagaagaaaaatcgaggctgatctttttggggggaaacttcatggagtcgctgctactaatgctcttgagctaggaattgatgttggacatattgatgcaacattgcatcttggatttcctggtagtattgccagcttgtggcagcaagccggtaggtctggaagaagagctaaacaatcactagccatttatgttgcctttgagggtcctttagatcagtatttcatgaagttcccacataaactatttggcaggtcgattgagcattgccaagttgattcacataatctaaaggttttagaacagcaccttccttgtgctgcttatgaacatcccttgtgcgtgcaatacgatgagtgctactttggctctagtctcgatagtgtaatgacaacccttaaagacaaaggttatatcatcaataatcgagctggacctttttcttcaagcatgtggaactatattggacccgagaaaagcccttcacaggctgtaagcatacgggcaattgagcaggacaggtataaagtgattgacaagttaaatagtcgattacttgaggaaattgaagaaagtaaagccttttttcaggtttatgaaggtgctgtttacatgcatcagggtgccaattacttggttgaggaacttgacttggcatcaaggacagccttctgtaggaaagctgatttgaaatattacacgaaaacacgagactacactgacatcaatgttctcggaggagaatttgcttatcttcctacaagtatatgtagaactaatcgggtgaagacaactgctcaagcaaatgactgcacggtgactactaaatggtttggtttttatcgcatatcaaaatctagcaatacaatatccgacagcttcgagcttaacctgcccccatactcctttacttcccaggctgtttgggtgcgaattccccactcagtaaagatgaccgtggaggaaagcaaactagaatttagaggcggctcacatgctgcttcgcatgcactcctgaatatagtgcctctgcatatgatgtgcagtgcttctgacctaggaacagagtgcgctaatcctcatgaaagccgtggcatcccagacagaatccttttatatgatagacatccaggtggtatcggcatagcatcacaggcccaaatgctcttcgaggaactcctcctggctgctttagaagtcgtttccacgtgcaactgcacaagtgccgttggctgtccaaactgcatccaatcactgacgtgcagcgaatataacgaagttttggacaaggaggcagcgattttgattctgaagggagtaatcgactacgagagatcgtattttgaagcggaagacgcttctcagcgaagctgctgacgtcgaggctacagtaggcagcgaggagtgacgtgttcattactgtttgttcgtttggtgtttctctcgtgtatgtagatgggagaggttcggtctgtatctgcactcacatttgtagcctcgtcatatcaaagttgatatcatatcctacgacaatcaggtccatacatctgtacaacagtacaacccaaacatgtgagagctactggcga

SEQ ID NO: 31683 - DNA, 4261 bp, Zea Mays
gagcgctcgcgcacccgggccaataaactggcaccggctcctcctctcgcgtcgcagagcctagcctcgggatgacgtggcgtaccacaacaccaccacacctcactcagccctgcgggtctccgaccaaccatttctagaagcctccaaaccctagcgcaggaggaagaggagttaggaggagctccagggatggcgaaggcgaggaagcagaagggtgacggtgccagtacgggaggaggcgccaccgtgctccaccagaagctctgcctctccatcgacatggagaaccagctgatctacgggtacactgagataaaagttctagctgaaaacaacagatttgctctacatgctgacaatatgacgattcagagcatttgatggatggtgcaactgttgagtttgactattcccctcattggaaaaatgaaagtgatcaaccgaattggtcttcagtatcatgtttgaagactgctgctgatgctgcatgttcaatgtatactttgtctctaaatcgagaagctacaccaaatcttattgtgtcatctgagagatcagtcaagtcaatgactgaacagcagttagatgaaaacagtgaaaagcatgaagaaaatagtggaaggcttgaagaacatggtggaaatcctgttcaaacttcctatgatcaaattgttaatggctgcagtggaagagggaatagaaaattctgcagtggaagaaggaaaggaaaaggaaaatgataaggaaaaagaagaggaaaatggaaatgagaagagcaaggaaactggaaatgagactgaatatgaaaaggtgaagaacataaaactggttcacatagattatattttggagaaggctgaaactggcgttcagttcgttggcaatgtcatgcgtagcagtagtcagacaaggcgggcacactgttggtttccttgtgttgatagtgccacagaacgctgtccatttgacctagaatttacagttagcatggatttcattgctgtcagcaatggtgacttgctttaccagctgttatgaagactatctttctgcaccatttcccttaggccccgtttgtttcctttcatttcgaggaattggaatcttactaacagaataggctaattttttagaatatgacattccaccactttccaaagttatcatataagcctatctcaaattcatgaggtgagagatggaaattgattctatagatttacatgctaattttccgatgtacaacttatagcacactcttctacctgcacctctataacataaatatactatataactaactctctcatatgatttaggataatatacaaatatattatatgtataaatatataaacttaattagttttgtctaaattataattattaaaatggaattcaattccaacgaaacaaacgggcccttaggtttatacaatcacatttttcttccatctgaaatgacaatattaccagcaagcttaggagcctccacatgcatcctcagttctgatatcttgcatgatgagaaagttatatagatcagggctttgtaaacctgtcatcctttggataggagtgcatgaaaatctgcaatccatgtgtctgaatcatgacctgctattacttttactttatcttcctaagcattaaccttgcttctttgtatccccttaactggtggcttgataacactttgtattatgcattaaccttgcttctttgtatccccttaattagtggctcttggtaatgctttgtacacctgcattacattatagtcaagtattatgtttcataccttgcagtctgcactaacttgtaaaatagttcagataattggcacaagaacgaaactggcttatgcccttgcaaagcaatggtttggaatatacacaagtgcagaggagtccagtgacggctaactgctcagtatgtgaatctgatgttagtggtgcaactgctttgagctctactgctgcttcaagtgatttatatggaactcaagcaatcggttcatatgggaaagttcgttcattgaaagctgtagctgttttcaaatgttggagaagcagatgggaccagactcatttcggaagattttgcaggtgatagtggctccaagtcgtgcataaaatctaggcatgagcttcctagcctctcttctcaagcaaattgatcggttcttgcaatttgacaactttatgcctggttataatggggtcttgactgtcagctgcattcgtacccttgtacgaatagcaaagaaggtgccatcttttgtatgccttgatcacatttttgaattggttgcccctttccgcaacatggacaaaccatggaaagttcgaattgaagctagcaggattcttattgatcttgagttacaccataaaggactcgatgcagctcttttgttgttcttgaaatatgtggacgaagaaaagtctttgcgaggttggattgctagagtactttttgatggttttgtatgctttgctatcttttgacatggaagctgttgaaggagcgacaaagttggctgttcatgtcttgcgtatatgtcaaacaagtattgttcctcacgccaatgatcaaataaattttggcaactctagttaggggtggtaacgggccatttaatttagcctagcaaatttacggatcgaatcaagttagggccggatcataaaacaatacaattttgaactaacaaaattaagggctttgttggtttgtgaagcaagtattagggtcatgatccattaccacccctaactctagttggtcttcttcatctgcttgctggcacaaaggcatacaataacatatttcttcgtcatcaagtgttctgcatattgcaagttgctgctggaaggtccccaacgttatttggtgttccaaaggtcctcacaccccctctggtggtcaactacatcttcagtgatcaacacactaaagatgattcctcaattcctcaaccatcatagtctcaggaaccttccactagcactcctagtgtccgggaggtcttaccgacctctggacccactcaagatgctgataattatcttactgcagtgaaagaaggaatgtggtcaaaattagggtgaagcttactgcatcttccagtaaagcatctgatgctgaccatagaggccattctgatggcgcaagaaatgaaaatgaaccgggtcaatgcagctcaatgtcaatggatgcccccatggctggagcagcaaatgaaccattaaatgtaagcaatcataacattgaggaacaaaactcatgtcacgaccttggatcaaggatgtcggcaagtgttagcaatgctaaactaatggacagacatgatatttccaaggagctacagtgcactgctgattccaggctggatactgttcccaaggatcagttctctcctgccattaatccgccggaagttttagacaaacctggcagtcagcttgaaggtgtctccaactatgatgtaaaccaagctccagagactgaacggagtggaaacagaagagagagaaaaaaacaagaaagataaaaagctgaaacgtgacgaaaaactagataaaaaaatatgacccagagtatctagagaaaagctccttaataagaaggaaaagaaagagttggccagaaagcagctagaaggtgaagagctacccctgaacagcggagagcagtgaacccttcaggttcacaggaagttttgccttcaaggccaccagctccagttctaagtgttgaaacacctgttcgaatctctgaaccccaggtatcaagcaaggaaacagctgtagatactgcacgtgcagcagccaaaccaaggataaagatcagagtcaagcccttggtaagaaaatctgaagggaattaaaaaagattgtagaattgtggccagtctgccatcatttgtaaggattactgtacagcaggaaaaatgcgggtttagttattttgtgaatggctgatgtatcctgtaaaaaaacattgctctgctctagtaatttctggggtaatcgaaatctgagttctagggtagtccatattttctgctgcagttgctttagtatctcagcgcttattatctcacaggttttaagtgtttgttcgatttgctgggcctaaaactaaaactgaaggatcgctgtgctcaatttgtagctgttgatgcattcatttcagatttgaggaggcttgacggaattaactgctgagcttgctcaaacatttttatgacgct

SEQ ID NO: 31684 - DNA, 2833 bp, Zea Mays
cccagctttcatccaataggccaatacccacattcgctcgctctacccgactaccccgcaagtcgaggccttccgctggctctcgctcgctcgctcgccccgcgactggttgcctctccgccccgaccctgccctgagaccggagacgaccgcgccccgcggtggcgctgcgacccgcgatacggaaattccccgtttaattgcatattggacatgtcttgtggcgtttgattggagaatttaattcttcccaacgatttccgttcttcggaggcttccatcttggtttcagttctgcagatctgtgactgagaggggaggaattccagtcagtcgtttatgaatcctggggcctgtgcttactagagggagggcaaggcaagttaggatccgagatgagggggagaaatgactccgggaacagcaagccggttgtgctgtgctgtgtgatgatcgtgtgcctatgcctcctcttcttgtatttctcgggctccaatggacaggctgggagcaccgcatttgagtacgggaccaaattctcacggtcacttggatggggcagtgatgatggttctgaagagtccatttttggaaccggggatgcagatgatgtcaagcctaagagctttcttgtgtgtgatgaccggcactctgagctgatcccctgcttggatcggaacttgatatatcaaatgaggctgaagctggatttaaacctgatggagcactatgagaggcattgccctccacctgaaaggcgttttaattgcttgattcctccaccacatggctataaggtccctataaaatggccaaaaagtcgtgatgtagtatggaaagcaaacattccacacactcaccttgcaaaagagaagtcagaccagaactggatggttgaagctggtgaaaaaatcaagtttccaggtggtgggacccattttcaccatggagctgacaaatacatatcaaatattgcaaatatgctaaatttcaaagataacaatataaacaatgaggggatgcttcgtacagttcttgatgttggttgtggagttgctagtttcggaggataccttctttcttctaatgtgatagcaatgtctttggcaccaaacgacgtgcatcagaatcagattcagtttgcactcgaaagaggaatccctgcatatcttggtgttttgggaacaaaaaggcttccatacccgagtagatcatttgaactagcccattgttcacgttgtaggatcgactggcttcaaagagatgggattcttctgctcgaactagacagattgctacggcctggaggttattttgcttactcctctcctgaagcatatgcacaagatgaggaagatctccgaatctggaaagaaatgagtgcccttgtagaaaggatgtgctggaaaattgcagagaaaagaaaccaaactgttatttgggtgaaacccctgaacaatgattgttacaagagacgagcacatggtacaacgccacctctatgcaaaagtggcgatgatccagattcagtatggggagtgccaatggaagcttgcattactccgtatcctgaacaaatgcacagagatgggggaagtgggctagctccctggcctgctcgattaacaaccccgcctccccgtcttgctgatttgtatgttactgctgacacatttgaaaaggacacggaaatgtggcagcaacgagtagaaaaatattggagtttgttgggcccaaaggtaaaaccagacactattagaaacatcatggacatgaaagcaaattttgggtcatttgctgctgcactcaaggaaaaagacgtatgggtgatgaatgttgtgccacatgatggaccaagcaccctcaagataatctatgatagagggctgataggcagcaatcatgactggtgtgaagccttctcgacctatcctcgaacatatgatcttctccacgcatgggcagtcttctccgacctcgataaaagaggctgcagtgctgaagacctgctcctcgaaatggaccgtatcctcaggcctaccgggtttgccatcgtgagggacaagggcactgtcatcgaattcatcaagaagtacctccacgcgctccactgggaagcagtagcggctgcagatgccgagcccagctcggaatcagaggagaacgagatgatcttggtgatccggaagaagttgtggctaccagaagcaggctcgcacacgtgattcccttcccggcgtctgcagctcagaagcgaggcgccagctgcaccagccatgatttatttctagccctactgcacacatggagatagatttattatttacgaggatacggaaaatatgtggcaggcctggattaaaaaaaggctatttttttctcattctcgacagatatgggacttgatgtttgttctctagtttggttaggaaataaacattctttttcgtcttaatgttgaggctcatttaggtgtttgatgtccatcaatggaagtctgatgtagtctgtagctagtgtatttagtgtttacttgaaagaactactgtacgcggatacgtggtttgcactagagcctcaagcctgcgggtccctcagctcgagacccactcatgcagatctcaacagggataacactccaatataaacaggttacagcgcatccgacaaagttgctctgaaattacatggatttatgctatacggtcaaaattcagcagcttaactatctctatctctatatttaaactctgccctataaacattgcagtatatagtataaaggcatctccaacaacctgtcctataaaaataccatataatttaaaaataa

SEQ ID NO: 31685 - DNA, 423 bp, Zea Mays
cgacatttaaaaaatggtcgcaagcatacccacgaaaaccatatatttcttctgtaccattcctagacatatcattggccaataataatgctgcacataatggatcacatgcaggtgcttactgcctgcgtagtgggtatgttacatggacaaatcagatgctgtttcagatagtactgtaacatgtaatggagtactgattactatagcttctgtgagactaggcttttcctctccttcacatgtcgacacatggatgaaattctgctccggacaactcttcctttggaatgagacaggctaatcatctcactgcgtgcaactatctgcaatcatttttctgctattcatattttgcgcccgtacatccgaggacagcagcgttaatcatctccggacaaagttcttggatgaatcgatcct

SEQ ID NO: 31686 - DNA, 704 bp, Zea Mays
cacaccgcagtagcaggcggtgccgcccccaatgggggctgactgggcgtgggagatgtgggccgtgaagcacgtcggcccctccgggaagccggtccaggctgcgctgctgctcaactacgccccctccgggccatctcggctccttcccgtcgtagcaagagagaagacaactttcagcttttgatatgcaaccattcctggactttgtcaagaggggcaatctgcagactgaattcttttctgttgggccgacctatgtgtgaacttaattttgtttatatgacatgtcaaattgattgccattgttgtggccagcaatttgtgacagaaaattatgatttgtacatttggtcacgtcaatccatgagaactggttttgtgcctgttgcattaatagcacaaagtcaggaggtgaaggagtaatagctatgcagattggagcttacttgatagtctctatcttcacaagcaatggtggctgctgatcggtttgcaattcagattaaccggacgagtcactaatttctagtatagtttcatgagtaatgttgacccacaatttgttcgtgtttgggatcatagtgctagaacgcagtagatgaccatatgtaacttgtagtgttactattttcatgggtccgtagttgtgctaatgtaatagccaatattgactaatactaatgtttctagtgtgaggctga

SEQ ID NO: 31687 - DNA, 1371 bp, Zea Mays
ctgcctcacgcttcctgttcgaactcttcgtcgcctcacactggtgctcctcctctccccatcgctccgccactcccatggcgtccctcttcggggctggccgccggcgatcaccggaggacgacggcgaggacgatagatccggcagagggaggaccaagcgcttccgcctctccccggaggaggacgcagcgtcgccggcggaggcggggcccggcgcggcgacggagaccggctggctctccggcttcgtctacggagcgaagagggtcatttcttccgttttactgttctcctcgcccgaggagaccggctcgggggaggacgaggaagaggagaaggacgacgacgacgacgaagagggcatccacttgaatgaacatgaagctactcatgacactcatggagcaatagttccttatagcgagccaaagcttactattgagcaaatggttatgaaggaaacattctcaagggatgaatgtgataggatggtagagctaataaaatcaagagttagagattctacttttcctgaagcccatgagtatgtaaagccagaagaaatccctagtaggaatgcaggcattacacatgacttcacaggaacatggcgctccttgagccgtgatcggaatgtccctgaatcagttccactctctagtatgagaacaagacctggtagtttttctcaaggctctccactccaagcatcacctgagctatgcactgcagcagttacggaagcaaaaaaatggttggaagagaaaaggcagggactgggcttcaagcctgaagacaatggaccatgcacactaaatactgatatacttagttctgtaactacaaaggaggactacctttccagcttttggacaaaattggaggaatcacaaagagctcgtattggatcatctggaggttctgctgatgctcctaaattctggaattatggttctaattccaggttatttgagaatgacacctctatattttcattgggcactgatgaaaaagttggagatcctaccaaaatctataatgggtctgggaaatttgcagcaacagaaccagttggtggatgctgcttacctattacacccactgaagatagaactgatggtattactgagcctgtggaccttgcaaggaacaacgggaatgcaccccaagaaaaccaggttgcatctgaaattctccctgataaagttccagagggtaacgatgtgtcttccactggaattactaaggacactactggccatagtggagatgttaaagctcccacttcagaaccacatttaggggaaacacgtatcaactcagcatcaggctgtcgcatcgcgccaccactgcatggtttaagatacg

SEQ ID NO: 31688 - DNA, 1763 bp, Zea Mays
gcgtgcgccaaacaatcaaaccgggacttccttgtcacagtccatgtcgtagctattatgacatgggaatgggatggatgctgaaactttgctagctagctagctgaaaggctccggccgggcctggctggtacacacgcccagatccttgttgtgcacgtacgttccaaacttgctcatactactcagagcgcggcgacatgttcggctttctgaaacaacggaggcagaccccgtcagggttctcgtcgtcgtcagccgccgaggaggtcaccgccggcatcgatggctccggcctcgtcgcgatcgtcacgggcgcgtctagtgggatcggtgccgagacctgccgagttctggcgctgcggggcgttcgcgttgtgatgggcgtgaggacaccgtctgccggtgagcgcgtcaaggaagagatcgtgaagaacgtccccgctgccggtatcgacgtcctccaacttgatgttgggcctgtttgtttcggcttctggcagcttctggccaccaaaagctgatgcggactgccaaacgctcagcttttcagccagcttctataaaattcgttggggcaaaaaccatccaaaatcaacataaacacataatcggttgagtcgttgtaatagtagaaatccgtcactttctagatcctgagccctataaacaaatttatcttcctccacacgtaatcgtaatgatactcagattctccctacaaccagattctccccacagccagattctcagaaaagctggtcagaaaaaagctgaaccaaacagacacgttagcagcatgtcatccgtcaagagattcgctgacaacttcaacggactaaatctcccactcaacattctcattaataatgcaggaatcgcattttctcctttcaccctttcggatgatggaattgagttacaatttgcaacaaattaccttggccattttctactcactaatcttttacttgaaaagatgaaaatcacggccatggagagtggaatagaaggtagggttgtgattgttgcttctgacagctacaagcacacgtatcgagagggaattcgttttgataaactcaatgatgcatcaggctataaaggcatcctggcttatggccaatcgaagctggccaatatattgcgttccaatgaactttcttgccgcttgaaggaagaagatgcaaaagtagtagtcaactcactgcatccgggagttgttgccaccaacatcacgcgccatctgggtatcataaaagatattctttctccaattgctaaacttgtactaaggggtgttgaacaaggtgcagccaccgtttgttatctggcattgcatcctcaggttgctggagtcaccggcaaatactttgtggatttcaatgctgttgaactaaaaccgcctgcaactgacaaggagttgtccaaaaagctctgggattttagtgtcagcctactccagtgatataactgccgattagttctcctacgccagctggtaaataaaggtcgatctgaatgagagatcatgtttcagtaatagaacaaggtgatccagcagtgtaatatctactactacttattgtttgactagatatggatgccatatgtttgtaatttgaataaattgattggatacatttctgcacttgtttgaattgtggcaatgtcggacatgtctaaagatgtgatactattgagtgttgagatgcacatttttttttaaatcctttgtccataaaatttccgtttatgtgctg

SEQ ID NO: 31689 - DNA, 8293 bp, Zea Mays
cggctggctacaagccgacactgttgcagctgtttggactgctgcagctgcaatccatagagagaaaaatactgtagaagccgcagccgcagccggattgcagccgcagcaagccacagcgaacaagctggatatttcaacggtaccgcacttacgttatctctgatcttctatcttatcccatatttcaaaatctactttacaatataaaacaatattttctacggtcgtatacacaattccaacagtaccgggcgtacgccgtccgatacgtttcgtcctcctatgtcccacctggcagtctcgcagcgcaaaccatctcaccaactagccatctatttataggcgtcgccatggccctcctccaacatcaaccagcgactcacacacccgcccgccgcttctgtagccgccgccgccaccccccccccccccccccccccccccccccaaccaaccaaccgcgcagggagaaaaccacagcgcagcacatgcagcgcctcgcctcctcccggaggctcctccaggccgcgctcgccgcggccgccgtcgccgcgcccgcgccagcgaatggcgccttccccaagatgccggccttcgactacacgccgccgccgtacaacgggccgcgcgccgagatcttccggaagcgcgctcagttcctcagcccatccctctttcatttctacgatcgcccagtacgtgtgccgctcccccatcgccactccagtcttcagttctgtgggaaggactatactgctacgaccaaaaagaaaaacaaaaaaaactgtaaattaccttcggatttcaatattttttcggtaaaaactgcaccaattgtcgccctggtgatcagttaaaatacgaagaatcgaactactagcatttttcgtaactaaaacattttttgtttactgttttgagaaatgcggtcttcttggtagtcctttggcacagagcagcagtgatctttgtcgttttccgagaggtttgataggattgctgatactgcatgtgctctgttcttatctgaagtaaaatgagatctgagataaatatacaaaagtatgcaaccaagatctgtgtcagaacccaataaaatgtcagcactcaacagccgcaaattctgtattgcaggcagtatgactcgaacaggagtcttaagtgaatcaataaaagaaacttgtaataccagtaccacaagctgtcgagtgtcgacagcaggagtattgtttttttttcagtgaatagtagatccttttgccaaatgaacatgccggatgggttgacaaatgaataagtgacaggcttttcctgggttgttgcaaattgcaatgacgtggctgcccagttttgcctgcaaacttgtagaaaatctaggttgtaccgattaatttccacttttttactaatggtcagatgcctgatttctatcttctcttcaaaagatactgtatccatctttttgcttatttttttcctgtattaagatgctcagctttacatgctcatgaactaacagtgaaggttgttgtctgaaaacatactatatttcaggtgggcacctgaaatataacaactctctaatttccgcaactatttttttgtgccctcttagatctcaaatatatgtagctgcgccactttttctttgtttgtcagaatatacatggttactgacaacacaacatttaattttttttacgcattgccaaagtacataaacaaggtcaagattggatttctggagacagtacttaccgtgtacctaacttactgactcccgtcccattaaaaaataatgttgaagcatatatacttatataatttgatagaagttggcacaaaggaagaggaaaaaaacgctagcattttgagattcatttgcatctctgaaatgaagcaaacagcaaagtaaccagtgcatgttatcattctgtaattacttaatatatgagatcgtctgagtgcctcctgtagtatatggtgaaccccgatcaagtagtattagttttccaaccaagcaacacaagctttagttttccaaccaagcaacacaagctaagagcatctccaagaaaacaagcaaaggcttccataaaccatttttatagaagaaacgctgatttccatactccaacagaatccccttccttgctcgtattttttcgcgacccacatgcgcgacaaaaaagttcccccaatcgactgcgtacgtgcgcacgctagctggtggcgtggcggacgtgtcctgctggtgtgagagaacacagggcagtggcatgcaaatttaaaaaaaccaacgacatgcatgtgggctagctacatgcattaaaagttggtccagtttcgttttagtttttattttggggaaactgctggagtaaacattttattccacccgtaatcagttttagtatgccctccataatcagtttttggggaatttttttgcatattcttttggagttgctctaaagtcatcgtcagtgccacagcaatattgcattcagctgatcatttattaatgtgatatttgttgcagttggacatagtcgaaggaaagatgcagtacctatttgatgaggatggccgtcgttacctggatgctttcggtggcattgctacagtttgctgtgggcactgccatccagatgtggttgaagccatagtaaaccaggcaaagcggatccagcactccacagttctatatctcaatcatgcaattgcagattttgccgaggcattggcttccaaaatgcctggtgatctgaaggttgttttcttcacaaattcaggcacggaggcaaatgagcttgcactgatgattgcacggctttacactggttgcaatgacattatctctcttaggaatggataccatgggaatgctgctggaacaatgggtgctactgctcaatccaattggaaattcaaggttgttcagatgggagtacaccatgcgcttaatccagaccccttcagaggtgcttttggttctgacggggagaaatacgccagagatgttcaggaaatcatcgaatttggaactacagggagagttggtgggttcatttcggaagccatacagggggttggtggaatagtggaactggcaccaggatacttgcccgtggcatacagtatggtaaggaaagccggtgggctctgcatcgctgacgaagttcaggcaggagtcgcgcgaactgggagccacttctggggattcgaagggcatggtgtcatcccggacatagtcaccatggccaagggtatcgggaatggcatacccataggagctgtcgtaacgacgccagagatcgctcaggtgttgacccgcaaaagctacttcaataggagtacctttgatggtaaccctgtcagcactgcaggcgggcatgcggtgctcaaagtgctggagaaggagaagctccaggagaatgcgtttgttgtgggctcctatctaaaggaacagcttaacaatctgaaagacaagcatgagatcatcggtgacgttaggggcaaaggcttccttcttggagttgagctggtgacagaccgtgagaagaaaaccccagccaaagctgagatctcacgtgtcatgaaccatatgaaagatatgggagtgttggttggtaagggtggtttctacgggaacgtttttaggataacaccgccgttgtgcttcaccaaagaggattccgacttcttcattgaggtgatggacattgcgctctcgaagctgtgaggcaggcagggcgaagatgatgtgcaaaccctggtccgtggccatgggttttttgcccatgaataatattaagattagtgagacagcacctcgttgtctcttaatctaagacgatgccatgtcatccggtggcatggtattcctgcttgcccataaataagggacgagttgtgagacagcacctcgttgtctcgtgatcagacccatggtccatggagcaatacgattcttgtaaactctagcttcatccaatctgttcctcctgatctaactagtctgaatagcaactgttcgtttgttaccaatatcaacttcttttcagatgctccatatattcctgctctctgtaaacaaacaattatcactgttcaatagatgcggagatgtggatataaaaattacatatacagtactgtttggtgtaccagtggtttggcaagaaaggaaaggtttaacgtacaatccaaaataaaatgttcacgtattaaattaatatgcatgatcatcatcaggtcacttgagaatgttgaacacgaagcaggcaatggtttccgtcatcaaaccgtcacgataatgatgtcactgatcatctggagcaatgacttctctacaattctctagtaaagttaaacatgcagcaactccgaaattgaccaaagtaacaaatccgcaaattgacacgtgaaaaaagacagcaaatttacatcaaaccaaacgacagtggctaccagctaaatatatgctcatccctatcttaaacagcagaggcctatttgtttctaccgatcataggctggccaccaccctttggactcggcatgctggtagacctgctgatcttgcttccggcgccaaaactcttcacgtcgatcaggtctccaaacaagttgtccggcatgtaatatggtctggctgctgccactggagattcttttggccgctgattccctttcacccgagcatttgtagccacgttcgaaccagtgtatgtttgaggaatagagaagttgtaactttgcaccggtgttggtgctggagatggaacatgttgcgctgatggagcagcatacggtgttgacatagttggataggcagctgaaggggcaacagaagcagcaggagtgtttggcgtttggtatgtcacaggctggaaaggattagctgaattggcacttgcaggcatagcccatgggggtgctggattgctcgacacatattgttggggttgagtcgaatatgccccaggctgtgcaaccggtcccgtttgggcccatggtgccacatagttattgtatggaacatatccctgatttgttggataaacctgggtgttggcagggtaatttgccccgttcgccacagcaggctgatagcttggcagtgtttctggtccatttgatgtgacactcggctgactcccattttggttctgagttgaagagtctgcagatgattcaggactgtacaaggtgaggctgagaaggtcaatcatatcctgctccttcgtcctggttccactaacagaagttgcgccgagaggtactattgcattgctctcaaccgaagaaacttcagaaagcgcccgactgcggtctcggattttgtatattcaggagggtgatgccaacacctccttttttcatcagcaggctagatacagaaaaaagaagaacttcattcctaagctgcacgttggtgatcaggtggtcacctcccaagaagataaacagaaggctgtttctgatttctatgagaacattttgggtagggctgaggagaggagctacactcttgacttggatgagttggccatccacaatcatgatttatctgctttagatgctccgtttcttgaggaggaggtgtggactgtggtaaaagatttgcctccggataaggccccggggccggatggtttcacaggtcgattttataaatcctgttggaatattattaaaggtgatgtgttgaggtctttggatgtcatccagcgtggccatgttttcaaattccgcctgcttaacacggcttatatctccttactgcctaagaagatggatgctgttgaagttaaggatttccggcctataagtttgattcatagttttgccaaattggtagctaagctcatggctactcggctggcccctttgcttccctcactggtttctgtgaaccagagtgcctttgtgagggggaggaggattcatgataactttatgcttgtccaacaaattgtgaagttgctgcataagaagaaagaaccacatatccttcttaagttggacatctccaaggcttttgactctgtttcttggtcgttccttttggaagttttaaggaaaatgggatttggtcagcgttggcgggatctcctttgtttattactgtctacttcttccactcagattttagtcaatggagagcctggggacatcattattcatcgtcgcggtctcaggcagggagatcctctttctccaatgctctttatcctagtcatggatactctgaattctttaatcaactatgccacttcgttgggtttgcttcaacctattgctgttcagcaggtcaggcatcatgtttccttctatgctgatgatgttgtagttttcttgaggcctcacattctggatctggtttcggtcagacgcattcttgatttatttggtcacgcctcaggcctccggaccaacctggttaagagctcggtctcccctattcattgttccgatgatgagctggctctttctgtggaaactctctcttgttcggttaaagtttttccttgcacttatttgggacttcctctcacaacctgtaagccttctaaagaggtgttgctggcctttgtggataaggtggcagattaccttcctgggtggaaagcttctttgttgaatagggctgggcgtcttgtgcttgtgaaagtggttctcactgctgttcctatttattggctcatagctttggatctcccgaaatggttcatcaaggctgttgataaaaagcggcgggggttcttgtggaagggacatcaacaagctaatggaggaaactgcttggtagcttgggataaggtccagagacctcttcagtatggcggccttggaatccataatcttgagcttctaggttgggccttgagaattagatggctttgggctcagaagactgatgtggagaggccgtgggctggactctcaatttctattccctataaagctcgggccctcttcgatatggctgtgaatgccgtggttgggaatggtgagaaaattattttctggactgaccgttggttggatgggcttaccatggctgagatggcacccaatcttttcagaactgaccctatgcgaattgctaagcgaaagactgtggctcaggctttgtttgggcggagttgggttcgtgatatcaagggtgctcttactgttcaggttttaattgagtacctccaggtctgggattttgttgaggaggtcgtactgcaagctgatgttcctgatcatttcagatggaagttgacacaagatggctgttatagcagcaagtctgcgtatgaggccttcttcgtgggctctaccaagtttggcccttggaagagaatctggaaaacctgggccccgtcgcgttgtaaattcttcttatggttggtgcaccataatcgggtttggaccgctgatcgtcttgagcgcagaaatctgccccatccagtgtcttgtccattttgtgaccagatgactgagacggtgcatcacttgttggttggatgtgtgtttgctcgccaaatttgggccctgatccttcaacagttggggctgctgcagttggctcctcagccctcagtgtctcgattctcaggttggtggaagagaactgttgctgctgttcctaaggggcttcgtagaggcctcaattctctaattacgttagtggcttgggagatttggaagcaccgcaacaggtgtgtctttgacaattcaagaccatgtgttgtggaagtgctaaaagctgttaatgtggagggggggctttggtgtttggctggagcttccaagctccaggaacttgtttttgggtcggtgcctactggagcttaattagctctgtaggttgtggtcgccttcttcattgatgtggcgcgacggttgtatttaagggaaggcgtgtgtgtgttggtgtttgtgtttcgggtcactcttgacctttgtacctcctttcttccttaaatgaaatgacgcgcagttctcctgcgctgttcgagaaaaaaaaaaacaggtaccaggggttgatcaccagcactcgatgatgcctcatcaccgcatatcacagatttgttttttctgcaaatatataaaaaatgatcaatagctaataaggtaatgccgtaacaaacaaccacagtaagtatagactgtctggagcctttgcatgccactaggtaccttcgtgctatttgagcaaactcatcatcttcatcctcttcaacttgagccttattatcatgtgtaattggtgtagatggctcaggatttg

SEQ ID NO: 31690 - DNA, 3188 bp, Zea Mays
gtccatccgtcacggcgccaccacctctacctccttccctcaccttccagagcccactgctcctcggcggcggcggagatgagcgtgtggaactacgtcgtcacggcgcacaagcccaccagcgtcagccactcctgcgtaggcaactttaccagccccaaccagctcaaccttattatcgcgaaatgtacccggatcgaaatccatttgcttacccctcagggcctccagccgatgcttgatgtgcctatatatggaagaattgcaacgattgagctcttccggcctcataatgagactcaggactttcttttcattgctacggagaggtacaaattctgtgttctgcaatgggatgcagaaaagtcagagctaatcaccagagccatgggtgatgtttctgatcgcattggccgccctactgacaatggacagattggaatcattgaccctgactgtagactcattggtcttcatctctatgatggcttatttaaggttataccatttgacaacaaagggcagctgaaggaagctttcaatatcagacttgaagaacttcaagtactggacatcaaatttctacatggttgtgctaaacctactattgttgtcctctaccaggataataaagatgtgaggcatgttaagacttatgaagttgcactgaaggacaaagattttgttgagggtccttggtcccagaataatgtagataatggtgctggtttattaataccagtaccagctccacttggcggtgtgataataattggcgaggaacaaatagtttactgcaatgccaattccacatttaaagcgataccaataaaacaatccatcatcagagcttatggacgggttgacccagatggttctcgatatttactcggtgataatactggaattttgcatttacttgtccttacccatgaacgagaaagggttactggtttgaaaattgaatacctgggagagacttcgattgcatcatctatttcgtatcttgataatggtgttgtttacgtcggttcacggtttggcgattcacagctggtgaagctgaacctccaagctgatgcaagcggttcatttgttgaaattcttgaacggtatgttaatcttggaccgattgtggacttctgcgtggttgaccttgataggcagggtcaaggtcaggtggtcacttgttctggggcgtttaaagatggttcccttcgggtggttcgtaatggtatagggattaatgagcaggcttcagtagaactccaaggcataaagggattatggtcattgaaatcttcgatcaatgatccatttgacatgtaccttgtcgtgagctttataagtgagacacgattcttggcaatgaacatggaagatgaactagaagagactgagatagaggggtttgatgcacaaactcaaactctgttttgtcagaatgcgatcaatgatcttcttatacaggttactgctaattctgttcggttagtcagttgcacctcccgggagttagtgaatcaatggaatgcaccagcaggattctcagtcaatgttgcttcagctaatgccagccaggttctgttggcaaccggtggtggccatcttgtttacctggaaattagggatgctaaacttgttgaagtgaagcatgctcagctagaacatgagatttcttgtcttgatttgaacccaattggggagaatccacaatatagttccctagctgctgttgggatgtggacagatataagtgttagaatattttcgcttccagatcttgaattgataaggaaggaaaatttgggtggagaaattgttcctcggtctgttctgctgtgcaccttggagggggtttcgtatttgctttgtgctcttggggatggtaatttgttcagttttctactgaatgcaagtacaggtgaactgactgatagaaagaaggttaccctcgggacccaacccatcagccttcgtaccttctcatcaaagggtaccacccacgtgttcgcttcgtcagataggccaactgtcatctatagcagcaataagaagcttctctacagcaatgtcaatttgaaagaggttaatcatatgtgccctttcaatacagccgcttttccagacagggccggattcttgtatttgcagttgaagatggaagcttgcaattgatcgtggagaaagaaaccaaaggagcagtttattcgctgaatgcattcaatgggaaattgttggctgctatcaaccagaagattcaattgtataagtggatgtcacgcgaggatggttcacatgagctgcagtctgagtgtggccaccatgggcacatacttgccttgtatactcaaacacgtggtgacttcattgtggttggcgatctgatgaaatcaatatccttgctggtgtataagcatgaggaaagcgcgattgaagagcgtgctagggattacaatgcaaactggatgactgcagttgagatgcttgatgatgaagtctacgttggggcggagaatagctataacctattcacggtgcgcaagaacagcgatgcggcgacagatgacgaaagggccaggcttgaggtggtgggagagtaccaccttggggagtttgtgaacagattccgccacggttcactggtgatgcgccttccagactcggatatagggcagatccctacggtcatctttggcacaataaacggggtgattggcattattgcctccctcccgcacgaccaatacatcttcctggagaagctccagtcgacccttgtgaagtacataaagggcgtcggaaacctgagccacgagcaatggcggtccttccataacgacaagaagacggcggaggctcggaacttcctcgacggtgacctgatcgagtctttccttgaccttagccggagcaagatggaggaggtgtccaaggcgatgggcgtccccgtggaggagctgtccaagagggtggaagagctgacgaggcttcactagtgtagatggaacatggaagcgttgcttgtaagcaagtagtaacttgttccctgagctgtagcctccgcggctcgcacgatcaaagtgttcggccgtggctgcagtctatcctatgctatatcctatcgtgatttgtttgtttgagctgtgccagtttcttttctttattattaatgcttaatgttaaaa

SEQ ID NO: 31691 - DNA, 2331 bp, Zea Mays
cgccgcctccgcgctcgtcgcccgagccgaggaggccgtgtagcgctgtggggtgcgcgctgcgagcactgacagggcagcgcggatggaatcgagcgaggcgccacccgtcgcgtttcctctgaggctctgacccgaccgtcgctgtcgcgctgttcctctcgggctctcgttcctcttgctccctcccgcgggccgcggccgccttcgcccgtccccgtccccgtccccgtccccgtcccaatttccaccaacctttcccaatcgccctccaggctctggcactgcgagacgtttcattagccacttagccgttcccacgacacaatcagcaccaccggtgtcctcgctgccaaggcgcccgcccgctcgtgtgacgagtggcgttcgtccaccgcccattccgcgctcagctctgagggcctcccgcccgccgcggcatcatctccggctcctctcgtcaatggtaaggggggcgataggtgtcctaagatgaaactgcggttgcatctgttcgtcctgtgcgtgatcattatattcctggtgtacaacatggctaactttcaacataagcagacaacgttggaagcaaaatctcatccatttgatacagtgacggtgtctgacagagatgctgttaaggtgcctcaaaaggctgaggctaggattggttatttaccccatggtatagtggagtctaactctgacatggacttgaagccattgtggctgactacaagtgcacggtcaaagaagcctaaacaaaatgataattttttgattgctattgctgccggtataaatcagaaaaaaactgtggatgctattatgaagaagtttcttccagaaaattttacagctatattgttccattatgatgggaatgtcaatgggtggaatgatctaccatggagcaaaagtgtgatacatatagctgcctctaatcagactaaatggtggtttgcaaagaggttcctccatcctgctgttgtgtccatataccagtacatctttctttgggatgaagatctggaagtagataactttagcccgagaagatacttaaatatagttagatcagaagggttggagatatcacaaccaggtcttgactctaagctttctgaaattcatcaccggataactgttcgtaaaaaagcagggacctttcatagaagagttagccgggctaacaaaaagtgttcaagagaaggaccaccttgttctggatgggtcgagggcatggcaccagttttctcaaagtccgcttggcaatgtgtgtggcaccttatccagaatgatcttatccatggatggggcatcgattacaagtttgggtattgtgctcagggtgacaggacaaagaacattggcgtagttgatagtgaatttatagttcaccgaggagtgcagacattaggaggttctacaataacaaaggatggtattcgtggcaaaaatgccaagccactcggccagaaagcagctcaaatccaaagatcgagagtacgttgtgtgcctgacaccttatttaaatgtttgctgcatactcccccttcccaaaacaagtgcacatcacgtttgtggacaagtcaaaatgtttttgattttgaccaagtatatagaaaataatatcaatatttatacctccaaacaaatttattttgaatatatatgttctctattttgttctatgaccatggcatctgttatgattagcaggggagggctccaggccttgatatgcgaacaaagatccggagaaaatcgcgatccgagctccgtgattttcagaagcgctgggaccgggctgcaagggaagacagaacatgggttgatccgtttgcccgctcccgaagaaagcggaagaatagaaacccacagtagatcagcataatcttcactgttacacttgcacataattccgtttgcaccttggatttagagtgtataataattgcataatcaacattgtataaattctcacagacgaaacgagaaccacacacgtgaaattttccgatgggagttgtgggttcttgtatcgaggggcaggtccaggatttaaaggatgggcattcggaattgtagttggcacaatttttttaacaacataaatttattattcatgggagcggataattatccattggacatagatgtggtataatttgttatccacatgtatgagtatgaatataataaggtattcattgatattttttttctgaacccaatgggtatcagacatgagtacaaatctatacctacgaacgtatatgagtatgagtatatattgaattttgtctcgtagttatagatttgtaaacc

SEQ ID NO: 31692 - DNA, 542 bp, Zea Mays
tggttgcttggactggccaataatgtagtagggtgatgagcttttatcagtcaacggcattgatgtaaagggtaaatctgcatttgatgcttcatccatgctgcaaggtccaaaggagacgttcgttacgattaaggttaagcatggcgactgtggtcctgttgagtcaatgaaggtgcagaggcaactggttactcgaactccagttttctatcgtttggagaaaagagaaaacaatgattcatctgttgggtatattcacattacagagttcaatgcagtggccaaaaaagatttggctaaaacgtctacagaaatcaggcgcctcctattttgttctggatttgagggacaatcttggtggactagtgcaagctggaatcgagacagcaaagctctttctgaataaaggagacacggtcatttatactgctggccgggatcgcctagtccaaaaggcaattgttgctgaaagtggacctatgattgctactcccctcatgttgctggtgaataataggacagcacgcgccagtgaaata

SEQ ID NO: 31693 - DNA, 3271 bp, Zea Mays
aaacatgatcaagcttcacaaggcttcaaaagcattttgcttcaaaggatcacccttaccacaaattcagtacaggaagttgggaaacactagaaactaaaccaaaagcgaggggcctggatatcagacttgaacttctgaagttttacaagaattattcagcaaacgttatgcaccttgttgtttatggaaaggagaacctcgattgcattcagggcttggttgagcgtatgtttagtgacataaaaaacactgatcagagaagcttgaaatgtccaagtcatcctctttcagaggaacatttacagcttcttgtcaaagcactgccaatagtagaaggggactatctaagaattatatggccaataacacctagcatccagttttacaaagaagctccttgccattatctgagtcacctcattggacatgaaggcgaggggtccatcttccatattataaaggaactaggatgggccatgaacttaatggctggagagtgcagtgacagtaatgagtattcctttttctcagtaagcatgaggctcactgatgctggccatgaacgcatggaggatattgttgggttgatcttcaaatatcttcatctattaaaagaagacggagtccatgagtggatatttaatgagcttgcggcgataaatgaaatggagttccattatcaagacaaagtccgcccaatcaactatgtgatgcgcactgtctcaactatgcggttgttcccaccagaagaatggttggttggagcagcattaccatcaaagtatgcatcacagagaataaatatgatactcaatcaactaatacctgaaacagtaagaatattctgggagtccaaaaaatttgaaggatctacgagttctgctgagccctggtataacacaccattttcagttgaaaatgtcactccttcagttatacaggaatggattgaaaaagctcctactgaaaaactccatcttccaaaacctaatattttcataccaaaggatttatctcttaaagaagtgcatgaaaaggttacttttccaacagtgttaaggaagagcccactttcacagttgtggtataagcctgatatgctgttctccacaccaaaggttcacattatcattgatttccactgtccattatccagccactcccctgaagcagttgttgctactgagctctttgttgatttgttagtagattatttgaatgcttatgcttatgatgctcaaattgctggtttattctattcaatatatgttacttcagctggattccaggtttctttaggtggttacaatgacaagatgagagttctcttaaatgccatactagtgcaaattgtgaaatttgaagttaagccaaacagattttctgcactgaaggaaacttctgtcaaggactaccagaatttcaatttccgacaaccttattctcaagcgtcatactatgtctctttgatattgggagataaaaaatggcctgtagctgagaaacttgaagctctttctaagcttgaatcagattattttgcaaagttcgtaccacacctactgtcaaaaacatttttggaatgttatgttcaagggaacattgaaccaagtgaagcaaaatctatcgtagaagaaatcgaaaacactatatttactacgcccaattctttgttcaaatccatgtctccatcagaatatctgattaaaagggtcatcatgcttgaaaatgacttgaaatgctactaccaaactgagggattaaaccagaagaatgagaattcatcagttatccaatatattcaggtgcatcaagatgacgccattttgaatatcaaacttgagctgttctctctaatagcaaaacagccagccttcaaccagctacgaactgttgaacaacttgggtatataacaagtctttctctgagatccgactatggagtcctggcactccaggttgttatccagtccacagtaaaggatccttcatacctcgatgttagagttgatgagttctttaagatgtttgaaagcaaaatctatgaactctccgacaaggatttcaagagaaatgtgaaatcattaattgattctaaactggagaagtttaaaaacttatgggaggaatctcatttctactggggagagattgaggcaggaactctgaagtttgatagggtcgagtctgaggtcgctatgctaagagagctcaagaaagaagaattcatcgagtacttcaaccagtatataaaagtggacgcgcctcaaaggaggacactaagcgtgcaagtcttcggcggcaaccatttggtagagttcaagaaggcaatcaacgaagccaacccgcccaaaatgtacagaattacagacatattcggcttcaaacgatcgaggccgctgtacagctcactcaagggaggtccgggcaggatcaccatggactgacagccggcaatagcatgccttgtttttcatgtatgtagtgtaatggccagtgcatacgaatgatgaattcgattctgaatcctgctcctgcatcagattcggttgcatgattgatctatacttcactgtgggtttcacgaccagcgtgtcactttctgggcaaaatctagggagctgtataaagtcatgtatgttcacatgtttgtttgcgtttcttctcacagctatgcagtttgtacagttacatatccacagtgaactagaactagaagcgcgtcttctacacaccaatatacagcttgagcctggctgaccgtgcccgacgccggccgagaaccgtcaaggtgccgtcatgcgcacatgcaccaccggccgtccggtttcagcacgccccggcgtgttcgcaaacgcccgccggcgcccccactcgaagccgttgcggtgccaccggcacctgaacgagccccggtgcgtcgtgggcgagcacacgcagtagtagtgcggcgacgcctggcgcgcccgtggcacagatggtgggggcgacggtgccacggtcgcctgctgctcccgccgcctgactgcgcagtccggcggcagaggcggcagccctggatggcacatgcttctaggctacaaaagggtgatgcgatcggcagctccaccagctataaaacagatggcgccgaagaatggaatcgggttctggcgttttcggatggtgggagatgactagacgtggggaaagggcggggaatatgtgtgggctagggtggtaatgtatggtatggtagcccgcaggcgatggtttttgcgagctggtg

SEQ ID NO: 31694 - DNA, 1006 bp, Zea Mays
ggcgctgctgcctgcattattgctgttaattaattattgttttttttttacatggtgtgcgttgtggcgaggaatccaatcatattcaaggacaagggtgtggtgtggagtggagactggagagcatcgtgcgtgcctggctctggctccgtcatggatctccgcctccgtctttgacccgctgtgcttgtcagctttggaggggagtcggggagacaattaatatcactacatcagtgaggaggatcagaggatggatcgatcttctttcttcttttgacggggatggatggattcagatttggcgaaagcgacggcgacgccctcccggtcccggatctaggccagcgagcgagggctggccggccggctgcctggctggtggctgctgctactcgagatgttgaggcccggctgccgtgggccgtcccgaaagtgtcgattcgtcttgcacggtggagcacacatgccgaggaaggtgtcggtgcactggagctgcttgacggggtacatggctttgattcccatatctctagcggcccacagtttctttctcgtggagcttggtaccgactatggggtcgaggatggaggcttggagaatatgtagctcatgaattccggttattcgcatcacgtgacctaaaacacaagatcgttctccactgcctgactcctatatacctcttgaaggcttggtcgcatttgctgaggatgtcgtcgcaggtgtagaggccggagaagaatttgcactttccgtgtgattggatgcatgggcgtatgtagccaagctcgcatgagcctgttttgtacggccaatttctatgtatctgtggatgcagacaaataaatctagattgtatcggtacgtgcgtgctagatacagcgaaccaaatataggtcgaaaagtctgactcttcatatatcggcaaccaaacacatgtatgtatcactcgagcttgccaccgttggtctccttgttgccctttgctctcaccaacagcag

SEQ ID NO: 31695 - DNA, 3360 bp, Zea Mays
cccctcctcgcggtcgcctcactccctttcctccccacggtaacctcaccgccggcttcaagccgagcaaaagacacgcacccgcgaccgcgaccgcgacgagcgaagtgagagaggggaaggcgaggagaccactgcaccagcaccaccaccaccgtgccgcgagcgaagtgacgtcgcgttcacttccctcataaaatctcgccccccactctctctctacccgagcccagcagtaatttttttttggggaaggtgaagcgagaggagcaggaggagagaaaggggaacgaggccggccgcgaatcggaggggaattcggggggcggggctcggtccggccggaaattcgcgcgattcgggcgcgggcgccgcggatgtgaagatctggtgctcggcgggatgacttcttcggcggcggccgcggctgctgccgcccaggtggcgggaggaggtggaggcggcgagggagatgccgccgctgcggcgcgaggcggaacggaggacggcatgtacacggagctgtggaacctctgcgccggcccgctggtcacggtgcccagggtcggggacaaggtgtactacttcccgcagggccatatcgagcaggtggaggcgtcgaccaaccaggtggctgagcagcacatgcaattttacgatctcccgtggaagatcctgtgtgaggtcatgaacgttgaattgaaggctgagccagacaatgatgaggtttatgcccagctcactctgctacctgaatcaaagcagccagaggagaatggctctagtgaggagatgcctgcttcacctcctgctgcacttgcaaggccacgcgtgcactccttctgcaagacattgacagcctctgataccagcactcatggtggattctcggtgctgcggcgccatgcagatgagtgtcttccgccactggatatgacccgtcaacctccaacacaagagcttgtagccaaggacctgcatggtgtggaatggcgctttcgccacatattcagaggtcaaccacgaaggcatcttttgcagagtggctggagtgtttttgttagtgccaaacgtcttgttgctggcgatgccttcatctttctaagaggtgatagtggggagcttcgtgtaggagtcaggcgtgccatgaggcagcaagcaaatgttccgtcttcagtaatatcaagccacagcatgcatcttggtgttcttgctacagcatggcatgctgttaacactgggaccatgtttactgtctactacaagcctaggacaagtccagctgagtttgttgttccctgtgatcgctatatggaatcactgaaacgaaattaccctatagggatgagatttaaaatgaggtttgaaggtgaagaggctccagaacaaaggttcactgggaccattgttggaaatgtggatcctgatcaagctggatgggctgaatctaaatggcgttacctcaaggtgaggtgggatgaagcttcctccattccacgtcctgaaagggtttctccctggcaaatagaacctgcagtcagccctccccctatcaacccacttccagtgcacagacccaagagacctcgctctaatgctgtagcttctctgcccgagtcttcagctccaacaaaagaagctgctccaaaggtcacattagagactcaacaacatgccctgcaaaggcccttgcagacccaggataatgtggccccgaaaagtgtttttggtgataacagtgaattggactctgctcataagtcctccctgcgaccgtcaggttttgatctggacaagagcaccattggcatgcagaggaagctgggttcagatatttggatgcgaatgaacagacctgatggttacagtgaaatgttatcgggatatcaaccacctaatgaaggtgcacggaattcgcagggtttctgttctttacctgatcagattgccgctggacgtcctaatttctggcacactgtaaacgctcattaccaagaccagcaaggcaatcacaatctgttccctggttcatggtccatgatgccttcaagtactggctttgggatgaacagacagagctatccaatgatccaggaagtcggtgggatgtctcagagttgtacaaacaccaagtttgggaatggagtttatgctgcactacctggccgaggcattgatcgatacccatctggatggtttgggcacacgacacccggtggtcgcgtggacgatgcccagccacgcgtgattaagcctcaacctttggtccttgctcacggcgaagctctgaaaatgaagggcaactcgtgcaagctttttggaatccatctcgacagcccagccaaatctgaacctttgaagtctccgccaagcgttgccacaccggcagctgagaagtggatggcagacggaatcgacgcagacaaaagccctgagccgcacaagacgccaaagcaactcggtgctacacaggtggatcctgtcccagagagatgcccacaagcttcaaggggcacacagtgcaaatcacaaggcgggtcgactaggagctgcaagaaggtccacaagcaaggaatggcgctgggcaggtccgtggaccttaccaagttcaacggctacacggagctggtggcggagctggacgagatgttcgacttcaacggcgagctgaaaggctgtagcaaggagtggatggtcgtgtacaccgactacgaaggcgacatgatgctggtcggggacgacccctggaatgagttctgcagcatggtgcacaagatcttcgtgtacacgagggaggaggtccagcgcatgaacccgggcgccctgaactcgaggccggaggacagcggcctcgccaattcgacggagaggggctccgcatctactgctgctgctagagaggcacccggctaccagtccgcctcgtcgcttaactccgacaactgctgatgccttggcagctagctggtcgtcccaagtagtagagaacaaggcaaatgtatccatagatctccttgtagcggagcttaatgcctttttttcccctttctaatatgcattggatgagcccgtagcgcaccgtagtagtatctaaagctggtgttctgagttggttggaccttcctgcagttttggtttctccttctgatgtggcaagttttagctggtcgcacctacctaatgtatgcttagcaaacgaagtcccactaagcgctgtacataactgcccctccctgcatcaactctaatatatcatctgcttaatcgtcacccctgggcccccgtgctggttgctcaagatcccagctgcttgttgtggcgcttggtttggttcgttgtcggccgtggctcatgtttgtt

SEQ ID NO: 31696 - DNA, 1645 bp, Zea Mays
gatttatgatataagtcggatgcgtctcgttttgttgcccgcggtcgtggcctcctgggcccctctccacctaccctaccaaacctgctctcccctccgcccccacgcggtcacccgcttccaaataaatcgcagcattccctgcctaaacgtgctcgctctccctcccatttcatcccggcattttccttgcccaacgtgctctccctcccatttcctgcgaggtggttggtggcgatggccttcaagctgatcaccaagcccgcggcggcgtcgcccgctgctgcttactggggagatctcgcccgggggccgcagggtacgagccgcgttgccttcggaccagcgcccaggaacaaggggctccgcgcggccaacaactccgcaacgcccatagctaaggtagagagggttgatcgaagtgacatattgacattggatagcatcagacaagttttgattagactagaagacagcatcatatttggccttttggagagagcacagttttgttacaatgctgatacattggatagcatcagacaagttttgattagactagaagacagcatcatatttggacttttggagagagcacagttttgttacaacgctgacacatatgatagcaatgctttccacatggatggttttggagggtctttggttgaatatatggttagagaaactgaaaagctccatgcacaggttgggaggtacaagagcccagatgagcaccctttcttttccaaggatctgcctgagccccagttgccacctatgcaatacccaagggttttgcatcccattgctgattctatcaatatcaacaaagagatttggacaatgtattttgatgaacttcttccaagattggtgaaagaaggaagtgatggtaatgctggatccaatgctctttgtgacacaacctgcttgcaggcactctccaaaaggatccactatgggaagtttgtggcagaggccaagtttcaagagtcccctgaagcttacacgccagccataatagcccaagaccgtgatcaactcatgcgccttctcacatatgaaacggtggagcgtgctgtcgaacacagggtggaagccaaagccaagatcttcgggcaagaggtgaacattggtgctaaggacaacggcagccaaccagtctacaaaatcaggccgagcttggtcgccgagctgtacagctacagaatcatgccgctaaccaaggaggttgaggtcgcgtacttgcttaggaggctggattgagtgtgtttacgtagctgtaaaactgccagatccgaaactcgtgcaattaaaccattacatcggtaagtactcatttctgtggagaggatgatccgaactcctggcattaaaccagaacgtcagtaagtacccagttttggggagaagatgggaactgtggcaataaacatgcagaatatcatgtggagttgtcgctttctttggctgtatggaatgctacgtcactttctttggctgggtgcccagtgcccttttgaatcggagtaaattctctcattgtcgttggatttatacagatcctctcagtgccatggaaattttcagctttctttgattcaaactatttgatgtttgcatttccttggttgccgttcct

SEQ ID NO: 31697 - DNA, 243 bp, Zea Mays
taaaggataactttcagtatttatgatcaatcctacagagagacgatgatattgatgatattaaccatagaatcaaagcatagtggataaagtggcgtcaaacaactgccattctatttgacaagagggtaacatagaagctaaaaggcaagttttataggacggcgattagatctgctatgttgtatggtgtagaatattggccaaaaaaagatgacttgtttaatagacaatagataaatg

SEQ ID NO: 31698 - DNA, 1473 bp, Zea Mays
atgatccagtacttcaagattgctggctggtcggtggaagactcccaaattgagggtaaattccctagaaacagcaaccccaaggagattattgtaaaaattccaaacagcatgtttcttttctgcttgatcaacgattacaagatggctgttcaattctcaatggcttcgtcgcgaaaagtgaggaatgcaaataaacgctacaccaaaatcaacgaagattggcaggataaagatgagacaaatgtacataaaagtaaagtgcgaaagaaaaagttatctgacatgcttgggtctcaatggagcaaagatgagctcgagcgcttctatggagcctacagaaaatatggaaaagattggagaaaggttgctggtgcaatacgtgataggacatctgaaatggtggaggctctttacaacattaataagagggaacagctactgctgcggggttaatagcaatgatgaccgatcactacaatattctggatggaagtaacagtgatcatgaaagcaatgattcaccaaaagcttcaaggaagccacagaagcgtggtcgtgctaggtttcaatctgtttctaagacatctgatgcacgttatgctgatctagggcaatctcagccttcttcatcaagctatggctgcctttcgttgttgacgaaaaaatgtgctggagatctgcttgtagggaacaggcctcgtgctgttggaaaaaggactccaagagtacctggtgcaagtatatactatcgagatgacaggggtgtaacagataggcgtgcaaaaacagttgctaacaatggtgatgatgaaggagctcatgtagctgcgcttgctctggcagaggtatttcaaagaggaggctcacctcaggtttctgaaacatccaaatggtgatcacatgttcctgtctcctgttaaaagtagtgacagaaaaaatgctgattcagagatgggaagctcaaagttgcatgggtttcatttggatgctgattaccccgaaggtagcttaggaagcagggaggccgagactggtgaatattgcaaaggttcatcatttttgacgaaaaatgaaggttctggtaagcctctgaagaagggaaaaaagtctcagaagaggaggaaaaaagctgcacataaaacaggtgatcagttcgaggatgacagagaggcttgtagtggaactgatgaagggcataggtcgataaagattaaagaagactcagagctggagtcattgggatggccgtctagcacgtcaaataaaagaagtcgtcaattgttttttggtggattgctaacaaaagaacagtagcggaggcccttgagggtatggcgtggattagtgatatcagggggaccatctcttgggcagttattttcgatctcctgatcctgtgcgaagctgtcacagaagttcatctacaggctgggaccaccgacaagcacttttggagattttccacttctg

SEQ ID NO: 31699 - DNA, 1377 bp, Zea Mays
accgtctcgtacatgcccttatccctctcgccccgcatcccatcacccgcaggccggaacagcagccgtcagccatgcccgcggcggccttcttctccgccgcgctgccccctccctcgcgtacgctgtcccgccgcctcgtcgtgtcccgcgcggctgcggccgcggcctcagcatcagcatcctcgtcctccgggtggcaaggtggcgggggagtggagttccagggcaaggtggggttcctggggctcgggatcatgggcgcgcccatggcatccaacctcatcaaggcaggctgcgacgtcacggtttggaacaggaccaagagcaagtgcgatcccctcctcagtctcggtgccaagtacgagcctacaccggcccaagtcgcttcatcttgtgacgtgacattcgcgatgctcgctgatccacaaagcgcgctatgtcgatgtgtcgacggttgatggtgctacatccaagctgattggtgaacgcattacaagtactggagcatctttccttgaggctccagtttcaggctcgaaaaaaccagcagaagatgggctgctcatctttcttactgcaggtgatgagtccttgtacaagagagtggcgcccctccttgatgtcatggggaagtcaaggttttatcttggcgatgtaggcaatggtgctgcaatgaagctcgtggttaacatggtcatggggagcatgatggtttccttctcagaagggttgctcctgagtgaaaaagtcggtttagacccgaatactctcgtcgaggttatttcccagggtgctatcagtgcccccatgttctctctcaagggcccatccatggttaaagctgcatatcctcctgcatttcctctgaagcatcaacagaaggacttgaggctcgcattggccctggcggaatcggtgtcccagtccattcctacagttgcagctgcgaacgagctgtacaaggctgcaaaatcgctcggccttagtgaccacgacttctcggcggttattgaagcgctgaaagccaaagtgcagagccagagctcacaatagtagttgcctgttcagcagagctcacagtagttgttgcctcttcagcagctaccattgaggcagcattttgtctcgatggatgaagttgacacttaggaaaatttctcaagatcgctacagaaaagtctcagaacaatacaatttctgtattcgtaaatattttctcaaacatcacaacgacgacatttccttaaggaagaaaaaaaactttcattaaaggctagttggggaacttaaatcttcttctggattcccggagattgaataaaagattagttcatttttccactcaatactcaggaattctagaggagatttagg

SEQ ID NO: 31700 - DNA, 1576 bp, Zea Mays
tttgacagtgccatatataggtaactcactaacttatttttgggatcacagtgatgtacgaaaaatgttagaccagagcataaggctgtctccagcaacgtcccctaaatttcatcctctaaaagaatattctctgtcctttacagcacactctaaaagattacatcctctatatattcttcttctccagcaacatcctctaaatttggtcctctatatatacagtgttaccagatttcacaatatacaattctttttaccggtggatcctaaaaatcgtctgtgactactaaaaattcctgctactgttcggtcagaaattagaacattattgtcaaggaacacaatacttttaacaggaaacatccaccgtagatttaaaaaactgtgcatgaaacacaaaattaggggaaaatcagttgtttctgttttggttagtttcctgtgacttatcaccaatgacaaaataatcatcaatttattaatgggaagttccttagaagctagcaaccattcaaaggggaaggaggacgattggctaggatccagagcattcggagttcttgagaagctagcaaccattcaaaggggaaggaggatgattggctaggatccagggcattcggagttcctgagaagctagcaaccattcaaaggggaagtgagaggctagcaaccattcaaaggggaagaggacgattggctaagatctaccgaattgaaggaggatgatgccaccgtcgggtggttgctgcttggaaaccaacggatgcgagccgtcctcacctagatcagggcgactccggcagcctggtcctagcttcgcgtccgacatccttgccgcgagcgcgccgacgacatggtggagatggttccagggaacagagacggagaggaaatgtcggcgtcggcgcgggattcactgccagccggtgtatagcgggcgtctggagtccgccacaattagcggatggaccacgaacggtaaaatttagagcatcgtttaccgaacactgctggaggcgttgcgaatgtctgtatcctctaaatttaccggacaggaccatatacagacccttgttggagacagcctaaatgagttgctgaaattgcacaagtaggcatatgaagagaaattgaaactgatatgcgcttagatttgtctagcgtacccgctcctccatggacaatctcgacgccgaggaaaattttgcgtgcgacgagggggacatgacgtcgcaagtgccggcaggggccacggctagaactacccgaggtcgtcgatcgatgtcgtcgaggacgagcgcagggctgggcgagggcttgccaccgctagtgttggcatggtgagcgctgagcgaggcctcgccaccacgaacttcgctacacaggaccaagctacagatcgtgtcgcaggtgtgttgtagatgttcacaagttgtgtcgtgttacgtttacctattcttgttaaccccacttgtttgttccaatgttgacaagataatattttgtagatgttattttcgaacgtggaaagctgtaatactcaaaattgtataaaagggatatatagagg

SEQ ID NO: 31701 - DNA, 1988 bp, Zea Mays
gctcagcgcatcgaatctggagtccaagcccgacccgcagcccgcagcccgtctcgcctcgcgctcgcgaaggcttcctttcctccccctttccgtccaaagtctccaagatggagtacccccaccagcaggcgggcccttcctccacgaccatcaccctcatctgtccgtacgcgactcgccgcaggaagagggccgcgggcgacgacctctcgtcggcggtggacatggatgtcgacgccgacgcgcagcgcgccacggacaagctgaaagcagtgtcagaggcacttgggcatgagatccgggttttttcaagtgagaactttgcttcacaaaccagcaagttgcctagtgcagatcatgaggaagatgacgacttttatgagcttcagcctgctgattactacaacttgatttcaaacaggatgggagagcactttaaaatgctgaagactcgcaagatgcgggaagcagaacttgctgctcagcgagcaaagagaacaaaaacagtaatgagggtgcgtttcccggatggctacatccttgaggctgactttattccatcagagaggatacatagtctagtggacctgctcttgaaagtacttgctagaccagatctgccattctatctttatacagtacctccaaagaagcgaatactggacacatcacaggacttctatacagctggttttgtccctggggctaatgttcatttttcttatgatctccctgaaggtatgcatcatcataatgactcatgccaagttaagaaataaacaacaattacctctcagctgtatgtttcaaatatatggtgtaatttaacagaggtcaattccagtgccatgcttttctcctcaccccatccgcacacgcagaaatacatgcaaatacatgaaataatttgtcactggtggtgcctatgtcaaattatttatttcgcccctgttagtctgatactatacaagagtatcatggttgtcactttgttagacatttagatactcatgagttcttgacttcttgcaatgagttgtatcaaatgttttggacctgcagtttcgttgttaaatgcagatgatctaaaagcaggaccctttctccgcgaagaaattctaagtttggatggattgtcacttctgctgaaacctgctagtcaacctgatgattctagaatgaactcttcttctcttcaatctgatgcatctcaatctgttcctgtaccaacaacaacaaataagaagcctggcagaccaaagtggctgaaaaggtgataccactccaggtgtcaagtgtgtgccatcaacacagaatcactctgttaggcttctaaacactattaatggccgaacaagctcaaatctgaacaggctacactgctgtagtacaagaattggatcctctgcttacagaagctgcaggggcattagaaatagaatcccaccttttttttctaggtgggagccaagtagcatgtaaatttgaatgtgtcgcgactcatcaagtcatcagaacagtgctccgctgtggctaagcactttgtcatcttacatttcgtgtgaaccccataggaagctagaaacggcggagataatagtccagtgctgttaacgcttcacggtgcaatgccatgcctgtcttcactattcagtcttgacaacaatatatttcagaaaactgaaagtgcccgaggtagctggaatataccaagtgagtgtggcttccaccatggcaactttattcgggtctcatacccatctctctcgatgcgattactatcacattacgtggtagtcccttggtaaaaggatctgccatatttttatctgttgaaatataagtcacacttataactccggagtttctcaactttctgacagacttcaatcgtcttttgacatgtcttgatgactttccattatccttagaactcgtcactttagcgatcactgtctgattgtcacagttcataaggatagctg

SEQ ID NO: 31702 - DNA, 1807 bp, Zea Mays
cctgctcccagcaagccccagccgcgtctcgtctccctctcccttgtctccctcacacacgtttctctctccctcctcttcttccttgctgcgctccacctcgccccaggtgctcggccgctcatctccctgctgccgcgtccctgcgcccggccttcgtccccgtcgcgccgatccgcgctcgcccagccggccgaggtccttcccatggcgcccctccctgctcccgtgcacgtgcccccctggtggtcggagctcgccaacgccagttgttcctccacacacacctcctgctcccctcgccatggcatggatgaccgctgtatctgctcctgtcgtgctcaagtcgtcacaggttggtgggttgtgcgcgcctagcggtaagttatctgctcctgtcggtaattttgcatcattaattattctgttaaggatctgaatttaggctagagtatcaggttcattttgtgggcatgtgatcaaatgcctactgtgctgacatatgctagtctggccccataattaatataccattacttttttgaatgctaattaggaccgcagcaggtctaatctggccccataattaatataccattactcaggaaatattttggagtaaatgcagagctaacttgaaatggttgttataacttaaaaattatataaatggtgaattgaacattattatgtgttctacagtagtctaatctgctgatgtgtcaatcaagcttattgtattaagttgtatatttactatctagctcattattctgctgttgttacatattgatatattgtttgttacatgcggagtttgaaggagtttaaaacacaagcaaccacattggcatcgcttcagcatcccaatttatgtaaactgatcggctattatgcaaaagaagattctaatgaaaggatgttggtctatgaacggctttatcatggaagcttagataagctactctttggaagatcagatggtcatttcatggactggtctaaacgtttgaaggttgccctgggtgctgccagaggtctagctttcttgcatgatgaaggaccctttcaggccatgtacaacgagttctcaactttgaacatccaaatagataaaggtttcactgctaagctttcaggatatggttgtgttggcttcaataccgaggagatatctaatgcacctgtgcaaaccattcggtggagaccttggagaagggtttactcactcagtttgtctattgctgcaacaagtcggggctggaccgttccaaagtaaatgtaaatggaggcacgattgcccttggacaccctttgggtgcaacaggtgcccggtgcgtggctactcttctaaatgaaatgaagtgccggggcagagactgcagatttggtgttgtcaccatgtgtatcggatctggaatgggggcagcagctgtgttcgagctatgttcggcccggctggaggtatcgaccatcactcgtcactgtaacccgatggtgatcgacgaccgtgagcttccatgttattgcgttctgatacttgagacttttattataactatgtatgagatattgtctcttattagtactggatgatgagatgtgtcttattatgactatggatgagacttttgtgatgtaattgatgagactatggatgagacttttgtgatgtaattgatgagactatgaatttaaatattgttatgtgattgtgtgtgagatgtgttatgtgaaaatatgttgtgttatatagctgttgatatatttgttatgttgtggaatgtggtgtaaaataaaaataaaa

SEQ ID NO: 31703 - DNA, 2371 bp, Zea Mays
ggaaaacacagtcagcaagcgaagagacccatagattggtgtacgccgggggaagggcaaggaatgccatcagccacatcgccctctccagctctcattaaaaaacctcttgcctgggggcggagctttcgaagctcgcccattgcctcccagtctcccaccctcgcaaccatcaccgccgcccaccgttcccaccgccgcggcctttatttctcccccttccatgccccgctcgcctccgccacctccccctcctcccgcccctaggtgactgtgactccctccggcgcctgaatctccatctcgctccccacccgccgcctccgccgcgagatctccggctgcccgcgccatggtcgccgcctccggccttgcgctgccgcgggtggccgcaccctgcccggcgcgcccgcggggtggtctccgccccgccttgctccgattcgcgccgcccgtggcactgccaccgcaccagctccggtgctgcgcgtccaccgtcgatgacggcttggtgtccgcagcggcctccaagccccgcctccccagggtggttggtatgggttcaaagcttgtcggatgtggatcagccatcccaacacttggcgtttcaaatgatgacctttcaaaaatagttgagacgtcagatgaatggattgcagctcgaactgggattcgtaacaggcgagttctttcaggagatgaaacattgcgggggctctcaataaaagcagctcaaagggcacttgaaatggccaaagtaaaagctgaagatgttgaccttgttctcctttgtacatctactccagatgatttgtttggaggtgccactcaggtgctgacggacgtggggtgcacaaaggcttttggatttgatattacagctgcttgcagtgggtttatagttggcttaatcacagctactcgttttatcaaaggtggaggttttcagaatatcctagtagttggtgctgatgctctttcaaaatatgtggattggacagacagaggtacatgcatcctttttggtgatgctgctggtgctgtgttggtacaggtatagcttatcccctgtgtaaatatttatatttctccctatcccagtaagtcagtgttccatggctaaatctgattgaaatatggatggaacttgttcagtaagaagcatgagcagccatgctgtgggtgatgtgacactgttaattatgagacctttattcaaattctcttgtccatttttttaatttagaattttgcaggcatgcagcgctgatgaagatggcttgctaggtttttgtgttcaaagtgatggcaatgggcaaaaacacctaaatgccgcaacggcaatcgatgagtcaatcttgtccaataccatggtgttcctggatttccgccaaagaaggcaacctactcatgcattcagatgaacggaaaggaagttttccgctttgctgtccgatgtgtgccacagtccattgagaaggcactccaagaagctggtttgcccgcctccagtatagactggttgttgttacatcaagctaatcagcggattattgatgcggctgccagccgattagatatcccgtccgacaaggttatttcaaatcttgccaactatggcaataccagtgcggcatccatcccgttagctttggatgaggctgttcgcagcggcaaggtgaaggctggcgatattattgcggcgtcaggttttggtgctggacttacctggggttcagctattgtcaagtggggctaattattcaacgtgaaccggaacaacacatcaatgagatagcttcaagctttcaaaggccttgggaggcctacatctgttggttctttccagtgtttttctgtgcaacatttttctttcgcatgtgccagttttccttgcacatgaaaatgcagtgcgccattttaccgtaatccatctgttccttaggctcattacacagttgagagagattgtaatgtagttggcagtagtttgagtggtggatgtaatgtaagttcttgaattttgcatggagataaatttggtggggttaaaagatgagatcacactgtaaagctaattggccttttgtctgggaactgtactgagcggtttccgatcttgtggccccaggcaataagcatgttacaaggagaattggaccgtggacgtatgctgtaggtcaattcttagtaattttgatctgtttttattatacaccattcttcgtgtatttttttttcaagtggccttggtttgtgcgttgttagatgttttgtgtttcagctatccaatcgaggtatagcaggaatgtagatgacataattgctttgacggtatcttgaatttccaggtctataaagtatataaaca

SEQ ID NO: 31704 - DNA, 2099 bp, Zea Mays
ctcactgcgcgttcgcattcgccaattccgccgcctcctcctcctcctcccctgtgtccgagatctcgcatccgctccatctatggaaggccaccacacgccgtgcccagccatcctcggattccgccaccccatcctcggattccaagcgtcgtccaccccacgtgcccctgcccgacgaccccgttcctcgcggcgcttggcttcagcgccgcgaccgccgcgccatccccacccagcacccatccgcaaacccactcccatgactgcccccgcctgaagaccccgttccccgcgacttcggtgccgcgaccatcgcgccatccccacccatccgcaaccccgctcccccgccgcgccatccccacccattcacaaccccatcccctgccgcccctcacgtgatcacccattcgcgacctgccccctcccctcccccgatgggacagggagcagcaaggtcaccaccggagacgacctcgatgggtggcggcgccgaggacggaggtggtgtcacagtctatgggaggaaggagatcatgatgggggagcagtgccagtcgatggacttctctggggtcatctactacgacgctgaaggccaccacgtcgcacaaccgccgccgcggcgctagcctgatgcccgcctccgtgacctcgccgccaatgcccacaccgcgctcgtcttcagtgggctggacagtgataccccgcgacggtggtgtagtgggagtgggacggcgaggaggttaagggcggcgacggcgaggtgcagagctcctacgggctccgccatcaacactatggatacactccaagaggccccttcagatttccagcaccctgttttcaacaccgaggaggatgaacattctacgaaatcaaaaggaccccttaagttctacaactcggagatccacacgacatcattctgtttgtcctcttttgcaaagagggtaattgagtcaaaggcagtgtaccgaggcacctcccattggaatggcgagtgctgatctgaatgggagatatttctattactgagattcagactccaatacaatataggtgggtgtaccaatttacttagaaggaacaaaagctatggaagaggcaaaaatcaagaatattgaaagctgactgtaccagaaggttctttttgcaacctcaatttgagatttaaggtcggattaccaccagaggcagtatacaatatcataatcgaggcgggcaacaagggcttgtggatgctggacatcctcaagaagttgctgatggcccccaacatcgccaccaaggtcgtgcgcaccctcgtggcaagcgggcttctcaaagaggtcagcgacgtgcgccaccgcagcaggaagatcttcatggccaccgacttccagtccttcgccgagatcaccgggggcacctggtaccacgacggtcgcctagacaccgacgccgtaagcaccgcgcgccgctgctgccaggcgcaggtcgagaggctcggcgccgcgaccgcgcagatgatccaccacgacattctcaaggaagaccccagggccgggtacactatcgacaaggtcaaggatatcatcaagaccatggtgctcgaagaggtcaagagcaccggcacgcgggattttagcgccgttatggccggcacaatgtgctatcggctggtgactggggctccgcagggagggatgatggagggaatccattgtgggatttgccccaggactcatgagtgctcgccggaggggatcatctcacccagcacctgcgtttactacaagaagtggttgcagatggacttctaggcggtgacgatgagccctcttctgtccatcgcgatggggtgttggattgtgatactcatattaataatcatctctatagttatttctacttagtccttttagcttggtataatcattcatatgtatttattccaccaagtttagatgtctttactgagtaccatatcaacttcctaaatatttaggtaatcggcaaacctttcagctcttctatctactgaagtcatgtattgagcatgtgaacccaaagtgtttctgttcgactacagccaaagggccaacaaagatgcg

SEQ ID NO: 31705 - DNA, 374 bp, Zea Mays
gcactgattttacaagtccactcacttgaaattacaaggttcagatttcttagccagaacagaattcaaagaccatgagctaagcttcaatcaacatagtacaatcgcggggtctaatgagagcaaaatcagatcgaggtacgagttgtcctactgaacacggtatgcgagcaaaatggaattttttttctcgtttagattgtgcaacacccgcagatcagcatgcaaaatctaagcgaaaacaagaaaattgtgccgagggattgaacctacaacatcttaccttgcacctcctcaggctagtcaatccatctatgacaatttctaatacaaacatactagccatcctacttaataagcgaacatatctggtg

SEQ ID NO: 31706 - DNA, 4051 bp, Zea Mays
aatcttaatcacaaaaatattgtcaagtatctgggatcactgaagacaaagagccacctccatattattttagagtatgtggagaatggctcacttgccaatattatcaagccaaacaaattcggacctattcctgaatctttggtggctctttacattgctcagtttttatatgaccaggtgttggaaggtcttgtttatctgcatgaacaaggtgtcattcatagagatatcaagggcgcaaatatactgagtaccaaagagggtcttgtcaaacttgctgattttggagttgccactaaattgactgaagctgacatcaacactcattctgtggtcggcactccatactggatggcgcctgaggtcattgaaatgtccggcgtttgcgctgcttctgatatctggagtgtgggttgcactgtaattgagttgctgacatgtgccccgccatattatgatctccaacctatgcctgcactgttccgtattgttcaggatgtgcatccaccaataccagaaggactgtcacctgaggttactgattttctccaacagtgtttccaaaaggatgcgatgcaaaggcctgatgcaaaagcattattgatgcatacatggttgcaaaacttaagacgagctttgcctggttctcttcggcaacctactccattgaggaacatcgatggtgatgatgaaggctcaagaggtgataatagcttgggtttttgcgacacaccaggagatattcaaacaactattacttctaatgttgaccaggagaatgggagtaaagaaccaattatggactctactgtacaaagtaaatctgaagagcttcatgatggaaatttaaaacttactgagggcagtagttcaaacagtgtggcgcttatgaaagataatgtggtccttaataaaggtccgacactagttttacatgagaagttaccggtggaatcttcatctggaggtgctgatttgaatggcaaagtaatggcacatgaactattgcaaggtggtccgccaggtaaggtagagctggagaataaagaaagttcaagtagtgatgtgttctcctttcaggctggaagacagaatattggcttccaaaaggtggttgaaccttcagttgttgaggggccaaaacagcttagtagatttagtgacaaacctgaagatgcctctttggaagacttatttccaccaaatgataaatggggagataatggggctgaaccttcaacatcaactactgtccaagaacttaaatataatggtgtacaaaatgcgttcttgaaggggctcaatgctagggtggagaagcaaaaagaaaatgataacgagtctatgaatggtggaaagctaattgaatttgccatgcaactagaaaatattgacgcgttgggttttggtgaacatattcctggagagagtcttttccctgtgcagtctgtggaatacaacaaaatagtagcacaactgagaccaggggaaagtgaagatgtaatactgttggcatgccaaaagcttctatcaattttcagttaccgccctgagcaaaaacatatttatatggcacaaaatggtttcctcccgctgatggaactccttgaaattcccagaaatcgtatattatgctctgttctgcagcttatcaacaacattgtaaaagatagtacatgcttcctagaaaatgcttgccttgttggccttattccagtggtgatgaattttgcagagccaaatcgtccaaaggatgttcgggtgcaagcatccttgtttcttcagcagctttgtcaagccagcaccctgacattgcaaatgtttgttgcatgccaagggatccctgttttggtcttcaagctccagcattcaactccaagaaacaacttctgtcgtatagcggcaaaaaatgggatgcttcctaggctggtgaatacactatatagcctgaacgaagcaacaagatttgcttcagtctcagggtcaggtgcttcagtaacacagaatggctcaaccccccgacgaagatctggccaattagacccttcagttcttgaaagttgcaaggcaaggctggatcatcatcattcatctggttctctgcaatctctacaaacagacgcagataagcaccatatattaatggactcgtcatctcctaggtttagtgataaaaccggcagtaacttggagaggaatgataacgacttggttattcggccacagaggcttagtgtttctgctggaaggacatctacagacagatcaccaaagcatgtagaactagtttcaaatggtcatattagcggtcaaaatgaccaggtccgacctctactgagtttgttggagaaagaaccaccttctcgacatatatctggacaacttgattacgtttgccacataactggattggaaaggcatgaaaccattttgccactattacatacatcgacagaaaggaaaacaaatggtgaacttgacttaatgatggattttgctgaggtctctagacatggaagagagaatggccatctggactcgagtataaaagtttcaaatagagttcatagtatgaaatatgcaccttcgacaagtgcctctaatgaaggagcatcaacttctggagctgcatcgcaaacagcatctgatgtggcacgcgaatatcttgaaaaagtagctgatcttcttttggagtttgcacaggcagacactgtggtaagatctctgatggccagccaaagccttcttacaaggctttttcagatgtttaacaagatagaacctcctattcttcttaagattcttaggtgcattaatcatttgtcgggtgatcctaattgtctcgagacacttcaacgcacagatgcaatcaaacatctgataccgattcttgagctttgtgatggacctctggtttttcaaatacatagtgaggtcctcaatgctttgttcaacctttgcaagattaataaaagaagacaggaacaggcagctgaaaatggaatcattcctcacttgatgaattttgtcatgtcagactcacctctgaggcagtatgccctgcctttgctgtgtgatatggctcatgcttctcgcaactctagagagcagttgagggctcatggaggactagatgcgtacttaaatctgttggaggatgatgtatgggcgtgcacggcattagattctattgctgtttgtttggctcacgataatgatcatagaaaagtggagcaggcactgttgaaaaaagaggcaattcaaaagttagtgaagttcttccaagactgcccagaacagtattttgtccatatattggactctttcttgaagataataatgaaatcttctaggctaaacacagcaatggccaccaatggcttgacagcattgctcattgcaaggcttaaccatcgagacgctattgcccgcctgactctgctgaaactcataaaggttgtctatgagcatcatcctcgaccaaaacaggtcatagtagagaatgacctccctcagaagctacaaaacctgattgaagaacgcaggggtggacaacggggcggccatcaagtgttggtcaaacaaatggccacctcattgctgaaggcgctgcacatcaacacagtattgtgattttgatgggtcatgtgttttcctctcaagttagtgtttacgttttcgctagaggaagaaaaggggcgtccttctctttttgcctccttttctgctgtggtggcttctcacgagcaccagactcatttgttgtacctgatccctccttttttgggagaaaggttcaacgttttggtgcaggataaaatgggcttgctatcctccagtgctgtgtatatctagcgtatgttagtgaagaaattgcaaattagacaatctaattaaaaaaatttaaaccatattgacattttgttccgtgtgttagtagattttccctagcctgacccacttgcaccaagcaaaatggttgatatcgtggacgtctttaacaggatgcaagaaagcatcacatagttcttttgatgcattacattac

SEQ ID NO: 31707 - DNA, 811 bp, Zea Mays
aatacccaagtatctgctgcttcttgatgataactaaagctttgttggatgtgtacacaataaagagagaaattggcacactagatggaattaaacttggtttggttggtgaccttgctaatgggaggacagttcgttctctggcttacttgattgctaagtaccagaacattaagatatactttgtatctcctgatgttgttaaaatgaaggatgatatcaagaactacttaaattccaaaggtgttgaatgggaagaaagttcagatttgttggaggtggcatccaagtgtgatgttatttatcaaacacgtattcaaaaagaaagatttggtgagaggattgacctttatgaagctgctcgtggcaagtacatcgtggataaaaaggtcttagatgtgctgccaaaacatgctgtcatcatgcatccccttccaaggcttgatgagctgtgaggtcacgagaaactgaagatcatcttggtgcctggaatctggagtctcaggtcaaggacagttaccacaggatgaggcgcatgaaggaaaagactagctaatccctaatgatttaggctacgattatgaacatgtactaaggtcataaatgtatttttatccgtgttgcatctcgtgcctataaataggtgatcagtacccctgtattgttcacgctagattgtaattgctctcgcgtcaacaccttcgaacaagccgaagatatcaatgtaatataaattctgttagtgttcatgtatatatcatgaaatacatatatgaaggaatgaattacatatattatctctatgtattct

SEQ ID NO: 31708 - DNA, 385 bp, Zea Mays
caccaaactgatgacggccactagaagggcaaagacgaggtcgagcaagataaaacgggttcaacggcccgacgacaaacgcgagcacgcgtgaagcccgatggacgaagagcgagggtgacgcagtgacaacaaacagacgcgtgagcgttaacgcgagccagcggcaagcacgagtgctgaggtacaaccggcaacactcggcgagcacacaatgaggcacacaacagcgacgacagtcgaatcggcaacaaagtgttggcgaactcgacgaacacgaccacggtcgcgtgctgacgcggataggacaatgacagctgacgagttggagcaccagtgagtagccgacgcgggtgagccaagtaggcaggacatcgagcgtcgc

SEQ ID NO: 31709 - DNA, 2349 bp, Zea Mays
gcaagatgttcgatttgttattcatcacagccttagcaagtctatggagacatactaccaggagagtggtcgggccggacgggatggattaccttcagaatgtattttgtattatcggcctggtgatgttccacggcagagttcaatggtgttctatgaaaactgtggcctgcaaaatctttatgacatcgtgcggtattgtcagctcacacgatactgtactgatcagtgccactgaaggcagcacaaatgttttatggatcaagctacctttgggctattgtgctacattgaacagcaaacagtgtggcaatgtggcctttttcagctccatgaagctgcgagaaagaaagccatgggacagaatgctggcctcgcctggaaggtttccttgacgaagtagagaagtcctggagttaatcagtggagacggaatgtcctttgcagatccttgccgacaaacttagttggcttgctagagacttgcaagcttggagccaaagcaaagttgggcatgtcaagcggtagctgcaatacgcgaaggaaatcttacatcagttggaaaaggctcaagacatcagacccttggcagctcaagaagattggctacggcggcaacttaagcgccaagctttggggctggcctctctggaaaggaacatggctaggatgaggtcctgatcctgactgtgttggctgaaagaaggtgactctaatacggctttcttccagcagcatgcgaggtatcggaagcggaagaatttcatagccaaagttaaagtgggtgatcacattgccacagagcaagaaccaagaagagaagtagcatgcagtttgggaattctataatagtctgtttggatcggcggtccagtgagacttcactcatgacttatagtcctttcatcggccgatgatcgatcttttggcactcgatgaggtcatcgccaaggaggagatttgggccaacatcaaatccttgccgcctgataaggcgccgggccccgatggatataccgacacttttataaagtggcttggtctgtgattaagatggatttcatggcagcagggggatgtctctcgtctctaccttctcaactctgcttatgtcatcttgctggccatagggatgaaagtgtctaagaggagttgtcgtcatggtgcattctttcgccattttggagaggtccctcaggactgcaacggaatgtgcgacaattgtgcttccactattgagcagaaggatattgatgtcacctgtatgatttattttgcgtcagtttaaaaattacaacaaatgaccaacatttattcactttatttcagggggaaaatgttttttatttcatgatattctcacagtaattttttctacttcctgtttagaccatacaaaaattatagtttcacttcttcacgatatgcaactttaatgatcaaagagctacactactacagctggtggataagttcaagtcaaagtggaaaggtttagttcttctacgctttggaggaaaaaatcatttcaaccgatcttacattacagctgataatgttcaagcagaaagaagaatttcagcacacagcatattcaaccaacgcttatgttaccttaggagcattgtggaagccagcactacaaggaaacagagtagtcaagcttgagattgctattgcttctaaagatagagatgttagatccaagggcgcaaaacgaggtcgcatgagtgatttggaagccaaactagatgaactgcgtagggatctgtcatccacgggtagcgatgccatatttccccatgcagttcttactgcgcaacaaatttcactactgagcagccagaagccaaccactccagctgagctagaaaaggttatagggaaggtgaagacaaggaagtacggcagcaagatcattgagctgatgaggtcacatgacaattcaggaagtggccgaggcaaggaggctggcgatgaacacagagctaagaagatcaaaacgaaggatgaggatgttgtttgtgttgagagtagcgaggaagaatagaatatgcccttcacatacttggctttttagtctatcatctcatggttaattattttgccaatcatttcctccgacgtcatctttctgtaatttagactttcacggattaatgcacagtcatatttcttacagagaaagcctcgagcatccttttgaccggttcatagtcttttgcttcggtagctttgtatcttgttgatgatcggattaatgtgcgaatacttgggattaatgtgcgaaaactttgtgccaagtgtttgaatgtactatacacatgctgaggaatatggtaatcggta

SEQ ID NO: 31710 - DNA, 1338 bp, Zea Mays
caaaagtacacatctggctccggcccatattgtcactagtcactaccgcagctgtcagcccgctgaccagtctcgctctctcgcggcttccgaatcctagcgcgagtggatcggcgggcgggtggcggcgatgatggtgagggcgcgcgacgcggcgcgggcgctgctccgcctcgccggcgccagagctggcgtccatagggactatttccctccgctagcgcgcgccacgtttgctcgcgccttcctggatttccgcaagacggggaacaaggaggccatcgagaaggataaggccaggctgtaagtctcctctccttcaacctcgtttactagccattactggttactgctgctgcgctgcagcattgtatggtgtgatgttttggttctgattggtctagtgcagtaccgatgaactgagtagaggctacttccaagactttgccgagatccgcgagaacgctggcaagattgcgacagcgagtaaggtcatcatcccagaggtagatgctgtgaagtttcctgatcttgatgtggattcccctgatggaggggcactgcatctgcctcttgttgcaccaactctgcaagctgatgatggtgaggctggagaccataagattcctggtgcttcattggtgtgcctttccttccgcgcaagctcgctgaaaatggcagagtcatggagtttaccttacctggatgctttcggtgctgccaagaacatgcatgtttatgaggattagtacaattactcagctgttattctataccatgtgatggaaaggaaaatgcatctgtggttaaactttagctagtgaggtctcatttatagattcttgggtattatcattgagtcctatgaggcgagcatttctgaaggcgatgaggaaatctaacaatccacggagacatgttgtgtatgctttcggggaccattatgacttccggaagaagcttcaaattataaaccttctcactggatacatatatctggttgatggcctgggaagaataagatggcaaggctctggatctgcaacacaagaagaactgtcgtcactaacagcgtgcacctccattttgttagatgaaaaatgagatggggtggctaatctttgctattttgtaacttctggtacaagatattttgcttttcactaagcaaatcgagtttttttcccgtgggtaataagtattggatggttagtttttttcactaaacaaccttgattttctggtggaaaatgattttggtatggtattatcgttgtatttaactgctatcctaacttcgtgctataataagactgaattagtttaaatctttccaaa

SEQ ID NO: 31711 - DNA, 902 bp, Zea Mays
tttcgtcgtcacccgtcagaccgacacggaggtaggagaggagggacgagggaggggaaaagagagatggtggaggcatcgccggagtccggcgccgcggcgaccggaggtgcctctagtacggcggcggtgcggaaggggaagtcatgcaagggctgcctctactactcgtcagtgctcaagtcccgcggttacaacccaatctgcgttgggatcccccgctccatcccccaagttcctaactacgtggtggatgaacctaaggaggaggcgacggcgcaggggcatgacctcaggcggttcagttattggtggacagcagattggtcgagagaaagccatcggcaactgaacaagctccagcacatgttgcaaaggatgcagcagctaccatccgctctcaccaacaaggacaacagagacctcagaacttgtcgaggcaggaattcttggacaggtttaagaggagcgctggactggtcgcttcaggtgttgcgaagaatctaaacaaaacagccaattatatcaaagaaaatattcaggacatgtacaccgatcgtcgtccaccaaagtagcaaccatgccgagtgattgtcgtcaagagctgaagaaatcgcttgctactggaaactttacatcaggactacctggaaactttactccactctcctcacttgttaaacgaaatggagcttttctgggataccaacttccttttctttacctgcataatcttgtaattttgcggctgtatatgtacatgcaaacaacttctttgaagcgaaaaatcagatctcgtttggtgtattgatcaatagtgtcagcacgtcacactgcagttcaaaggggcgaaagaattttgcggaagacgatggtatttgctcgtcgtcacttaagcgata

SEQ ID NO: 31712 - DNA, 2002 bp, Zea Mays
cagccagtacgcaccgaggcggggcaactgctccacactccacagaccacagtcgccgccggctcatctcctccgtgcccggcacacgaactccggcgccgccgacccacaatggaatcccccgacggcagtcatggcacgaatactcggcccactctgcagcggcccaacaaagtgaggaaacaccaagacccatacaacgcgacgtcgcgatcccattgcccatccccagatctcaacccgaacctcccagccgcgccgccctgatggcctacaccacctcgccgtcgacatcgacgtcgacggcagcggcggtggcctgggccttcgctgccgccacctgcgtgaaactcctcctcgtccccacctaccgttccaccgacttcgacgttcaccggggtgggatcttattgggggagtcgtgttcgcatgcttgctgtgctcgaagcacctgttcctcgtggcagcgccggtgtactttatgtatttgttccggcattattgctgtggccggggtgtcgtgaaggggctgggaaggctcgtgctcatgggttctggagtggctgctgtttttgccgcagcatttgtgcccttcgtgtactatggtcagatgcaacaactaattagccgattgtttccctttgggcgaggcctatgccatgcttactgggcgccaaacttttgggtattctatattatacttgacaagattcttgcatttcttcttagaagactaggctttaatattgccatacctgaagcttcgtttactgggggacttgttggtgattcgtctccttttgctgttcttccaaaggtcaccccaattgctacattcttattggtcattcttgccatggctccttgccttatcaaagcattctctaatcctcaaccaaagcatattattagatgggtctcgtatgcatgcacatgtgggtttatgtttggatggcatgtacatgagaaggcatcacttcatttcactatcccacttgccctaatcgccatggatagcttgaacgatgccaggcattactttttgttgtccatagtttcatgctactctctattcccgttgctgtttgagaaccaagagtacctgataaaggtgctgctgctgctgacctacgctgccctcatgtgggtaggctttacggtccattttgctgcaaagtctgacctggaaggaaagaaaataagtcggtcaggcagcacagtgaagaagaatggcatcattggatggattggtttaagctatcttttgggaattgcaggcatagaattatggtctcaagtatttcaccatcatgtattcggcgataggctccccttcctacctcttataatggtgtcattctattgtggccttggaatgatgtactcctgggtgtggcagcttgtacatatagtccgacacacatgatttgattaccggtcatcagtggaagcattctcttgcctttcttgggttgaggctaatcgcgatgacaatgctgcctggaccgatgcagcggccaacacagtcatgtctgggcacagcattttctttttagctgtcgaagtcattgtctgtgtgcaagaaatttttagagatgtgtgaccgtgttatgatgtaattaatgtcagtttatataagtaacagaaaatctgcttgtatcaacccgcgcttcatgcgtgccgctcttttccccatctcaataacatctggcttctgcatcgagtaactgagtgtgtgtatgatatatgaacgattctattttctaggaaggaaagacatcaaatgtgatgtataatctgcttgttatctttctgcgtacatgcctattacgtctggcagatgatgcgaatatatcaacgattctattttcgactcgcctgctgatgatgctgatggcgcacgacaaatggggctcgtagttgcggccagccagcaagtttagaattgactgaattgaaatggaaaggaaaaccagggacgccgggacagaaaggaattggg

SEQ ID NO: 31713 - DNA, 3040 bp, Zea Mays
cgcacgcagagagagagataggacagtgtcacagtcggcatatgacaccacgcccacgcagcacctcatcgtatgattgatgattctgaggagagcggacaaaagtcgcgggctcgcggcggcatcagcaccagggcgctggccacaggtaaaagaaagctgcggccttttctgctactcctgcctgccagcggcctgcctgcctgcctactagtgcggcgtggaggtggagcagtgggcgctacagcctccatcagctagctgccttgccgtgtcctcctcttcctcctgtcggtggcgatctctgcggaaacccgagcttcgtccaagccgggcagtagtgcgcgccgcctgggcgtaattatggattcttttgagggctctgatcatataactcaaagaaaggttgttcctgcaaaacatattgcattggttgatggaaagaatgagcctgctgtagaggggttgcctaatggttggctgaaagaatgcaggcctagaaagaaccgatatggatccagagtcaagagtgacacgttctatattgatccaatcaatggatacgaatttcactctctcaaggatgtacaccgctatcttgaatctggagacatcagtaaatgtattagattgccaaacaagagaaaaattgaggacctgcatactaaagaggaccaatctcatcatgtaagtttcatcttcaagttttggcccacatctgaatttgccctcgatcttgtgttagctgctacattggattgacaattggattcaaatcaacaaggagttaattcttaaggtagtatgattctttttaaggcaaaggtttatgaatttcatttgaactattttaccatccccccgagaagtactaagaggttacacaaattgtaatttgggagataccaaatccctagttgtaattttggtctttccccaaggactgtaaaaagcctcatttctggtctcatttcttctttaaatgaactgcggcgattctcttgtcgccctttcggaaaaaaatatctactattataaagcaccaatttttctggtttccacactcgtcacttttgtaaaaaaaacccttatatttcatagcacgggcaaaccatcctttcccatccttatgtgcaaaaaaaaacctatatgcacctgaacacaagcactgttcttgatagacacttgttcggagtctatccaatgcgtatttgcaatgcacctccgttatagttgacgtaagatgcatcttgtattgatgtaggctgtcatgctgaattatgatgcatttttatattctaactgagtgaactggaaggaattcttttcttgttgttattgctctttcagaaatacccaaactgttgatttgttttgtaaaatccagacaggaaaactatcagatcatacccagctggatactgctgatgagtctaatcgatatgatctaccggaaggtaccaatgcactgggatatgctctgcaaaatccagaaagcggagagaataatgaaaacattgcactgtccaagcctgacaatataagctcaatccaaattgaagctggtcaggttgaagctacagaagataagagcatccaatcaggctctatagaatacactccaggggaagctaaatctgtcactaggaaaggaatagatgtgaaggagaaaccgaaggggaaaaagtacaaaactaaacatgccaaagggattgctatacctcttagatcgtcacctcgtttagctgcactgaagattagccaggaagcaaataatgcaaccagagatggacatattggcacacagacagacaccaataacgtgccagaaccaaagcaagtcgaaaaacccaggcgaaagacgaattcttctgtaattcctgagaggaaagatggggaacctaccaggagttgtgcagaaacccttccttcacttcccaatcagatacagggagcatcattcccacagtcttcaggagatgctggatgccaggatgcaccagccgaggcacctgttctgcgacaacaagcaggagcaggacaaggcgaaacatctgatggtttgcctggatctgccctgacgtcgctgtttcaacatgtctggtcagacccgtgccttgtgttcgcgttcaggactctcctgggtgatatccctgttcttgatgacgctcgagcatatcggtcttcggcttatgatggtaacagagactactaccttccaccacagaacatgaataaaaatgctgcagccaactggtccgctctggcttatgatagtaacagaaaccacgcgcaagtcgaccatgttatgccgaggacatcagatacgttctacagcagtggttggttccctccccagtgaattcaatctaggaaatatgaaagcaatttcttacctggcaaaggacaaatcagaagcaaggatgcatgttgcaagcaagactgcagctcgttgtaattgtgtagacgatccataactaatagtctaatgtagctatcacatgctaccgtgcgccatcagcatcagtctaattcacaggaagctgtctggtggtagacttggcaatactttctgttgtttgtgtttttgtagtaccaacttgatcatgcattcacttgttgcattgttacgtgttagagcagcctcaatagtcaatatcccaggaagtgatctgggctgtactttgtctatgagcatccacttgtgtattactacttgtaacttggtagactttcaacgtgcatcgtggcatcggactaagttgtaccaatgtgtttgtttcgaaataaggtagtccatcatctttctactcctcacttttttatttggtttataaaataaaataagtcgatcatgttagagccccgtttagggttttagtgctagccctttgtaattaccgttatacccttgtgtaatggtgcatccccagtcagtcgcagatcccctttctgagattaattagtgtaagttatcctatagatactgtattcatgcctgttcgaaatgtgaattatagtattttttgtgagaatggaa

SEQ ID NO: 31714 - DNA, 1514 bp, Zea Mays
ggccgcatcctctccccccgcggccgagctccacccccacccacccacacgcacacactttgccggcggcgagcaccaccaggacagcaggttacgcagatgtttctttttagagttattgcatctcctcagttgtagtttatctcggttgtgtatccacgagtgctgtgtacaccaattcctgtagaaaagatgggtgaacatgttttcattgttcaagaatgttgttatatgtttttaaatcatgtaagacatgttttagttttaccatggggtctcgagaacaatattgtttatttcctcattctgttttgaagccgtcggaattatgcttgtaatcattgctgaagtttttgtgaacatatattttttttcaatcgattttgctcgagccagtatcttttattgcaacaccatgaactcccatggtgctggttcgcattcacggcttttggacctcaactatccccctgctgaaggggctggtgagggggcttcacgtttcagcagtatccctgtctctcatagagagggttcaagcagcatgcctgtacaacacatccaggcttcgagtagtacaccaccggctactggtgagcctcgcattggtatgcgtagttgccccatcgatgtggaagccatcgatgatgatgccgttatctattcttcaagaccactgcctcgagcaagacagcagttgaccacgacagaaagtattactatcataatagatgatgattccgaaacaaacctagaaacagcaggcgatgctcttgacgagcatgtgaacttactgctatctctgggcatagaacgctcgcatgagcctacaagtgcaaccaacaccttccctggaataagcatggtggacacaccaaaagtaaacaccttcaaggtgcctcctgaacctgtgaaggaggttccgaaggaaccgaagctcagctgcccgatctgtatgaacgagataaccgaagcggcgtcgaccgtatgcggtcacattttctgccagccgtgcatcaaggctgccattaaggcccagaagaagtgccctacctgccggaggaagctcactccaagacagcaacaccgggtgtacctcccatcgccttagtagcccagtgcagagtcattttgctacaagttctgccgtgccgggggctgtatgttggaggcaactggggggggggggggggggagcatagaggtcctgtttggttcgttcatttagtgtcataatcagttaacagggtaatctattaccattgctttatgtttggttagactatactgtaaacgattgcagtgggatgcaataccagccaatacaaaattattgccgctgctttttgactgttagccaactccgatccgtctttttggatcccacgttgcaaccaaacatagactggtaaccgttcacagcaaaggatagcaggtgcaataagttccattctcattaccactacctgttgccgaaccaaatagcacgtcttagtgttacgggaaaaaattgc

SEQ ID NO: 31715 - DNA, 623 bp, Zea Mays
ctgggaccaacgcatcgcctcgtcgtgttcgctgtcgtgtgggaccgccgtgtcgggtccgtccccttccgattcgggaactcgggcgggacctgatcgccgccagctcaattcggcggggatctcaggcaagttgttgcccagccagcctatatgagtctctgcgcaccactatcttcgccataccccgtgcaaccgcctcgctgcaaccgccgagatacccggcgactgcagagggccgtacgccgagcgcaacgggaggaacaacgatacactgtcgtctacaggcgagaaggaccaccctccgtgctcggtgtgcgtgctgggtaatccccggagtgccctgagcgcggatgtcaccgattgtggtggaaagcgggactgggtcgggtggaattcctcgacggagttgtcttcaccgccaagccgcccctcacgccgaccagatccctgcatccccctccaccgacgggcaagtgactgaggactcagaagctcagcaggtggaaactattgagcaggagctcgttgaaggcaagttgtgcccttgatcacttctatttacccaataatgttcccgttaatcattatgatctgcataggttaattttgatgggacccaa

SEQ ID NO: 31716 - DNA, 2679 bp, Zea Mays
cgcatccgcgccgcaacccgcagccgccctgcaggcaaccgcccgcatccgcggcagcgccgcggctgcttccatccatggcgccgcggcttccatcaatcgccagcgcgtcctccgtactcctgtcatccgaggaaagccttccatccatggcgccgttgctgcaattccccccgcgatccacgctacctccattgcccacacgatccgcgctccctccattgctaccgcgatgccccttcccaggaacccttccatccatggcgtcgttgctgcaggtgccccgcaatcaactccattgccgccacgatccccttccaccgacgacactcaccttccatcgacaaaactgatcttcctccattccaccgacggcactcacctctcagatcccgtgctcatcaccatcgtgcccctcgctcgccgcccccacctcaccaagagccttagccgtccctagagaagacacggaggtgcagtgccagtgctttcctcaagtgcacctcggattttcggtaccggccagattgggacgaattcaacattcatcggctccaccaaaacactgccactatgatgtgtatgcttgcgtcaggacaggagacccaaaagtacttcatagatgaatgtgacattttccacaagaacgagatacgaaatggccaaggactgctgacgatgatgacgacatggccaccatcgctgccctcaggctgacattctggctctccaacacagttgtcctcagggagataattgtacaaacttttggcatctcacatcaatttactccatccatgatgaatctgagcatgaatggtggtgccaaaaaacttgatgggaaatctatgacaatgctgtggagaaacagctacaatggcatgcaagccaagtttgctgcaaggcagatgccagatgattggcaggaaacaagtacacttttggctacattagagaagattgagtcttggatattttctcgcattgttgagacaatatggtggcaggtaaatgtctgtcttaggcactaactcctcacatgcaaaaacgagtagaaggatcatcaactccaaaggctggtagagtgctatgtcctactttgggtgatcagcagtagggcaccttttctgttaacctgtggaaggctgcgtttcacgacgcattcaacagaatgtgccccctcagtgctggcggacatgagtgtggctgtttaccaatattagcaaaactggtgatggagcagtgtgtagcccgtttgaatgttgccatgtttaatgccatccttcgtgaatcatcaagtgagataccaacagactctatatctgacccaattgttgacccaaaagtcctaccaattccagttggtgatctaagctttgggtcaggcgcgcagctgaagaactctatcatgatgactttgaggacataggagatgttgaagacgaaagaagagttgcagctgaaacgaaatcgtttcaacttctcaatgagctaagtgatcatctattttttagtttttcataattttcctttcatggcctccttacatgtttgatttcctatgatccatgagctgccaatcatgataacgcggtttcactatgcaggagatgaacaaggatgcagtcacaactgatgctatcggcagtatcagaacttgatggtgcttgtagactgttcatggtgcttgtagggatgatgtatgtctatggcttactgagctccaaccaactatggcaggagcgttagctaggacagcagtcagtctaacaattgtggacaaagttcagtctaccatacactgaagcgcacccttgttgctaaaggtgtgaacaactttgctcagcagaatggaggatcattgtcactagcagcaagacctcgagcccaggcaggtatttctagctttagaattaactatgaagtgtgtgacatatcgaaccaaatactatcgcctctacattttttctaatagttcttcatcacagttaaccatcagtttctttccttctttctttgggccgagagagcaaagaaggatgatgcactttccaacctgtgtagcacgttgggacaactcaagaaatggcagtggatatggacatagaaattgacaggcaaaacaaagcgctggttcctttcagcgacgacatcactgaactgaattttagactgaaaggcgtgaatcagtgtggacaccagttgctgggcaagtgatatggagccagaattcgggcagttcggagactatcgccttgattgcagaatttaagaacattgttgttttacatgtttttttgcagtgaatcaggccacacatgttgtattagtgagagaatgatgatttattttatattattatggatttcatagattattttagttttccctgaactgcaattgtttcaataacataggaggggactaccttcaatgacatttaggtgaatttttaaggtatgtccattattccattatagagcacaaagcctacttcttacaactcactgtatgttttataattgtatcaaaagcactgaacaaacatagttagctatcacgttcactgttgtctaaatagattgaaataatgtggtgaagccgtcatggactcttaagtagcttagccactgcaaaggatacaattaattataaaacaccaatgaatcaataaaaaaa

SEQ ID NO: 31717 - DNA, 3825 bp, Zea Mays
caaaaaccccacacaagagagattttagagagagagagaaacacgccacaagagagagggggagagagagaagaagaagaaactggcagacgaaacaaacgggtagctatttcctcgtcgtcgtcctccagtcctccctccctcccactcaaaaatcgagttcccgtttagctctcccagtccacctccctcccccctctccgtcccaagtcctccccgctcgtgcgcggtggatgcgagcgatttgctttgtcgccgcatcttatcgggcttaggagcggagatgagcatggcaggcattgcgcgcggcagatcgcgatggagacagggcgacgggtcgtcgaatcggaatgcggcacactccactgttcctaaccccgatcaccaaggggttgtgtcctctaggaagcaagcaacttaccctgggatgctatctgattcggtgtttgctacagtagacaggcaaagtaaaacaagaaaagccattgctgtaccaatgaaaatactgatagaagaagaattttcaaatgatgtcaattctaggcatatttcaccaggtgctgtaggaaggctcatgggtcttgattcgttgccctcatctggaatccataataagcatagacataccaaaagtcatgcaccaaagacttcacctagtagttttcatggtcgaactggtttgcatgacattccacacaggaggagtgtagataccattaatgtttttgaaggtatggaagccacaaaaacaaatatgcaccggagtccaagatctaaaattggaagtacaacttccagatcagacaaggttgttagtgctgatatcgatttcataaggcagaaatttatggatgctaagcgtctttctattgatgaatcccttcacatatcagaagaatttaatgagacacttgatgccctggtatctaacagtgaccttttgttggattttcttcaaaattttgatcctgctgtcataagggacctacataatcatggttctccatcctctaccgcaaactgcatcacaatattgaagccatctcgaagaaatcaatttattgacatggacaatatttatccgcaagagaaaggaaccgagagcatcttcaacgagcaaatggaagggaaacattctttatggaagccatattctaatgtgcccttgcagtccctaaaagaagattcttgttcatcaaggcagaaactgtcaaggtccagtcaccaagaaaatactggaaaacgtggctcccccacccggattgttgtcttgaagccaaatcttgagaaacctcatgatattgaagaagcccttcccctacatcataaaatatcccattctgattatagaaggcataaagaatgtccggaggttgatagatggactccaaatactgaagattacatgtgtcaggtgccccttggagattctgaaacattaagtcgtatggggaagggatctagagaaattgctagggagatcaccaaacagatgagagctgctaggggtggaagtaggaaacattctgtcaaaccggagactagaactcttgcttcagatgaaaggtcacagtttcagtcatctgttactagacccaagactccagagtcaattcatagatattctgagtcatgtgatgcttgggcttcttcaagtctcaactctttgccaacatattcgactgaaacatcagaaagcaaggaagcaaagaaacacctctctaacagatggaagaagacccgtcagtgtcagcatcaagaaactgataatgacagcttcaacacgcttggggatatgcttgctctctctgatcagaatgcatcaaatgttgctacccataaaatgacatgcaggaaatgtccaaagtcagaagtgcagagtgatagaatacaaagctcatatcctcttggcatcagcaccaatgatggttggaaagacacaactactagtaaattgacaaggtccaagtctcttccaccatccttcattcgtggagttcaaaagtcaaacaatagaaaaagaagcggcagcgttacatacaatgagttttcaatgcttaaagatgttcttaaggttggaccccactattctgaatatgcatatcgtagcaggcaaagacgatctctaagtagagattctacaattcatggtgatgaatctgatccgatgtccacagataatgaagaaaatatggtagttgaacgtgagatacatgtaaattatgaggaaccaattaatggtactgctgtgacatatacatctgggcagtcacaacatcctacaaatcttgaccatgaactagatgcaataggtgtactagataccagttctgcagtccctttcagtaataaaaagtctctttctcctgctgaacaggaccagcaagtgcttaagatgaccacaacagcactagataactgctttcttgtgcctaatctcgatgatctgatgcctaagcatgagcaaattgaataccatcaagctgatgattacccagccacttatgatcctcatatagcatcagattctcctgaggagaataatcatcacctaggggatgtcagtgaaaccctttgtattctacctgatgtattagaatcgccagcgaactccaacaaagatgaccagcaaagtccaatgtctgttcttgaatcttccatggacggagaagatgtttactctggggattttgagaagatcagtgcagatctccaagattgcaacttgggcttctgaagagggagactacagacactagagatggcagcgagctttctatattgagtgatgatgagacagcacgtcgatcacttcctgagactggggaatcccatgcttttaggaatacggaagaaagggacttctcctacgtgtttgatatgcttgctgctctgggcatccacgcggccaacgaggatgacctccttgacaactgctacttactggagtgctctgcaggccttgatttatacgatgacctcgaacagaagtacgacagcctcattttatggcctgtgcatgagaggaagctcttgtttgatatcacgaatgctgttcttggggacatgatcacctccgtgatgaacggctgctcgaagggactgatggcgaggtgctcgcctggatggaatcgggaagagtttgctgagctcgtgtggcaaagggtggtgcagctccggcaagagatagagttcaaccaggaagccctgctgttgagcgtagagtgggctggctctgaagatggcgccagtctggtcgggcgcgatatcgggaatatgttgcaagatgatctcgtacaggaaattatagctgactttctgggggcaactaaatccgccaagctccgtggctagaattgccagtgtttgcatccgaggccattgcaagcatatgcatatggattggtcgctggtgaactctagtggacgatgagccttcgatgaattgcttaaggaggggactgtaattcaaggaattcacctcatggctactgaagacatgagctaagatggcttaggtgatggtggggcatcaaacaagcagtgtcgaagtttgacctagttgtgtcatgctcgtcagctcatcaccattggccccgaactcagcaatagcgtacaactggatgatttcccccctctgaactttgaaaatattttttttcattaggttatcataatgctggaatatagatgcacaattttggtgtaaaataatctctggcggattttagtttgtttatcatgggatgcaataaggacagtgtcagttgagacatctttatctgccagttttagttagtccttttgacggtgtgctgagtggcg

SEQ ID NO: 31718 - DNA, 949 bp, Zea Mays
gctgatgtgataatttaatacattcttcaagcattgtttactgtactctttctttctttctttcttttgtttcactgctatgtgataatagaatggcagatgatggataatcttatcctacacactgaatctaatgtgttgaccaatactccgcttattgtctgatgccatcaattaacaagatctctgttcattgcttcttgggcatttgaaggaactttgtggactaaaagggagcaaattgagaatgctagggaaaccgtgaaggactttggctctgcgtttggtgtgccacataaccacacgggcgcaagggaaggaagcttgagaaggcaagggggaggaggaaaacctctgcttccacctcggaagagaagcaacgaaacaacgaagagatgaaagagaatagcatcaaagaggggtgactgggctgtggcaccgaggtaacacggctcggcgtcatagatcttggcgttgaggtgcgtccttcgctggcaacaacagactgacgtggcgtcgacgtggccgagctcaagtcatgattcatggcactgaggtccagtcaaaatcggcacctgggcatgcatgttacgacgttacgtatgtagcgagcatgcatttggacttttggagcctcgtcgttttcgtactctagccatgcacctactaatgttgtctttgttgcttcaaccccaaccggtatggatgatggatcgcttcctcagctccctctttttttttcctttttttacagcagctagctagcaaggccctttttgaagcaccatgatcattcagccggggacgccgcagatgctcacttgtaacctacacatggcgccaatgcaaggtagcagcaagtaaaaaaaggcccgagagtaggagcgagtggtggtagtaaaaagctagctggaccgagccgaggagacgtacgaaaactgaccgccca

SEQ ID NO: 31719 - DNA, 1066 bp, Zea Mays
atcccaaggtcatttcggttaatctccacacgcatcgcggacacggagacttgccttccttttggtgcggaaaaagaaagagaggagaagcgaaggaggttctcagttggagcggctccctctccccgcgcgcgccaccgcctccgatccgagcagccgcctacagtcaacccattcaacctcaaatgttccttgtgaggtatcatgacagaacagcaggaaggtgttagcaagagctcttcctcaagtattagcagcagcactcaggagagtgaggaggaactgaccatcggtacccttataaccgaagcaacaaacacaacaaacagtgccaagagtcttggaaagcgcctttcacacttagattcgatcccgcacactccacgtgttaatgggaaaattccagattttaataatgcgacaattgatcatgaatcattattagaaagattaggcacttatggcttagctgaatatcaaatagaaggagatgggaattgccagtttcgagctctggcagaccagatattccgcaatcctgactatcacaaacatgtgaggaaggcggtagtgaagcagctgaaggagttcaggaaacactatgaaggttatgtgccaatggaatataaggtttacttgaagaaaatgaaaaggtctggggaatggggtgatcatgtgaccttacaggcagctgcagacaggagctttggctaagtttctggtgtgaagtacactacaattcattgtatgcagttgaagatcttccaacacggaaaactaagaagaagcattggctgttctagctcgccaggctttggtgatttcttggtatgctattggtcttctctttgtagtccagcagcatctgtaagcctgcttagttatgcctttgtttgttgtaagttgtaacttgacctggaatcaaattcatttaagatcatgcaaaatacagtgagctcttgcttcgtccttggctgaaatatttccagcacatagtaaacatgttttcagggacctattttttattttttttggggggggggggggggggtattttgcttcgtag

SEQ ID NO: 31720 - DNA, 3093 bp, Zea Mays
attttggattctgtgccaaaagaggggttaaaggaacgaattctgattcccgtggaccgacaaggagcagctgggaaacggagcgccacaagcccacaactctcgcgcaggcttctctcccatctccgcccttcccgaagcagcacggtgcaggccgcggacccgcggtttctccacagaatcccgctccacgcacgtcgcccccgtcgccggcgaggcggctgtgctgctgcgtactcccctggttccaactctgaaccggccaccctctcctgctccgcgacctcgagtaactttttgagtaccagtgatgcaaagggacacaagctctagcgatgtttctgcttctcatgtaggacgtgtaagacgtcgcaaacatccaactgaggctaccacagatgggaatagagctaatggacagccattgcttgtcaatgatcagaacaaatataaatcaatgcttacccgtacgtattctacagtatggatgattggaggctttgcctttattatttatatgggtcatctatatatctgggctatggtggttgtgattcaaatatacatggcaagagaacttttcaatttactcagaaaatccagtgaagagaaacaactgccagggttcagggtcctgaattggcacttctttttcacggcaatgctgtacacttatgggcgctttcttagtcgtcagctggtgaatacagtgacttcagatcacttgctttataaggtcgtcagtggcctaattaagtatcagatgtttatctgctatttcctttatattgcagggtttgtatggtttattttgactctcaagaaaaagacatacaagtatcagttcaaacagtatgcctggacacacatgatacttttaacagtttttgcacagtctgctttcactgtggcaaacatatttgaagggatattctggtttcttttgcctgcttcacttattgtgatcaacgatatttttgcttatttatttgggttctttcttgggagaacaccattaatcaagttgtctccaaagaaaacttgggaaggttttattggtgcatcagtgacaactatcatctctgcgtttctgttagcaaatgtaatgggccattcgcaatggttgacatgcccaagaaaggatctgttgactgggtggctttattgtgatcctggtccaatgtttaagccagagcattactcattgggagagtgggtgccgcattggataacagcaagggaaagcagccaactcacaaggcagtatattctgcagcacaacaaggtcttgatctacacactgctcttctggacattcgtacgtaatcccgaagcctctccaaaaagctgaagaatatccaaaataatattgatatccatggctgccgctcgaaggaagatcacatcatcagcatagagttgagacctggtgctgcagtgcacgtggagcaaggggctgcagcagtccatcctgttcggccttattaatcaagaagcccaaagtatccaattatcgatgaccaagatgaacagaaaaggagacaaaggatctctctgtcggaggccacgacgatgaagaatagactgtcataggcaaactgatgtggtacattaaatataaaaaaatgtgatatatatatatatatatatatatatatatatatcacatttttttatatttaatgtaccacatcatcattggttttgcattatctttctagagtttctagatgtttgattttgtactctgtttgaatacatcgtttcttaacagttcccatggaaagaactagctattatgcctgtgcagtggcatgctttagccctaggtttatttgcatcaataatagcaccatttggaggattttttgcgagtggcttcaagagggcttttaaaattaaggattttggtgacagcatacctgggcatggtggaattactgacagaatggattgtcaaatggttatggcagtgtttgcatacatataccaccaatcattcattgcacctcagaacttctctgttgagataatcttggatcagattataagaaacctaacctatgaggagcaaaaatatgtatatgaacaacttggggaaatgttccgtgagaggcaattggctcattggctgaaagctgagagttagcgtgcttatgaaatgcatgatatgttgtgcatttagttcatgtatggcagcatgccagcatgttatgaatgtatacggagcccttgcccaaaccattgtatagaatggtagaatggagagaatgaatgggttgtaggtgctttattcactctctagtctccactgacgctgcctataattcactccccctgtcatcgtttctgcagtctgtgtaaaagggaacctggaaagttttattctttccacttcgtggtgctgggctcagatcaaatattcgaggattcacaatatatccccgatgttttaccacttcatgaaaattcaactaccccaactagccctatttacatctagacaacttcaagctaaatacatcctatcagttccttggatatggatccttattggataacagatagacgacatgtgtcatctagagagagacaatcactacaagcatggtaaaaccaacatttgaagcaatcattacaaggaaaatactcactttaactaacaatttgaagcaatcactgcaggaaaataatcgctttagtccaaacaatccatgcttgaccgatgaagatgatggagatgactgagaggtactcatgctaaataatacaaaatgtacttgcattcactatccaaggtaccgaaggatcgaaaaggctaccaaagccaattaaattctgttgttcaaaactgaaatttgagcagttagcttcaatggagatgaagaagtcgctcaaaacaaaagcacattaatcaactagtgatttcatgtttcaaaaatattcctagaatcacatgataccaacaaaatgaacgggtcacaaattggacgctgaaaagtctgaatcggcccaaaaccgtgtcgttatctagtgttgttttcaacggctcaaaatgcagttttcaaatgtcaaactgattcaaacggactc

SEQ ID NO: 31721 - DNA, 2838 bp, Zea Mays
cgccctcatcctgttttgcttgcccgcatccccgtcagtcattttggtgaaaaccgaaaagcgcctcccctcctgctctgctcctgcctctctcgtcactcgtcattgcggccgggcactgggccactggcatcgtaacaactgccgatacgcccgagacagcgcgggcggagccagcgagagggaaggccatgaggtcgcagctcaacgcgtccttctcgccgccgccctcgctccggcgagctctcccctctgccacgccccgcgccctcaggttccacgcgttcccgtggcggttccgcgctcctcagcaccacggccgcggcgctggagctcgctgcgctaccaatctgcccgcgcccggcagccatggagtcggagtgctcgcctccgagaggagggccgacgatggcgacactaccgtgaaaaatgcagatgcgcctagcacttcaacggcgacgcagggaaacctcaacatggctgccattgttagcatagcattctgctttctacacagaattgtttctggacggatgcagtcgatgatgaatttgttcccttggatgtcaaacggcattgcaagcttgccatttgcttgcatatctgatcctaccagaaaacccatgcctcttaagctagatttgactcttccaccactgcctgatttcggatggaatttttcgcgactgtactatcggttcaattctcagcttgatcggaacattgccttgtctatcattaccttgctcatcacttgcttttcatttgtcattgttggaggattactgtttcataagttcaggaagcaacaacaatccctggaggactgcttttgggaagcttgggcatgtctatgttcatcatctacccatctaaggcaaaagacacgtgttgagcgtgtcattgggttctttcttgctatctggggtatattattctattctcgattattaagtgcaatgacagaacaatttagaaaccagatgcataaagtaagggaaggggcacaggtgcaggttattgaggatgatcatatcattatttgtggagtcaatagtcatctgatgtctatattgaaccaattgaataagtaccatgaatcatcaattcgcttaggtttagctacagcaaggaagcagaaaatccttcttctctccgatcttccaaggaagcagattgataaacttgcagatagcttggccaaagatttaaaccatattgatgtattcaccaagagttgtagtcttagcatgtcaacgtcatttgagagagcagcagcacacaaagcaaaatctataattatcttgccagcacagcatgaacgatatgaagtggatacagatgcatttgtctctctattggctctacaaccctgtaaacaaattgcacctgttcctatcattgtcgaggcttccaatgcaaccacttgtgaacttctgaaatcaatcactggcttaaatgtgcaacctgtggagatggttgcttctaagttatttgtgcagtgctctaggcaaaaggaccttctgaaaatctacaagcacttgcttaatcagcacaaaaatgttttcaaccttttcaggcggcctgaattagagggcatgaagtatatggatgtgagacgtaaaatccatgattcgtttgtggtatcttccggtctggaaaaattcattttcacccaagcgaggaagaactactgaaagaaacagacaaattgcttcttattgctcctgttcgtgggatgaaaagaccacaatatagagcattaagtgtacggaaagaaacacaaacattgagtcgtaactcagagccaagagagggtcaaggatcatttaatatggctactaccatggataatgaaacacggctaaataacattgtaaagcgccccttgaaatctctttctaagagcagtgattatatgcttggacccaaggaatgtgtacttattgttggttggcggccaaaagttaccgaaatgatacgggagtacgataattaccttggacctggtagtacagtggaaatcttgtcggaaacccctattaaagagaggagcagtatcatcaacccccttttgcagagccagcttaaaaatgttaaagttactcaccgggtggggtgtcctttgaactacgatactctgaaggaaacaataattaacgtacgagaatctgccaagtcagataaagaggttccactgtcaatagttgtgatatctgacagagactggtttgttggagcagatgctgcacaggctgataaacagttggcatacacccttcttcttgctgaaaacatttgccagaaacatggcgttatggttgagaatcttgtatcagaaatcgttgacatgggactaggaaaacaaatatctaaaataagaccatccctttcatttattggagcagaggaaataatgagtcgtgtgacagcacaagttgcggaaagtagtgagctgaatgaagtatggaaggatatcctgaacgctgaaggcgatgagatctatattaaggaaattgggctgtacatgaaggaaggagagaaaatatcattcttggagctctctgaaagagcagttttacgccgtgaagttgcgattggttacatcaaggacggcaagcagcatattaatcctatcaacaaatcggagccgctgtcccttgaaatgaatgattcgctcattgtgatatcggagtttgaagtcctgagctagacaaaatcagctaggtatggccttgctgttctctttgggagataaattcgtcgcctctagcatttggcacaagaaaagtttgttttacactttgcttcattaaccaagccactgcttcagccttt

SEQ ID NO: 31722 - DNA, 1265 bp, Zea Mays
acctgcaagttgtcttactccttataggttgccatgtatcaagatcctcgggatgcctgctcagcaatcgctgctgagtcatacaaactatggcttgagcatgaaaacaggacagatgatataacaataatcattgtgcatattcgagacatggaaaatgcagggagtgacaaagcggactatggtagcatcggagcatcaatagctgggcagacaatacagtcagagatacctgtatttgtacaaccagaagcaagtaacatgaacagatctgctgctaccggaatgcgatcaccgtcttttggctctccaactgaacggagcctctcatgtgttgctccttctcctacggatcctttgttgatacatggcagagtatcagatgcttccaagcctgggcaaagtgagcagcgagctgcatcacaaccaccggtacaaacttggcatcaaatagacggggttactactgagctggagcggtctatgcagcaaagcatccttccaacctcctgctgaaagtagagaatgcgagttgaatgacaaaaagaggcctcgagataacccaccgccatcttggagctactaaccgtaccatggatgcgatgtttgccagcagcaaatctcgtgctgttgctcgtgttttggtagagcacctgctgctgccgacgatgcgaggttcctgatcctgtgtgggatcatctaaccatgggctgagtggaattgagttattctccgtttcatttgtactttgtttacttttcacaagatatagattaattctaagttgatgcctgtcgaggtatcagtatcatttgagacgcaactgtgcattgtcgtccttccacagaattaggatctggaattgaaatgcgagtgccgtacagaacagatcagctgggtggcttttcagatgcaaagaagaatattggatttagcctgtaagctgacctgagagctctgtcaaccctttaaaagtgtgctacgcatatacgataccgtcagcgagctctgccaagaaacaaaggggcctgtttggttcagcttttttctaaccagtttttctgaaaatctggttgtggggagaatctggctgtggggagaatctgagtatcattactattacgtgtgaagtaagataaatttgtttatagtgctcatgatctagaaagtgacgaattcctactattacaacgactctaccgattatgtgtttatgttgattttggatgattttttgtcccaacgaattttatagaagctggctg

SEQ ID NO: 31723 - DNA, 341 bp, Zea Mays
acattcatgggttactagtcatatgttgagtgcaaccacaatcaattacccaatgtctcgcatcggtcttgtagttcacctacatgtcaaaggggatcaagcttgaatcttaggcaccctatcttgcagggggtcatgactttatcaaccaaggactttgcaacccaaatatatttaggcctactcttgttacgtggacctagaaatgtgactttgaccttcccacttgtaacttttctaagtatgtagtgagcattgaatgtgaaaggtcttgagtgcttggacaagggagttggtgctatggcgttgcagttgtgagcaaagtgtccttttcaacactc

SEQ ID NO: 31724 - DNA, 2631 bp, Zea Mays
acacaatacgcacacttcgcaaagcgtcttcctccgaccccatcgcctctgtggcttcctggctgtctgactgcgtctgcctggtcgtacgcgagcgcgtgcgtcccttcaccgtcacgagcggcgcacaccgtcaccgccacgctccgtcgccttccagaaaatctaaaccccagcggagccggccacggccagtcagccctcacacggactccgacgcgctgcccgctcgcctgccaaacccccaccccctcgccggcgatgctgccgcgtcggtttagcaaccacccgggctcctcctcacccctcccgttcctcgtcgtctgcggcctgctcctcgctgcggccgtagcattttccccggtcgctgccgccgaggccgctggccgcggcggcggcggcggcggcggcggcgctgggcacgagggccgcgcggggaagccggaggtcgaggcggaggcggaggcgcgcggggatggggtggccgtggcggaggccggcggcgaggtggtggctcagggcaatgccacggaggccaaggagggcagcctcgccgacatgatcgaccgcgcgctggagaaggagttcccggagtccgagagcgagcagggcggcggagagaccgatcctggtagcttcaacaacacggtagctgagaagcagggagttcttgaaactgtagctagaagagtaacaaagaagaatgaaaccaaagataacaagtcatttccttttaaggaggtcttcttggatcgatctgagcaagaagatgttcccacattgattgatcggaaggacaatgtttttatcatatcaaacccaaagtcaaaataccctgtgctgcagctggaccttagattgatatcagatcttgttgttgttatcgtgtctgctacatgtggtggaatcgcttttgcttgccttgggcaacctgtgattacaggttatctacttgcaggatctataattgggcctggaggttttagctttgtcaatgaaatggtgcaagttgaaacggtagcccagtttggtgtgatatttctcctgtttgcattgggacttgagttttctactgcaaaacttcgagttgttcgtgctgttgctgttctcggaggaatgctccaaattatgctgttcatgtttctttgtggtattttggctacactatgtggaggcaaaacaaaagaaggtgtttttgttggtgtgcttctctccatgtcttcaacagctgtggttttaaagtttctgatggaaagaaatagtatcaatgctcttcatggccaagttacagttgggacacttatattgcaggattgtgctgttggtctgctgtttgcgcttcttccaattttgagtggtacatctggccttcttcacggagttgcatcaatgacgaagtcgttggtggtattgataacgttcctgaccattctctctatcctctcccgcacgggcgttccttggtttcttaaactgatgataagtctgtcatcacagacaaatgaactataccagctggcagcggttgcgttctgcttgttatttgcttggtgtagtgataagctgggcctgagtctcgagttgggttcatttgcagctggagtaatgatatcaacaacagaccttgcgcaacatactcttgaacaacattgggatgctaattaatgtccatttcttgtggaaccatgtggatatactccttgcagcggtaattttggtgatcaccgtaaagacatttattgttgctattgtcgtaaaagggtttgggtatagcaacaaaacatctcttcttgtcggcatgtctcttgcacaaataggagagtttgcttttgttctcctaagccgtgcttcaagtatccatctcatcgagggcaagctatacctgcttcttcttggaaccactgcactcagtttggtgacaacccctctgctattcaaaatgatcccagcagtggtccacctcggggttcttttgagatggttttctgtcgataccaatcaggtggagctgggcctaaaaaatgatgtcctccgcattgatagcggcaagcgcataaatctgatagtccaaggctcacatgactcatgacacatggcacactgcaagctacttttttgtatggcttgagtttacaagctctgtaaagtgttttcacctgtattgaagagtttgtagcagatatacaagggtggaggcaagagaactcaactcagatcttgctcatagggtgagatcaatcctcccccatcatggagactgcatgggcagttgggtttgccgtttttgagagcagtgtgtctaggatgattggtggagtgagtggctgtcgaccccaaatgagggtctcgtgtaacataagaatgtatgatggttaattgattggatcagcatgataggatctaggcgtgatcgttatgccattgtatcctttcagcaaaactgtgtatcctcgcaacacgaaagtgtgtacaacagtatccatcagatcacgaatttcgttatgtaaccatatactcgtcctagttcatgattttttttcacgcgaggcttctagtaacctgtctatatatcactttgttggattcaggctcacaatgatgggtgtgcctcaacgaattgattgaatccat

SEQ ID NO: 31725 - DNA, 7827 bp, Zea Mays
  misc_feature (7826)..(7827): n is a, c, g, or t
atggcgcccatcaacagcggcaacatggagcagcactcgcagcggctcctcgagcccgacctccctgtgcaagtccgactgcagcttgccatggaagttcgggacagcctggagatgacgcacactccagactacctcaactttcttcgctgctatttcagagccttctcagcaattctcaccgcttacaccaagccacaggccacagagaatgctgagcacaagctacggaatgttgtgatcgagatactcaaccgccttccacacagcgaggtgctcagaccatttgtgcaggatctgctcaagctttctctccgtgtgttgacacaggacaacgaggacaatgctctccttgccatccgaattgtgtttgacctcctccgtaacttccgccctactgtcgaggcggaggtgcagccatttcttgactttgtggttaacatataccataaatttcccacaaccgttagctacttcttcgataatcccaacacaagtgccagtatggctgcctccatgcccatgcagcatttggaccccactgccgatgcctcagtcatgatgcaagtgcctggtggtggtcaactcaacccaagcgcacgttccttcaagatagtcacagagagccctcttgttgtgatgtttctcttccagttgtatgcaaagcttgtgcagacaaatatcccgcacttgttgccactcatggtggcggccatctctatcaagggtcccgacaaggtgccgccacaccttaagacacccttcaacgatttaaagggtgcacaggtcaagaccttgtcatttctgacgtacctcctgaagagcaatgcagattacataaagtcatatgaggaaagcatatgcaagagcattgtgaacttgcttgttacgtgtcctcctgattctgtctccatcagaaaggagctattggttggtctgaaacaagttctcaacaccgagtacaagcgagggctgttccccttgattgacacacttcttgatgaaagggttctgattggcacaggtcgagtttgcatcgaaactttaagacctcttgcttacacccttcttgctgaattggtgcattatgttcgagaagatatttctcttccacaggttgagcccatatatcaaaaaggtgttgaccagcaaagcatggacgaagcacgagttttattggggcgcatattggatgcattcgttgggaagtttaggaccctgaagcgaacaatccctcagttgcttgaagaaggtgaggaagggaaggaacaaccgaatctgagaatgaagcttgaagtcccattacagactgtgctgaatttgcagcaacctttggagtatactaaggaaatcaacgattacaaaagtctgataaagactcttgctgtcggaatgaagacaataatatggagcataacccatgctcactggccacgcccccagcaacaaaatcaacagtcttccaatttgtcacttcaacacttcagggggctgagggaggatgaggtgcggaagacatctggtgttctgaagtctggcgttcactgtctggctctttttaaggaaaaagacgatgatagggaaattctgcaatcattttcgcagatgctggctataatggaagctcgtgatattatggatatgttctccttttgcatgtctgacctctttgattctatgataaccaacaaccagctattgcacatattttcaacccttttgcaagctcccaaggttctgcggcctttcacagatgtattaattaatttccttgttagctcaaagcttgaagccctgaagcagccagattcacctgctgcaaagcttgttttgcaacttttccggttcttgttcattgctgcagctaaagctccagaaagctgtgaacgcacacttcagccacacgtgccggttataatggaagtctgcatgaggagtgccactgaagttgagaaacccctaggttacatgcaccttcttcgaaacatgtttcgtgcattgaacagtgctaaatttgattcattgatgcgtgatcttataccatctctgcaaccctgcctcaatatgttactctccatgcttgatgaagtcattcttgctttatggtctcatttaaggcctcctccatacacatggggcacaaagtctttggaacttttagggaagctggggggacgaaataggcgatttttgcgggagcctcttgcacttgaatccaaggaaaatccggagcatggattacgtttagttctgacttttgagcctgcgacaccttttttggttcctctggacagatgcatacaccaagctgttggtgcagttatgcaaggcaatggcttggaagcattctacaggaagaaggctcttcaattcattcgggtgtgcctcgattctttgttaaatctgagggaaaatgtacctggcgagggtgtgagccctggtgttctcggtacattgctaatctctaacctggatccctcaagacgtcggaatgatgcttcagatatgaagggagatttaggtgtgaagacaaaaacacaactactggctgaaaaatctgttttcaagactcttcttgtagctatcattgcagctaatgctgacaccagtcttcatgatgagaaggatgattatgttgtcgatatatgccggcattttgctatgcttttccatgttgactcaccatcctccagccaatctggatttatgcatcctattggttcttcactcccatctatcatcatgggatcaagatcaagatgcaacacttcatctaatctccgggagctggaccctttaatatttttggatgctttagttgaagtgctatccagcgaaaatcgtcaacatgcaaaagctgccctatctgctttgaatatttttgccgagacattaatctttcttgcacggatgaaacacactggtatgctaaggggaggtcctagcacccccatgctagtctctagtccatctttaaatccagtatattcacctcccccaagtgtgcgggttgctgtatttgaggaattgttacctcggttattgcattgttgctacagtagcacatggcaagctcagatgggtggtgtaatgggtctcggggcattggtcggtaaagtgtctgtggataccctatgcatttttcaggtcagagtcgtgcgtggtcttctttttgttcttaagaggttaccagtgcatgcaaacaaagagcaggaggagacaaatcatgtcctaacacaagtacttagagtagtaaacaacgcagatgaagcaaacagtgaacctcgacggcaaagttttcagggagttgttgaattccttgcacaggagttgtttaacccaaacgcttcaatggttgtgagaaagaacgtgcaggcttgcttatcactgcttgcaagcagaactggcagtgaggtttctgaattgcttgagcctctctatttgccattgcttcagcctctgatttcacgacctcttcgttcgaagaatattgagcaacaggtgggcaccgttactgctttgaacttctgtcttgcactcagaccaccccttctaaaactatctcctgaacttgtcaattttttgcaagaagcactacaaattgccgaggctgatgaaactatatgggtcactaggatgatgaatgcgaaagtagttctcacatggaacaaactcagaaccgcatgcattgaactactctgtactgcaatggcatggggagatctaaaagctcaaaatcatactgaattgcgagcaaagattatttcaatgtttttcaaatctctaacatgcagaacaacagagattgtcaatgttgctaaggagggacttcgtcaggtggttcaacagcaaaggatgccaaaggatcttctacagagcagcttaaggcccattctagtaaacttagcaaacacaaagagccttagcatgccattgctacaaggattggctcgcctgcttgaattactgtcaaattggtttaatgtcactttgggtgccaagctattggatcacttgaaaaaatggctggagccagaaaagcttgtccagactcaaaaatcttggaaggctggagatgaaccaaaaatagcagcagctatgatcgagctgtttcaccttcttcccccggcagcaagcaaattcttggatgaccttgttaccttggtaattgatctggaaagggcacttcctgaagatcagttttacagtgagatcaacagtccataccgtgctccactggcaaaatttttgaatcgttatgttctggaggctgttgactattttcttgctcgattaagccatccaaagtatttcaggaggtttatgtacataatctgctcggatactggggacctaagggatgcacttgcaaggtcacctcagaaaatacttgcaagtgccttttctcagttttactctcaaagtgaagcatctgctgctcaattatcttctgtaaaggatgaagcccttactggggctgtatctgagagtattactgtacaatcttcatcaaacatggttactacttctgagagttactttaatggattagagcttgtctcagcccttgtgaaattgatgccagagtggctccgtaacaaccgggttgtctttgacaccttgctacttgcttggaaatcacctgcaagacttgcgaggttgcagaacgagcaggatttgagtttaccccaggtgatggaaagcaagaggctgatcaaatgcttcctgaattacttaagacacgatcgaactgaagttggtgcactctttgatatgttatcagtattcttgtaccgcagtcgtatagattatagctttcttaaggaattttatgtcatagaggttgctgaaggatactccccgaatttgaagaaaactatccttaatcattttctgaacattttccagtcaaaacaatatggacaagatcatttagttgttaccatgcagattcttatacttccaatgctagctcattcatttcaaaatggacaaagttgggaagttgttgatcctactataattaaaactattgttgagaagcttcttgatcctccagaagaggtcagcgctgaatacgacgaaccattgaggatagaacttcttcagctagctacattacttttgaagtatctacagactgatcttgttcaccatcgaaaggaactcataaagtttggttggaatcatctcaagcgtgaagataactcgagcaaacagtgggcctttgtgaatgtttgtcatttcttagaggcctatcaagctcctgaaaagattattttacagctgaagcttattgttcgccatgcggacctcttctatagttgcagagcccactttgttcctcagatggtcaactctcttagtcgccttggattaccatacaacacaacagcggaaaatagaaggcttgcaattgaacttgctgggttggtagtggcatgggaaagacagagacaaagtgagatgaaagtggcgcaggaaagtgagagccagaatcaattaggtgacatgcttaatccttctgttattggtggtgatccaaaacgctcctctgatgttccgtcgtttgctgatgatttgagtaagagagtgaaagttgagcctggtttgcaacctctttgtgtaatgtcgccgggtggggcatctatacctaatattgaaacacctggatcttcaggtctacctgatgaggagtataaacctaatgcagcaatggaggagatgatcattaccttcctaattagggtatcacttgtgattgagcctaaggataaggaatctagctcaatgtacaagcaagctcttgatctactgactcaagctctggaagtctggccaaatgccaatgttaaattcaattatctggagaaattacttgggaatctgtcacccactcctcagtccaaggaccctgcatcagccctcgcacaaggacttgatgttatgaacaaagtcttggagaaacaaccccgtctcttcatccgaaataacatcaatcatatttctcaaatactggaaccttgctttggcaacaaaatgctggatgctggaaagtcactttgttccttgctcaagatggtgttcagtgcttttcctcttgaagcagcaacaacgccacaagatataaagttgttgcatcaaagggttcaagaactcattcacaagaatcttgctgctgttacaactcagcagatagcacttgagctcaacaatgctcactcaatcattagcttttcattgtttgtcctcaatgcacttgcagaagtacagaagaatttcattgacccgttcattggcttgcttttccgtgttctgcaacgtcttgcacgtgacatggggtcttctgctggcagccatatccgacaaggacagaggcctgaactggattcatcagttaactcacggtctaccatagattctactgtcatatctaacatgaagactgtcttaaaacttataagtgagagggtgatgtcctcttctgaccacagaaaatctatgggccaaatacttcaagctcttctttcagagaaaggcactgattccagcattcttctgtgcatgctagacatgataaaaacttggattgaggaagattgtaggcttgcttcatcaactggttctgttagttcacttaacccaaaggaaataataacttatcttcataagttatcattagttgacagaaaaagctttcctccagctgcacaagaagaatgggatgcaaaatacttgcagcttctttattcactgtgtgcagattcaaccaagtatccgttgtcttttcggcaagaatttttccataagattgagagacagtatatgcttggacttagagctaaagatccagaaatgaggaagcgattcttcaagctttaccatgatacagtgggaaaaacattattttctagattgcaatttataatacagttacaggactgggaagctgtgagtgatgttttctggttgaagcaaggtcttgatctcgttttggcaatattagtagaaaatgaaccaattacacttgcagcaaattctgctcgagtaccaacgcttatgatagctgggcctgttccagatcgcatcaccatgccacagcaggttcctgatgctcaggaaagcatggatggtacaacactatcgtttgactctcttgctgcaaggcatgctcagttcttaaatgacgcgaacaagcttgtggtggcagatatcatggctccattgaaggaacttgcatttgctgatcccaatgttgcatatcatttgtgggtgcttgttttcccaattgtttgggtcaccttacataaagaggaacaagttgccctagctaagccaataatcgcgcttctatcgaaagattaccacaagaggcagcagggctgcagacctaacgttgctcaggcacttcttgagggtcttcatttgagccatccccaaccacgcatgcctagtgagcttatcaaatatattggaaaaacttgcaatgtgtggtatattgcaattgcattactcgagagtcatatagtgcatatgaatgaggccaagtgctccgagtcattggctgagttatacagacttcttaatgaagacgacatgaggtgtggattatggaagagaaaatcaatcactgcagaaacaagggctggtctttcacttgcccagcatggttactggcaacaagcacaaaatctattttaccaggctatgattaaagctactcagggaacatacaataataccgtcccaaaggctgaaatgtgcctttgggaggaacagtggttgtcctgtgcgtctcatttaggtcagtgggaagtcttagctgnn

SEQ ID NO: 31726 - DNA, 173 bp, Zea Mays
tttataagtaatttggaacggttgaaggcaggagtattgtcttttatgagcaacgtaacgtacagtcgtacacacaaacacctatagctcgtttagttgtagacactgaagcctagaattcggaattggaaatggctggcccaaattccagcgtttgggtgtccctagaattg

SEQ ID NO: 31727 - DNA, 2258 bp, Zea Mays
cccatcggtcgttgtctgctttctgaagaactggtgcaggtcttttcggtcctcaggcttcatccctgtgcaagtgcagggataattgcttctaatctcccgaggctgcataacctaattcagaggcagagcaagggggcgtgagggagatgagggagatcatcagcatccatatcgcgtaggcaggcatccagtgacacctctgtcgggatcgcgagggatgcgttcaacacgttcttcagtgaaacgggcgcagggaagcacgttccaagggccctgtttgtcgacttggagcccactgtgattgacgaggtgaagaccggggcgtaccgccggcttttccatcctgagcagctcatctcacacaaggaagatgctgcgaacaacttcgcccgtggacattacacaggctcaaaatgttcttggaaacaaggggactgaaattgcaaaggtagcacatcggcgaactgatgcggaggcgggcgtggaggcgctcgatgccgtccagcaatcagtagttgtcgctgcatcggcgacttctttcccccaccagcatggccgcgtgaatggttcaggtcagtttattcggattcaaccatgcatgtgatcgatctatcagagagctgaccaccttctttgcttgtcgcttggaaccatcgcaaagttctttccaaagcctacagcttctaggaaatcggatacgatcacccgaaaaaggcaagggggaaatcttcttatagatctgttccgtcattgtgacaatcatttgggagagaaacaagtaaacaacccttttttccataaaactccatctggaagtgcacgacagccactacagttgactaccgatgtaaccaagatgatgcaaaagcatcagctggaaacgccatagttgctgctactgagtaccatccttatatccttatttcctaattgttgtggtgcatgtacaagtttttttaaaacgaattccgaattggttattgctgttagaactcatctgagtgctaccttctcatatgctccttttttctctctggctgttatgttaaaggaccagatacaagtcaatcttcccttcaaattacaatttaattattttatatctggattctgcaagacacttcaaaaaaaaatataacaacatgtggtccctatgttatctactagcatgagccattgttccatgcagtttggtacatagtggcgcatattttgttacatttactttctatattcttagtatatttatagcctatatccccaaactatatcatatacttagcacacacccattgttataatccacgtgcgcatggcgcgcgcactttactagtatacaacattgttggcaacaggagctgatctctttattacacgatgtattggcttggtttctaatgtccactttcccatccctgttttcccctccttcaggacttctttagtgatcttttggtacatcgctgctgatacaaacagcctacccagactgcttttgtgaagcacactgctttctgagaagccatttgcagtgcaaggatgaaacttggtcagagtgtttaccatatggattggcagccccaaataaagctctggattgtcctattcccatgacaaggttgtgctcttctcctgcagtgaaaccaaaaaagaaggcgcgctactgttcttccgttttcatgtcaatgcaacaacagataagtggaggtggcactaccaattccttgatgtaccaggaatgtttggattgttgtattctgacattgtttggctcaacatattcaagttggagtgtcaggtctccaacaattaaacaagatacggaatctgtgtaagcaagagcattcataccttgttagcttccttctctctctctcaagatcgatctagagaccaacaagatcatggacttcttcaagtttgacgtcgataacgtggtcatggtgaccggcgggaggaacaccgggcgtgtaggagtgatcaagaactaggagaagcacaaaggcagcttcgaggtcatcgacgtgctgcttggagctttttgcatgctatgtctagttttctcctatttgttgtacaggaaaacatagaatggaattcaaatttggtggtcgcaaaagtgtggagacttgaattcatataaagttaggcttaacattagtgcaaacagttgtattttagtttagatttagagtacacttatgtatgccttgtttgacaatgcttatttatgatatattgaatggtacttattt

SEQ ID NO: 31728 - DNA, 3363 bp, Zea Mays
ccccgctgtccacctccactcgcagctcctccatttccgcgcgtccgctccaccacaacgccccgcgaacccgtccccttcaaagcggtcacctcttcctccgaccctcgctagcttcgcctcccttctcctgcgtgccctactgcccttcacctctcgtaccccccctcccccgcctttcccgcaattccggctcacatgaccgtccgggccgcggccgtgctggtggccgccgccgtgctcgttctcctcctcccgggatgggcggcggcggagtggaatctcacgaagaaaggcagcgtcgtcacctacgatgggcgctctctcatgatcgacggcaagcgggacctcttcttctccggcgccatccactaccccaggagcccgcctgaggtgtggccgaagctgatcgagcgggctaaggagggcggcctcaacacgatcgagacgtacatattctggaacgcgcacgaacctgagcctggcaagtacaattttgaaggccggttcgacttgatcaagtacctcaagatgatccaggagcatgacatgtatgcaattgtgcgcatcgggcccttcatccaggcagaatggaaccatggtggtctgccttattggcttagagagatcgaccacataatattccgggcaaacaatgatccctacaagaaagaaatggagaaattcgtgagattcatagtgcagaagttgaaggatgctgagttatttgcatctcaaggaggacccatcattctaacacagatcgagaatgaatatgggaacataaaaaaagatcatgcaacagacggtgacaagtacctcgaatgggcagctcaaatggcgctcagcacacaaacaggagttccatggataatgtgcaagcagtcttcagctcctggtgaagtgatccctacttgcaatggaaggcattgtggagatacatggacactacgcgacaaaaataagcctatgctttggactgagaattggactcaacaattcagagcatatggcgatcaagtagctatgcgttcagctgaggacattgcatatgctgtgttacggttttttgcaaagggtgggtcattggttaactactacatgtatcacggaggaacaaattttggaaggactggggcttcttatgtgctgactgggtactatgatgaagctcccatggatgaatatggtcagaccgattcagttgaccattatatttctgtattatttttatcttcatcatgtagttcctcttgacataaggagcacctcatgtagtccatgatttttcataggtatgtacaaggagcccaaatttgggcatctcagggacttgcacaatgtaataaggtcatatcagaaagcattcctcttggggaagcattcgtctgagatattgggtcatgggcacacatctttgagttgcctgaagaaaatctttgcctctctttcctttccaacaataacacgggcgaagatggaacagtaatcttccgaggggagaagcactacgtgcctagccgttcagtctccattcttgcagggtgcaagaacgtggtttacaataccaagagggtgtttgtacaacacaatgaaaggtcataccatacctcagaggtaacaagcaagaataaccaatgggagatgtactcagaaaaaatcccgaagtaccgtgatactaaagtcaggatgaaggaacccctggagcaatttaaccaaaccaaggacgctagtgattacttatggtacaccacaagctttcgcttggagtcagacgatttgccttttagaaatgacatccggcctgtgcttcaggtcaaaagtagtgcacactcaatgatgggatttgccaatgatgctttcgatgcgcacgcggaagcaagcaggtgaagggtttcatgtttgaaaaacccgttgatctgaaagtaggtgtgaaccatgttgtattgttgtcgtcaactatgggaatgaagtggtggtgaacttgctgaagtaaagagtggcattcaggagtgcctaatccagggtctgaacactgggacgttggatttacaagtcaatggctggggccataaggctgcactggaaggtgaggacaaggagatctactcagaaaaaggtgtgggcaaagttcagtggaaacctgccgagaacggccgggcagccacttggtataaggtaagttgaaccaggaatacgagcactataggttttggaaacatcaaacatccatttcaattttggttgcaaccctggcccttggtgtcactatgttcactgccatgctagagatacttcgatgagccagatggagatgatcccgttgtacttgacatgagctcaatggacaaaggaatgatttttgtgaatggtgaaggcgtgggtagatactgggtctcataccgaactcttgctggaactccttctcaagcactataccatattccgcgtcctttcttgaaatccaaggacaaccttttggttgtcttcgaggaggagatgggcaagccggatggcatcctcgtgcagacggtgacgagagacgacatatgtctgttcatctcggagcacaacccgggacagataaagacgtgggatacggatggtgacaaaatcaaactcattgcagaggatcacagcaggcggggcaccttgatgtgcccccctgagaagacaatccaagaagtcgtctttgccagcttcggcaacccagagggcatgtgcggcaacttcactgtaggcacttgccacactcccaatgcaaagcagatcgttgagaaggaatgcctcggcaagccatcctgcatgctgccggtggatcacacggtgtacggcgcggacatcaactgccaatcaacgactgctacactgggggtgcaggtgagatgcggaggcggcaagaagggtgcctgagaataacaagatggatgctgctaattaatggacgtttcagcttgtttgtttgttcatcccttcggtttggcactgatgcttacattgttctgacattgcaattgaaatgtgattggaacattcttgatcgggaactaacatgaaatgagtggagggtagatgctgatcagaccaaagatgtgtatttcccccctctttccttctgtctcgtgttgtttcatgtaaccatcacaatatatatagatgttgaataatcatgaccagtagtatagatcttagagcatccctaacttttgaataaaagactcttggagattggagctggactaactgattgcttcttgcaacatgtatatgaacatttcattaaaaaacgagcgatgagcaaaacaatataccctactaattaagatgttgcaaatgagtttaatcctacagctttgatactgc

SEQ ID NO: 31729 - DNA, 2375 bp, Zea Mays
gcgggtgtgctctctgggctgcaaaattccggactgggctacggcccgtccgccgcacggccctttctgtccacggttcaccacttcaccgccccgcaacccgcagcgttctgtctccgacgactccgccgcccccgtcgtacgccaggtgcggaggcctttgctggtctcttcgccggcgacgaacacccaccagcagctgctgtagatgtgcacattcatctccctttactgggtccgcccctggagcatatcatttgactgccgtggccacaactgcgctagttttgctttgatcatccggccttaataatccagcagatatctggtatatagattaacatattcagtacctgagatcttccttcaactagcaaagggaattgggattccactccccagtcctcatcaacagagcgaagtagtgcaatattattcaggaaagatggttgccagctgccctagtttgaccggagagatcaaatatgaagtggctagcagttatttggttggtatggtgattagtgtatatgccaagcttttacagataggcaagaattgacagtagcaaattcttgactagctccgccacctacaggaaaatctagaagaataaaagaaagtcagagatggcgatgtttcttggttgctgtcattagctgccgcttgacacctcggcgacgaaaaaggagccgtccactcactgagccttttgtccccctggacatgcaggtgagtggcatgtaaccaacctgaatgacaggaggatcattgtggtggcaacgccaggaggcagttggatattcaagatcatgacatgaaagactttgggaaggggagagggcaatctccatggatcaaggtgtctgcacatgatccaagcgcacaactgctcaaagcacacaagagatcgtgttgtgtgttgtgtttttgggccgtaccaggaccagagcgggcccctatagctatagctatagcagcaatgagctgggtcgtactctctccacgacaacactgaaccgtccgtgtgcgttcctgttgccgtactgaaatccacagagaggatagctgggctctgatccgggatttatgtcaggcccattggggaggtcatgtgactcagcaggcgatcctccggccaccgccgccaaagctctgtggctccccaggtggccctcctctgacatctcccaggatcaagctcagggacggaaggtaccttgcgtacaaagaggatggagtacagagagacaaggccaggtacaagatcatcacagtgcacgcatttgatagcaccaaggacttcccctcgcctgtttctaaggagctcgtggaaggactgggaatttacctccttgcttatgacagagctggatatggggaaagtgaccccaatcccaaccggcatgtcaagagcgaggcgctagatatcgaggagcttgccgaccagctgggccttggccacaagttctatgtgctaggggcctcaatgggaggatactcggtttggggatgcctccagtatatacctcacaggcttgcaggagctgcgctggttgtgccaattatcaactactggtggccttcgttcccagctgaattatccaagcaggccttcaacagactgattgtgccagagcagagaactctttggattgcacacaacataccttccttgctttacctgtggatgacccagaggtggttcccttcttctgcagcagccatgcaccaccctgaaatatttagcaagcatgacatggaggttcttcagaagatgatggcaatgccaagaaccattgagaacaaatcaaggcagcaaggcatttatgaatcgatccaccgtgatttacttgtcgcttttggaacttgggagttcgatccaatgaatgtcaccaatccatttcctcaaaatgagggctctgtgcacatctggcaaggacgcgaagataggttggtgcttgttgagctgcagaggtacattgccaagaagcttccgtggatcaagtatcatgaagtcccagaaggtggacacatgttcgtgatggtagatggatggacagaccgaattctcaaggcactcttgttaggagaagagcccctagatgtgtgacagtagttccattttcaaaatgtcaaaaactgcagctgccagctgttattttacttaattttattcccaatttgtacacttgtattcctacaacaccaagactagtctaattcataatccgatagactttccatcatgtcaactcattacaacagcagtgataccattgtactcatcccatacgcatatgcctttggtccaaaattgatgtcaacccagaaagcacgtagtcaaaacattcaaattggagagaggggtgttt

SEQ ID NO: 31730 - DNA, 2613 bp, Zea Mays
ggaaggcgacatcctccgccctggatcaccgcgctcggctctctccacgccgccatcaaggggttctaccaacaacggacgccatcaacggatggcctcggatccgctccatcgcctcctaccatcaacggacgaggatctccgctccaccctcctccccatgccgtcaatggaagggggctcgggtccacctccgccgcgccgggccgcaggtccacctccaacatccgctcgctcttctcccggtcgttagccgccgtcggcggggctccgtcgggctccggcgtcgccgcgctaccggacctccgccgctgcaagtccttctcttacgggcacgggggtgacgtgctggccgccgcgggcaagccacaacggtggtcgtgcgacgtgcgcgggcggagcactctctgggcgctcttccaccaggacgaccgccaaccggttcgcgacgacaccgcgttcggcgccttcccggcctcgtcctccgccgccgcggccgcgctcgcccccgcagcctccgccgctgccacctcccacgtgcgtccctgagatgttctcggaggaggagatcgctgtggccgaggactctggcgagattgtctcagtgatggagcctgtctcggtcgtgggcacctctggggagatggagacggaggtgagtgcggagcgggatgttagggccatgaaggatcacatagatctcgaggcctcgcagtcgcagcagcccaggaagctgccgtccaaggacctcaaggagatcgtcgggagcttttggcttgccacctcgacattcagcaagaaatggcagaaatggaggggcaagcagaagctcaaagcaggaggcaaggagaatcgtgggtctgatccaccgctgccccgcggggtgcagggacggcgtgtccgacgccgccgaccgcgcgttctcggagccatggccggacctgcgcgtccgcgggtacaacggcaggatgaagtggtccttctgtctcacatggttctcagcaattgttgccctctaaccagcagcttgatgacggttctaatgctcctgtcacatatgtgctgaaaggatcgcaggcagagcaaatgttgtgtcctcaatggcagccacaaacaatggaaaatactcctgtcactactaattcaacactcgaaaagcaaatacaagaagatttttgtcaaagagcaatgtcgcaagatggaacacaacaaccattttcatcagattggcgtctttctaattgcactgcaacttctattgatcctgcattgccgaagcctgcagctggagggtttgaacaggtcactggaaatatacattacctccgtcagataaagtggttgctgctactgtttcatgcaaaaacatgcacataccctgttggaagttgtaagttccatggttgtgttcagaactggggctttttgttgttcgcaaaatgtgtgcataaacggcaaggaatcccctgcaatgggcagctcggagttctaccacttccaccacgccgaagaccttttcgatcaccgcttcagcaccaactcactcgtcgaggacttctccgccagcctggacgctgccttccatggccccgcgaagaagccgccgcggtggcgcaaggcgtggagcctctggggcctgatccaccacccgtttaactcttgccactttctgctccttttttcttgatttgaaggaccagaccatggacaacgatgatgcacaaattggagttgctaaaactcagggaaagtattggggcattttcatctgctggcttcttggaaatggatgtctatttgggttcaatgagatgcttactattgaagattactacgtgtacctcttcccgaagtaccatccaacaaggattattactctcacctatcagccctttgttctcgccacaaccgccatattcacatatcacgaggcaaaggtcaacgccgaccgctcgttctcgaagccatagtcgcacctgcgcgtccacgggtacaacgacagaatgcagcggtgcaacagcaacgccagagcgcggagctcattcagcagcaacaacggcggtctgggcagctccaggcgcagctactaggacgcccacgggaagcggaggcgcgaggagtgcgcggcgctggagcggaaccgtagcgcgcggcactcgccgggcaacgcagacaacggtctgctgcggttctacctcacgccgatttgtagcgccagcatccgccggactggcgtcagctgaggtcgcagtcgttcgcgcggacgatgctggggctgtactagagtattgatgacggcgacctgatttctggtcaagctgcttcatttcagtaggcagtagccgatggcttatatgttgagtggtttgggcgggttgtataaccaaaatcgtttacatctgtgtgtagtgcagtgatccttttgttcattcggagggctggataaaatgaagtttaatctcgtaatcacgagttgactctgtgttgttggtctctgtctcggttctcagtcacaagtgatcctatcatgcggccatcggcggctcattcatatttctttgggtcaatgcatctcttccttgaattgtgactccctgacaaggagaaatagta

SEQ ID NO: 31731 - DNA, 1517 bp, Zea Mays
cgggtttccagtgaaccgcccaaaggttatttcggtcaagtcgcttctctcagtggaaacccaaaaaccctcttcgaagttcgatcccagggccgctccggcggcggcggcgcgttgagatggctgacactgacagcgcggagaccgagaaagagaagatggtagcggatgatgggggcaagcccgcagagctctcgaagagcgcgaggaagaagctgcagaagcaggagcggcaggcggaacgtaaagcggcccgaaaagcggcggagaaggagcgacggcgcgccgacatagagcggcggaggcgtgagtgggaggacgctcttgccgccgcgccgtcggatgaggcccgggccgagatggtggcggcgcggcgggagacgcggcgcgagcgggtgggccggcgggcggaggagcgcggggcgcgagctgaccggctcaggcgcgcggctgagggcgcgggccagaaggtggtgctggacctcgagtttgcggaccttatgaggcccaacgagattcatagcctcacgcagcagattatgtactgctatgcagtgaatgggagatctgcaaacccagctcacctgtggctgacaggttgcagtggtgaaatggcgacccatcttcagagaattcctgggtatgataagtggatcattgaaagggcggccaggccttatattgaagcatttgaagaccgtaaagaaaacctcgtgtatcttacagcagatgctgagacagtgcttgatgatctagacatgtcgaaaatatacatcatcggcggcctggtggatcgaaacagatggaaaggcataacactgaagaagtcagctgagcagggaattcaatctgcaaagcttcctattggaaactacctaaaaatgtcaagttctcaggttcttacagttaaccaagtgtttgagataatgttgaagtttgtggaaacaagggactggaagacggcattcttccatgtgattccacaaaggaagcgaggagaagctgagaccagagatgacgtggaaaaaggaggcctggatgacaacgatggcgccgccgaaggggctgcagatggagaccattccgaggaagacctgaacaagggcttcggtgaggaggaggacgatgatggggacgaagagctggaagaggaagaagcagatgtctccaacaagaggcagtgtgttagagttgaaaacggggaagctggggatgccaccgtagcagaggtggaaccaaacaacggcggcggcggcgggggcggggaccgctgaacagtgaacagcaccaccacgtttgtcgctaactcgctattttcacaacagcatcggccaatgaatcgagcaatggtgacaggaactgatgaacagcgaagctcacgtttgtttctctttcgtatatgacagcattagtttttgttttccttttttcagcgttttctctggtatttatgtattttaaacaatttatgttgtgtatttggaactggcgatcttgttgctgtcattttactatag

SEQ ID NO: 31732 - DNA, 6293 bp, Zea Mays
tcactctgcagactaatttgtttctaatgatatgctgttcatgttaattagacaagtggtattatactggaaatattaatatccagatttgtgccatgtgttgatcggttttaaagatacataagatgcagctctttgtttccacaccatgtcaacaccacacattgattgcttgctggatggactaaagccaatacaggttgctgctttgagaaataaccgtgaatttctggaacttcttttagcattaactatcccatttctaagtgtgtcaaattggagttttgatggaatcacaaaatacatgttgtctaaagctgctgtgggagagtcacaagtaaaagaagctacatctctgaattcagccagtttagccggaccgcaatctgctgggattttattttgcagtcacaagtaaaagaagctacatctctgaattcagccagtttagccggaccgcaatctgctggggtgtcatctagcgcaaaaggggattcgatggaagctaatttgagaggttatgatgcctataaaaatgaaaattacattggagcggtggatgcttacacacaggccattgacttggatcctagcaatgccacactctggtcaaacaagagcctttgctggttgttgcttgggatggctgaaactgccttggaggatgcaaagcaatctcgaacattgagaccagattcggggatagcttgctacagggaaggtgcggcattgcacgagctacagaggttttttgaagctgcaattgccttttatgaaggggctaatcttaaaccagagaaccaagaatatctcagcgccttcatgtagtatcatttcctgtccaaagaacatggcttccattagagtggacagggccatgctttgccatactttgatgctctactcattaatcctttcttttttccactatcaaacaatagggatgttgttgaggagggaatgaagtcgcaagccaaacctaaccagtcttccactgcagccaggagtctcttcggtcaaatgtgatgtgatgatgatgtgacaaatgattgagtgttttgcaccagaatccaaaacaattgcaacacaatttgttttttagggaaagtgttaaactgtaatttgacaaattgtgatggttttgccacgtttgatgatgtaggtctggggcttcacgaccagtaggttaagcgcacaggacagatgcactgtttggtgctggtttagcatatctactaatagcgaaatatctctgcaccatgagctctcgaacctggccactccacgttccaaaatcaggacctttggatggatcttgggcttgatctcaaccgtcgtttcttttgccttccgcgccatcattccacaggccgcgagcgctcgcgtttttccttgagcgtcgttcttgccaatgctagctctccaattttttttatttttatatttaaattaattttgtttgtaaaaatattgtacgaattttaaaatttgtagaaatatggtcctgtcgtcctttgagaggatgattttttgtctttttttattgaacgaattgcaacggctagtagcagatacctgtgtacgttcgcaggaatgatgtgctgcacaggcaatgaggaggcctggaacagcccgaactggcggaggacccggtgcacaacgtgctcctccacgaagatgtcgaagacgagcggtttcctagtcggccaatagtccctgtcttaaaagcatagggacaaaaggccgtaaggagcacgttgttgcacgacgttgtcggcgtacagggtctagtggacctggtcatccttcaggtcgtcgagctcagcgacgaagctcaagtacgacctccgtgtctgccgatttttttagctcttttttcgaaaaaaattcatgtttagacccctggaagacttaattccgtttttggaccctttgctcggcgtcatagcctgtggcgccgaggtaacacgtctcggtgtcacaggctgtggcgccgaggtaccagccgcgctggcgagcgaggactgacgcggcgttcacgtggcacctagctacctgaggtcgcagtggagtcaagctactggtggcggaggtggtggaatcggatggcctcctatctacaaaaaaaacatagtagtctcagcaaaaatttcggcagcacctttctatacgatgaggtttctaaaacccgcagagaaatgaacatcacaatggctgtcatccacactttccaacacagaaaacagcatgatggctgacatacaaatgcgcagtaactaaatatagaaacaacaaaatagctacctacctgtatgtactaacaactatattcactaaatatattaagcaaaatgaaataaactaaagtaaactaagtaaatacttaactaaattacagctaaactaacaaatacacggccggtccacctcgtctcggtggtacaacacctggccgtacgcagaaaggtctatcgcgggctgtccaatctaaaaacctctcgtatgaccagagctgtactagtaaagggcagctagtgaagatggccaaaggatcggtctttatgcagccatcatagaggccccgatacgtcgcgcctagcacgacgttaccccagtactgggaaacctggctaagggaggcattcgcgatcgccctcgcgtagtggatcatgtccttcctcacggagttactgtgagtactagtgaacatgacccacccgaagagccacaacaggtacgcctccatatgtcgggccatcgtgtagctatcggtgtcgatcctcatgtactccgcctgagcacatgaagttagtaacaaaacatggtaatgtacagcgtgttaggttcacggaatggcaccgtgaggagtcatccaatcctgcgtccaaacctcgatagattgtttggtttgctaaagggaaccaacctgtctgccataagattacaccctcctccagtatattcacggcatccactcattcctctagaaataatcggacgaacacatgccggacgcactgatgctagacggggtgtgtactccccaaaccaaacagctcggtaaagattactgtaacggtagtcctaaatgggatgaatacttgatacctcgaactgtctttgtccgaacaaccatttttcatgactccgatcaagcacccacgtttttggcctcgggagccggtaaggtagtttttggtctcccgtgacctatagcacacatttttctagccgaacaaccatttttcaagactctagtggccgaaccatgggagctttacccttaaaaaattagaaagtttgtttgcttgggcattaagcttggtgttatcttgacttacatgttggaaaccaacaacatccttaatgccagggcgtctcccattataaagcatgctacgagcaaatttaaaattttcattttcaagctcatgctcggcaatcttagcatctaattttgctatatgatcattttggtttttaatcaaagcaagatgatcataaatagcatcaacatcaatatctctacatctagtgcaaatagtaacatgctcaacggtagatgtagagacagggcaagcattcaatttctcaatcttagcaattaaattcacattttcagatttaagacaaggaattgaatcattgcaagtttttagctcattagtcaaattcttgcatttttccttttcatgagctaaggccttttctagctaaacatatttatcatgttccttagtgagcaattcttcttgacattctaagacatcatccttttcattgatagagctcactaattcattgattttatcaatttgtttttgagaaaggtctttgaacaataaagttaaatcttcttcattatcactagaatcaccctcgtcatcggaagtagtatatttgggggtggttctaggtgttaccttcctcttggtctccttggccatgagacacttatggccgaggttggggaagagaagtcccttgttgacgacgatgttggcggcgtcctcgtcggaggagtcggtggagctctcgtcggagtcccactctcacaacatgtgcctcgccatccttcttcttgtggtagtatttcttcttctccatcttcttctttcccttcttgtcctcgtccctgtcactatcactagcaaatagacatttagcaatatagtgaccgggcttaccacatcggtagcaaaccctcttggtgcggggtttctagtccttccccttcctttgcttgaggatttgccgaaagctcttgatgataagagccatctcctcattgtcaagcttggaggcgtcaattgggatcctcttgcttggcgtgagttcctccttgtcttcggttgctttgaatgcaacgggttgtgcctcgggtgtggaggtggctccttgctccaagttcgcaatgtgtttggagtgtttggccataagttcaaagctcacaaaatgctttcgtggagtgatgttaggtgatatctcatcttttcactccaaatagaataatctacaccatcaaaatatggtggtttacctaaaggaacggaaatgagattggaacgtctagaaatacgagggtaacgaaaaggaattttgttactctttttgtgctcttggcgcttggagatcgactcggcgtcggatgtcgatggcgtggaggagtcggtctcgtaggcttcatcttctttttcttcttgccatctttcttgtgtgacttgatggagccggcggattcttctttcttttccttgtgcttgtcgccggatagcttaatctcccttgatgaaatcttggcttcatgcttctttcccgaagactcgggctttgccccggtgggtacctcgttcttggcgtgttcactcgacatcacttcgagttgttaaactctaatgaagtgccgggctcctataccaattgaaagtcgcctacagggggggtgaataggcgaagcctgaaaatactcgtcagctcgcttggctcgtggccggctctgctcggcttgtttcaattttgtaatgagctgagctagcatcccagctcggtttgttaacgagccagctcgttagctcgaacgagctagcatttgtcagcaaaataaagcctccactcatgttagatgaactaataagtgatgaactctgttaatttggtcttgaattcatgtggtatatgaaattgtgagtattattacgcattttagtgttaaattggtctataattaattaacaattgattatattgttatgtatatatgcatattatttttgttgttgtggctcgcgagctaaacgagccagctcgatctcacaaatgagccgagccgagctgattctctggctcggttccttaacgagccgagctgagccagctcgttaccttaacaagccagctcgagctcgaccgagccaaaccgagctagctcgatatccagccctagtcaaggttcatggcattctgagccaggtataggactttttccatttagcttcttcctttgccgatgctgtcaccaccatttatgaacaagcaacactgtttcgagttatgcagtttacctctttttgttttgttttttcatctatattttgtggctaattatattcatcttgtgcggatatggggacggaaagcctactgataatgcatcaagattctacaaatggttcgctgagggggaagagaaggaagtttgctaaaggatcttaaatattgcgtctttggacttgggaacacgcagtatgagcattttaataaggttgcaaagatggtgcatgagctgctacaagaacagggtgggaaacgccttgttcctgttggccttgccttggagacgatgatgagtgcatcgaggatttcaccgcatggtatgaaggctacaataatgcaatctggttgcattccttcccctggtagacattatgcaatctagcttgttgcttcaaacgccaaatccatgaatgagttctaattcttggtgtcgattggtcctttatgtggatactaaacagaggtatctttgtcctaccagccaggagtttgtttctggtccggattggggaaatgaatgtccttactaagtcattatccaacagtagatgatttgctaaatttttttttggctcagctacaaggcaggagaccttactagtagtatgttgaagtcagacaattgaagaactagtcttttgtgctatctcataggtcagatggtgatgagctcgcagatataagctagctacttgactcagctgttggaggcgcgcccttagacaccatcagggttaggg

SEQ ID NO: 31733 - DNA, 3847 bp, Zea Mays
ccccatccccctccacctgccaaaataaatccatgcgctctccagctcggtgctgcaatcccatcaaaagctagggtttcacgcctctcccgacttcacagttcacattcctctcctccccttcccacctccccaactcggccgccgtagacgcggtggcgcacgaactgccctagatttgagcgagccaccctgcgaatcttcacctgacgcacaaagtctgtcagagacagtgaagaattcgaacacgatcttaaacatcgttgattaagaccacacacaaacacatctacctggcttcccccctatcagttgtttttgtgtgtttttttttgctgtttcggacgattcataagaaccgacctgcaaggcttgcagatctaccttgagaaccagggcccttgttttggacgtccagaacgaacccttgaccctgcggatctgcttgatccgttttggatctgcttgtttttttgctggatctggagagaatgttcaagtcgatggtttattacgtgaacacctcaatcggagaggtggaggtgtggcccaagggcgaggcgagcgcgggcctgaccatggcggcgtgggcgcgagaaatccgcgttgaacgcatttccccgcccagcgagcggtgccctccgctggccgtcatgcacaccgtggccgtcggcgcccgatgcctcgtcatggagtccaggccgcccgttgtcgccgacgttgtgccgcctctcgtcgtcatgcacaccgcttgcctcagggagaacaagactgcggttgttccacttggagatgaagagttgcatttagttgcgatgacatccagaagaaacttgacaaatcatgcatgtttctggggctataaattgccatttggtttgtataattcttgcttgaccatgttaaatcttcggtgcctgggtattgtatttgaccttgatgagacattgattgtcgccaatacatcacggtcttttgaggacagaattgacgcacttcaaagaaagctgagtaatgagactgatccacaacgtaggaatggtatgctatcagagatcaagaggtaccaggatgataagtccatcctaaagcaatatatagaaggtgatcaggtctatgatgatggaaaagtgtataaagcacaacctgagattgttccaccattgtctgataaccagcaaccaatgacacgtccagttataagattacaagataaaaacattatcctgacaagaataaatcctctgattagggataccagtgtgcttgtatgtttaaggccagcctgggaggatcttcgcagctacttaattgccagaggtcgcaagcgttttgaggtctatgtgtgtacgatggctgaaagagactatgctttagaaatgtggagattgcttgatccagattcaagattgattaattctgttcaactccatgatcggatggtgtgtgtaaaatctggtttaaaaaagtccttgctaaatgtcttccatgatggttcttgccatcctggtatggcattagtaattgatgatcgcctgaaagtttgggatgagaaggatcaattacgagttcatgtggttcctgcatttactccatattatgctcctcaggcggaggatgaaaatgtcgcattagtgaatgggaatagagattcattgccttttgatggtatggcagatgcagaggttgagcggagaatgaaggaagccaatgctcaatcattccatcaaacagcgggagactttgtcatgccagtagcccctgcccagaatttcgtttcgacttcagttgcatcattagccccacctcttggcatgatgccatctccatttagccagccagttgctccaccaggtttttcagattcactgcaaggttctccagctagagaagagggtgaagttccagagtctgagttggatccggacacaaggagaaggcttcttatattacagcatggccaagacacaagagatcctacatctccactaccagcaataccacccgtccaagttccagttcctccagtgcaaccccatgggaattggtttcccacagaggatgggataaaccaaagtaacctgaatagaggctcagcaggattcactgtagaatctgattctattgtctatgagaaaaagcaaccacctcatccttcattctttcatggtggggatagtcctatgccgtctgatagatttggctatcagaaccagaggtttccctctcagctaccacacgaggatcaccccatgatgcagaaccatgcacctccaaaatacagatccttttctggtgaggaactagcatcttggcatgttccctcaagccagagaaacaaccagatagaatcaggaagacactttgcacaatatgctgggacctctgctggcatattagaggggattgctctgaaatgtggttctaaggtggagtacaagtcagcattatgtgatactgcagaactacaattctctattgaggtttggattgttggggaaaaggtcggtgaaggaattggtaggacaaggagagaagcacaacgccaagctgcagaaatgtctttaagaaacttggccaataaatacttgtcatctgatccaaataagttgtctgatatgaaagaaaatgatttcagtagcaacagaaatgtctttggttactctggaaatacgagggatgatatgttgccactttcaagtacttccgaggaatctcgctttatgaaaatggagaacaataattcccggaaaacaggaagttctgttgctgctctcaaagaactttgcactgttgagggatataacttagtttttcaagcctgtccatcttcagcagatggtttagttgggaaagaatcttatgctcaggtacaagttggtggacaaattctaggcaaaggagttgggttaacatgggaagaggccaagctccaggctgctgctgaggctcttggaactttaagatccatgctaggtcaacttggtcataaacgatctggctctccaaggtcattggcaccaaattttaacaagcggttcaagccagattttccaaggaccgtacaaagagttccttacggaacatattctaggatcgaaggtcatgttccttaagaggtctgcataaatgatgtgcctgggcgctaaacttcaaaactggatgaagctttgaactgtcaggtcttcacacattgaatgcaagccgtagattcctggcttatagttggcttccaaggctctcacaagctgccactggctgagagtaccgacgaatataaaatacgtacttcatttaagtaagcgccaagagattgaaggattaatggtggccataactttatgcagaatttcattgccatgatcttaccagtcacaagtgttaccccatgttgtcaacttggcataatcgttgacctggaagtttaacggttgaaccagggaccggcatgcagctccatttcttttttggtgtgtgtccatggatcaaagagcagcgccgtggttgggcatttttacccttcctttggtttaggtgaaagttggacctctgtagctcggagtcttagcaggtagccagtttttatttctgataagtttttaggcaagttgtaagttgtagcacaaaatcgatcacttgatagtattaacattgcattgatgtagacatgtagtcatctttgtagctgtactctaggcaagcaacacgaatccagtggcttacatcattcatttgtatgctgtagtcatcttgtaatatatggcccatttctttgcaaggctggaaatttgcctctctaagggccagtttaagagtccaaaaaccggagggaactggaggggttaaa

SEQ ID NO: 31734 - DNA, 3367 bp, Zea Mays
atgaccgtccgggccgcggccgtgctggtggccgccgccgtgctcgttctcctcctcccgggatgggcggcggcggagtggaatctcacgaagaaaggcagcgtcgtcacctacgatgggcgctctctcatgatcgacggcaagcgggacctcttcttctccggcgccatccactaccccaggagcccgcctgaggtgtggccgaagctgatcgagcgggctaaggagggcggcctcaacacgatcgagacgtacatattctggaacgcgcacgaacctgagcctggcaagtacaattttgaaggccggttcgacttgatcaagtacctcaagatgatccaggagcatgacatgtatgcaattgtgcgcatcgggcccttcatccaggcagaatggaaccatggtggtctgccttattggcttagagagatcgaccacataatattccgggcaaacaatgatccctacaagaaagaaatggagaaattcgtgagattcatagtgcagaagttgaaggatgctgagttatttgcatctcaaggaggacccatcattctaacacagatcgagaatgaatatgggaacataaaaaaagatcatgcaacagacggtgacaagtacctcgaatgggcagctcaaatggcgctcagcacacaaacaggagttccatggataatgtgcaagcagtcttcagctcctggtgaagtgatccctacttgcaatggaaggcattgtggagatacatggacactacgcgacaaaaataagcctatgctttggactgagaattggactcaacaattcagagcatatggcgatcaagtagctatgcgttcagctgaggacattgcatatgctgtgttacggttttttgcaaagggtgggtcattggttaactactacatgtatcacggaggaacaaattttggaaggactggggcttcttatgtgctgactgggtactatgatgaagctcccatggatgaatatggtatgtacaaggagcccaaatttgggcatctcagggacttgcacaatgtaataaggtcatatcagaaagcattcctcttggggaagcattcgtctgagatattgggtcatgggtatgaggttgggagcaacttcttcaatcattttggttcctggaaacttgtgttctctgacctacaaatcaatcttctttggtgttgtgattaattttctatgttgcaggcacacatctttgagttgcctgaagaaaatctttgcctctctttcctttccaacaataacacgggcgaagatggaacagtaatcttccgaggggagaagcactacgtgcctagccgttcagtctccattcttgcagggtgcaagaacgtggtttacaataccaagagggtgtttgtacaacacaatgaaaggtcataccatacctcagaggtaacaagcaagaataaccaatgggagatgtactcagaaaaaatcccgaagtaccgtgatactaaagtcaggatgaaggaacccctggagcaatttaaccaaaccaaggacgctagtgattacttatggtacaccacaagctttcgcttggagtcagacgatttgccttttagaaatgacatccggcctgtgcttcaggtcaaaagtagtgcacactcaatgatgggatttgccaatgatgctttcgtaggatgcgcacgcggaagcaagcaggtgaagggtttcatgtttgaaaaacccgttgatctgaaagtaggtgtgaaccatgttgtattgttgtcgtcaactatgggaatgaaggtaaaaattcgtcggaactgtggaatgtgtttggaatgtaagatgactgattatactgtcctagccgatatccaggcgaaaaaaatatggctgtattgacgcaagctacaaacactttattttggaaaggtggacatatataaatatcataaatagaagggtggcccatgcgctctgctaatgcaataatccttcccatcagctctaaatttgcatgtttcactatcttctgcaggacagtggtggtgaacttgctgaagtaaagagtggcattcaggagtgcctaatccagggtctgaacactgggacgttggatttacaagtcaatggctggggccataaggctgcactggaaggtgaggacaaggagatctactcagaaaaaggtgtgggcaaagttcagtggaaacctgccgagaacggccgggcagccacttggtataaggtaagttgaaccaggaatacgagcactataggttttggaaacatcaaacatccatttcaattttggttgcaaccctggcccttggtgtcactatgttcactgccatgctagagatacttcgatgagccagatggagatgatcccgttgtacttgacatgagctcaatggacaaaggaatgatttttgtgaatggtgaaggcgtgggtagatactgggtctcataccgaactcttgctggaactccttctcaagcactataccatattccgcgtcctttcttgaaatccaaggacaaccttttggttgtcttcgaggaggagatgggcaagccggatggcatcctcgtgcagacggtgacgagagacgacatatgtctgttcatctcggagcacaacccgggacagataaagacgtgggatacggatggtgacaaaatcaaactcattgcagaggatcacagcaggcggggcaccttgatgtgcccccctgagaagacaatccaagaagtcgtctttgccagcttcggcaacccagagggcatgtgcggcaacttcactgaatgcctcggcaagccatcctgcatgctgccggtggatcacacggtgtacggcgcggacatcaactgccaatcaacgactgctacactgggggtgcaggtgagatgcggaggcggcaagaagggtgcctgagaataacaagatggatgctgctaattaatggacgtttcagcttgtttgtttgttcatcccttcggtttggcactgatgcttacattgttctgacattgcaattgaaatgtgattggaacattcttgatcgggaactaacatgaaatgagtggagggtagatgctgatcagaccaaagatgtgtatttcccccctctttccttctgtctcgtgttgtttcatgtaaccatcacaatatatatagatgttgaataatcatgaccagtagtatagatcttagagcatccctaacttttgaataaaagactcttggagattggagctggactaactgattgcttcttgcaacatgtatatgaacatttcattaaaaaacgagcgatgagcaaaacaatataccctactaattaagatgttgcaaatgagtttaatcctacagctttgatactgc

SEQ ID NO: 31735 - DNA, 2177 bp, Zea Mays
cttgccggcccgtcactcacccctctctctcccgccggccccgttcctctactagtccttctcctctctctttcacacacacacacgcggccaaattccgctctctgctttgtttacgcaggcgacgcaagccacgcagcgcgccgccgccgccgcgtctcctctccgccccgcgaagcttccggggggccctcttccttcctccgccccagccctcgagtcggtctccaccggcggcagcgggcttccgcgccggcgccggactgggtcggcccggccacgagattattaagggcaggcagacattacttgttttatggctagaaataatgagggtcatctccagctgccagagatggatcatattcaacccaagaacaccccgcacaatgaaccactgcctctaggccagaagcttatgctgcatcatggaagtgatgcaccccttagaattggtcattcaagtcatgagaatatgagacttagatcaaatgatcttccacctttaagtcacactgtgcaaactcaaggttatagagttgggaacccaggagcctcgcatgctccttttgttcattgtcatgctggaagttccagtagtcatttaccagaacctgctgtgaattatccacataggtcggaggaaggctttgctccagtgggttcccatatggacaacagaagggctgcaacgaagcgaaaagatcctattgtgcaccctgctgggatcagtgctactggttattatgttggaagttcttccaatactcagctatctaactctgtgcagccaaatcctgctccactttctgagcccttacttcgtcaaatacctttaagcattgaccgaagtggttgggatggcctacacttaattcatcaagaaggatttcagaggaatgtgagagcacgccagcgccacagccataatatttcattagagcccagaacagcttcaacctacccactaaacagtgttcatgtgccatcatttggttcaactacaagtgcttccttaagtatgtcagtggaaaggaaccaagcatctgtttctgtgccaacaagaaatgtaccatcaggtgcaccaggtatcactagcaggtccctgacaaggagggcttactatcctgtggttggaagtagcaactcaagcgttgatgtcgttccaactatctgtggatcatctggcgcagcaatatttgctaatggtggctatgctcttaatgctgatgctggaactgtttctatctaccctaatccagctcctgctacttcatctggctctataaccatgcccatgcccatgctccatcagatggtcattcagagccatccacctgctacctctgcagcaacctctacatccatgtggatcgctcaaccattacctgccagaactgctgcggcttctagacatgcaagacgcgtatcagcagggcttgccaacaatggaaggtacagaagggctaggagctcttactacagccttcatccactgatgatggtagaggcagagcggttcatgatggaccagttggtcttttacgaatcaagagcagcagccgctgacccccacagggacatgagactggacatcgacaacatgagctacgaggacctgttggctttgggagaatctatgggcaatgtcaacacaggcttggccgatgagaaaatttcgaagtgcgtgaaagaagtggtctgctgcagttccgaccagatgcaaaccgatcaagatgaccaggatgacgacggaagctgcgtcatctgcctgagacaaggatatgctggggatactgaaatgcaggcacgacttccacgccggctgcatcaagaagtggctgcagacgaagaactcgtgcccggtgtgcaaagccgccgccgcctaggacgacaccagaggagcgagcaactattttgtgctcctcctcgatccattcattttttaggctcaggtcgaattatatatgccgttccattcttttgattcctggcagtcgtgtaaataaatgctctgtgttggttattttagttatcacttgggttacattagcccaaattctcctgttgcattgtaaacaatccagtggtgaaggcaattgatcaagtggttgcaagcgcatgtcgtgaatggttttcggattcaccggcacttgaaattagttgcgaggtatttc

SEQ ID NO: 31736 - DNA, 2034 bp, Zea Mays
ccccctcctccccggtctcgcacgcgatgccccgccgtgacagtcgccgcccatcaacggcctcgccctccttcctccatcgtcccgctcgcacgaatctagctagctaggcgaagagctcgagcaagacgggcgggtcggcggcgcccccgcgggcccgctgcagcgcgtcggcggcgcgccagacccaggcatcggcggcgcccgtcgtcgtctcctcgcggtgccgcctcatgtggccgcccagcgcctgccccatctcgaagccgagcccgcagacgtggcactcgtgctgcgcctgcggctccctgtctcctcctccgcctccgccgccgccgacgccgtcgccggcctgctgatgatgcttgtgctgctgcctgagcgccctggcgccgacgccgagctcgaggccgtggcggccccgcaggtggctggtccggtggccgccgagcgcctggaacgaggtgaaggcgcggctgcaggtcctgcacacgaacaagctattccatggcggagcaggatggcgacgcggggcagaggccacccgactccgttccggttattatattggtttaaccttggatcgcgttaattcgggccatgaggaggttattccggtggtttgatatcggatctcgttaattcgggccctgaggagtttgtgcgggttgaaatccccaacacgctaattcgttcgggaacattcctcggtgctaatgaagactcaactagaacccttgcagaaatcgagaagaagattgcaagggctaccgtgttacccagaaatcatggggagaatgggagaaactatgttcccatatgaggtctcctattcttcagctgaagatcatacttgctgtggagcctttgatcccttcagagggaccaaggattggagagaacattttcggttacacgatagtggacatcttcagtagcagctgccgtggccaccataagaatcctccttcagagccatatgtccttgaggttggggttttgcaagattatgttggaagtggaggctgtgtgcaaggcgtgacagcgtgtcgtggtcaaggaccctaagctctagcgccaaattcatatcacatttgttctagaatgagatcatgaatggtccctggggttggcctggttcacgctccattctcagtgcgttttccgacatcgttcttcaagcaagcatgcgagctggctcctattttcactgagcttgtggattgtgtgagcttagatggggagtccttgcaagctgctttgtctagaacaaagcaggttcatgaatttaccgcaaggctgctagatattcatgataagatgatgttgataaataataaagaggtggttggcaatgcagtgatgctcggtgaaatcataaactacgtgcagtccctacaatgacaagttgagtttatgtccatgaaactggccaccgtgaatccccaggtggacttaaatagcctgcctaacgtcctccctaaagatgtacatcagtcttgtggtccgccacatttctcgctggagacctcagacgcttcgttgtcgtacctcagccagcctcaccatggaagccctcttggctgcatggacaaccagagttgtatgcatccacttgacacgacgttttgcctggcgataaatccgcagtatcatttcctcaacggtgttagcgatgcatcgtctcagttgcagctaatttgatgcttgtgtttatggaaaccaagaggtggcgctgatccattggaaacctggttgtgtatgaatgggtttccagctacttctattcttggagatagaaaccaacatgtttggtttttgtttttattcgctttagaacaactcatttttgtacgaaaagaggcatttagctataattgtttgttgtagtatgtttaccgcaggatagccgttccatgaaatacataaaaacctgatactgttgttatatttggtttagtcatgctcttatggaacctttaatgaggatttttctatatcaagatatcatcgtcatcgtcattattattgcat

SEQ ID NO: 31737 - DNA, 3741 bp, Zea Mays
ctaacccctcactcctaagcgccgtcgcgatctgctgcggtggccgctgccgtcgccgtccatccccaccgcctcgaccacgccaccgacgccgcctctcgctccccctcgccgcgccgcccgaacgccacgatgcgtcacctcctcctctcccgcttcctccgccgcggtggcggcagcggcatccccaacggccactaccaccacctccccctcctccgcgccctctcctcctccccctccccggtctcctcggacgcagagctccgcaagtacgcgggctacgcgctgcttcttctcggctgcggcgccgcgacctactactccttcccgttccccgccgacgcgctgcacaagaaggccgtgccattccggtacgcgccgctgccggaggacctccacgccgtctccaactggagcggcacgcacgaggtccacgcccgcgtcctgctccagccggactcgctcccggccctcgagggcgcgctcgccgccgcgcacaaggagcgccgcaagctcaggcccctcggctccggcctgtcccccaatgggatcgcgctctcccgcgctgggatggtcaacctcgcgctcatggacaaggtgctcgacgtcgacgccaagaagaagaccgtcacggtgcaggctgggatacgtgtcgcggagctcgtcgacgcgcttcgggaacatggcctcacgctgcagaactttgcgtccattcgggagcagcaggtcggagggttcactcaggttggtgcccatggcactggtgcaacattacctcctgttgatgagcaagtcattagcatgaaactggttacccctgccaaagggacaatagagctgtcgagggagaaggatcctgagttgttttatcttgctcgctgtggacttggtggcctaggtgttgttgcagaagttacccttcagtgcgtagaaagacaccagcttgtggaacacacatttgtttccaatgcagatgaagtcaagaaaaaccacaagaagtggctatccgaaaacaaacatattaagtacttgtggattccatatactgacacggttgttgttgtccaatgcaatcctccctcaaagtggataaccccaaagttggcatcaaaatatggaaaagatgaagctttacagcatgttcgggacctttatcgcgagtcactgaaaaaatatagaactgaaacagaaagtaaagacccagaaatagatacactttcatttactgagctgagggacaagctgcttgcccttgatcctctggataaagatcatgtggtgaaaatcaataaagcggaagctgagtattggaagaagtcagaagggtatcgcatgggctggagtgatgaaatactgggcttcgattgtggtgggcagcagtgggtttctgaaaactgcttccccactggaaccctagcaaagccaagtatgaaggatcttgattatatagataagctgctgcagttgattgaaaaggaggagatacccgcacctggacctatcgagcagcgttggactgcccgcagcaagagcccgatgagcccggcatcaagctctgaagaagatgatgtattttcatgggttggtattataatgtatctgccaacatctgatgctcgccaaaggaaggaaatcacagaggagttcttcagttacaggagcctggcgcgaagtctctgggatgattattccgcctatgaacactgggccaagatcgaggttccaaaagacaaggacgaacttgccgaactccaggcccggctgaggaagcgttttcctgtcgatgcatataacaaggcacgtatggagctggaccccaacaaggtgctctcaaacgccaagttggagaagatgttcccagtgttggagcctcctcaccagacaaagtaatacgtgttgaagagcgcagagcaagggcacgtacgtagaacttggttgcaggaggcttaacccatacacatttgtagcactgttagttcctgtcatgattctgggaccctaccctggctgtcaaatgtgatggcgattaagattggtcactgaaataaagttttttttgaagttcgaaatggaacccttttgaacgcgagatgtgctgccagaaggagatgagccttttgaactctctcccaaagaaaaatgagcattcaaaatactgcgactatctgaagcacaacgtagccttcggttatggcccacgggcggtagcagctagcagactagtagtaggcttcggcttgtcggcgcacccaaaaggccaaaaccacccaaaaaccccagcgcacccaacccaagagcgaaaatggatccgcaccagttcgccccctcccagcagtcggcgctgaccatggaatcggcggagagcacggccgccgccgccgcgcgggcgtccaacggcgctgcccgagctgtcgtcgaggacgacgacgaggacgacgacgtccccgaggtggccgcctgcatatcgacgatgctcgaccgcgggggtagcgtggagagccaccgcctcttcctggcgcgccgcaccgcgctggagatgctccgcgaccgcgggtacgccgttccggaggaagagctcgcccgcaccctcccggagttccgcgcctggtgggaatacaggccggagctcgaacgcctcgccttctccactaccctcacctccgacccgtccagcaaggtgaaagttgtgttctgtccacctggacctgtcaaaatcgcagctatccggctgatatataccgaagtcaaagatgagaacttgtccagactgattctgatactgcagggcaaaataatgtctacaaccagagaatccatcaaggagatctttcgatttaaagttgacacattccagatcacggaattactggtgaacatcactaagcatgtcctcaagcccaagcatgaagtgttgactgcagaggggaaagctaagctcctgaaggagtacaatgtggtggattcacagttgcctcgcatgctggagaatgatgctgttgctcgctattatgggctaggcaagggaactgttgttaaggttatatacgacagcgagcttaccgggaaccacgtgacgtaccgatgcattacctgaggggcccatgtgtttcggtggatgaagtctcgtaagcacccaattgtgcaggatgaagcttgctgtaagctattggtaaaatcatcttgcgccattgccgtaccttaagtgcttggtgttaatcttggaaacagtgagacaactaatcctgtagtgagttatctcgatcactttcagatgtctctgatggccttcgaggctgttaccttagctgtcctcttgcaggctacagctgaagtgtgttgcaaaatcacttgattcgaaccaagctgtatccaaatttcttcgttgccctctgccttccactttcgtctgctgctgctcttgctcgtggggttactgcaatacttgctgttgctgtcactctgctggtgatgtactgctgttcctggtggagtggtgggagtgctccctgcatctgcttttcagtatgtgaggcttgagcttgctcatgtctgatagccggcactggttttatgaagaactcgtcagctactttctccagacatctgatctaggagatgatccagtctgaaacaaaagtatcttttgattttatttgacttcgtcaataaaccgggacaaagcctgtttcatttcatggatacggcaatatgaatggaatttaatatctacgatatcaa

SEQ ID NO: 31738 - DNA, 3341 bp, Zea Mays
ccaagccccaaacagctagctcttccccacttcgcctgcggcggcgctccctcccgccggtttgctcgctgggccctggcgcgttcgtctcaacgaagcactcgcaccgccggccaccccgaagcaatcgccactgctatctcggtgtcctctccctccacccggactcggattgacttcctatctctcgtcgcagggggccaagcatgatggaggtgggtttgaacccgggggaggagctggacttcggggacaaccaggaggacgacgacgacgcgggggacatctcacccgccagcaaggagctggccgccatggtggcggcggcggcggcggcggagacagtcgagcttgacgacggcggcgccggtgtcgaggcggccgcctccgctgccgccgccgcgtcgtcgtcgtcagcggcggcgcggtacggggacgaccgcacgccgcgggacgggatggtgttcaagtcctacgaggaggtgctcaacttctacaagcgctatgccctgcgcacgggcttcggcgtctgcgtcaagaagtcctccttcaccaaggccggcctctgccgccgcctcgtcctcgtctgcaacaagtggggcaacggcaaggaggacgcctgctaccaggccaggcccacggccaagaccaactgccaggccaccgtcgtcgccagactcctgggggacgacttgctgcacctcacggatgtgaacctggagcacaaccacgcgctcaacccatccgccgcacgcttcctcaggtgctacaagacgctgcctagcgggttgagcaaagatctcgtggtgagggctgccagaggggaatgctcggtggcgggtgacatcgatgtcccgatatttgatgaatgggggcggcttaagaccgggcaagctgatgtcctggccatcaacgctttcttcacccagatgcaggcaaagcttccaaactccttctatgtcatggacttctatgtggagggccatctgaggagtgttctctgggctgattccagatccagggcagcgtatcagtatttcagcgacgctgtttggattgatacggcatgcttaaggaacaagtatcatgtcccgcttgtttcgtttctgggtgtcaatcatcatggtcagcttgtattgctaggctgtggattgctgtcagatgagagcacagagagcttcttgtggctgttcaagtcatggttaacttgtatgaagggacagcctccaaatgccatagttaccgatgaatgtgtggcgataaaagccgcagttcgagaagtgtttccgaagacacgccatagaataagtgattggcatgtagtgagaagtatttcagaaaaaataggtgacttgccagaatatgaagcgatgagaaccaatttggttactgtaatatatgattctttaaacgacaatgagtttgaggcaaggtggaagaactggattgatagatttagccttcaggataatgaatggatcacctttctgtatgagaatcggcacttgtgggcccctgccttccttagggacactttctcagctgggctctgtactgttagccagcgtgaaagtccaagtacattttttgaggatgcagtcagttcagagaccacattggtgacgttccttgccagctacatgacacttttggataacaaatacaaaatggagcaacaagatgattttgattcattaaatagcagcaggctcctgatatcaaagtaccaaatggaagaacagctatccagattgtacaccttgaatatgtttatgaagttccaggatgagctaaaggcaaccatgcattgtcaagttcagctggatgggtcagcatcttcttttatagttattgatttgactgaagcagggagtgaaatgctgaataaaaagtacgaggttgttcactgcatggcgacaaacaggatggagtgtaactgtggcctatttcagtttcatggtatcgtttgtcggcatgcattatctgtgcttaaatggcagcaagtatacgacatccccccttgctatgtacttaacaggtggcgggctgacttcaagcagttgcactacctagataatccatcaaaggatttagcaacaagtaatcatgtcgagcgttatgattatatttctttgcagtttcttcgtctcgtcgagattgggatggtatccgacgagaagtataggcatgcagtaaggcttcttaaagacatgaaagagactcttcttgatgataatctgtgccgtgatttggagcagaagcttacaccagctgagcgtgcaattgtgaatggtgacaaccatacacaacctggttcatctgagggcggtgctgcaaaaaagcggcgaggccgtcctcctaaaaagaataaagagataaacatggattccatggtaaacccgtatggaaataaggaccctttactagtatcctcggatgtaactcagaaggacacttttcattctgcttcaactacctcaaaccttggcactcatgtccggacgcatggcattgttgatctcatggaagaagtcaatccaagcgagctgtcatttgatagccgttacggggtgcaatctggccactcgcaccattttggtaataaccaactaaatacaggaaacacactgcggtttggccaatctacatcagcagcagagcagtctagggttcagtgggtgtttcataatggcatgtatcaggatgaccaagtgacttacggcagacggacatcataacaattggacttgttaggctccagggtttgccgtttcaggaaatcgggtcaggggtcctcggtttttggactttggagcaccgatgacttaagtgatcctccattgtgcttcgaacgttgagccttgggagatgcatgctggaactggctgctggtgatggtggcggcggcggcatctgaaggcaggatacactgtagaaacagaagtttgccactaagccagccgaacgcttccataagccatcaatgttagccaactaactgacatgtgtatatacacacacatcatctcagaaagaagccgtcattccgtgggaagtgctgcgtaaactcctgataataggcgtggtcagcgtcggacaagaaattgagagcttcattttctttctttcacgtgggaaagatacaattttgttgcctcctgacgatcagctaaaagggggaggaaatatccatgctcttcatctgggaaagatgcaaaaaccatccagctttatcatctttgctccttcagtaccgtgcctggaatcctgctttaccaatttttagcacccaaaaaaagaaaaacaaaaaaaaactatctgtggcgccccttgacacaaac

SEQ ID NO: 31739 - DNA, 3209 bp, Zea Mays
tttatctcggccaacgtggacggcgcgtgattttctcttctctcgcagtcgcagcacggcagtcggcagcaggcaggcagccagccagcagccagcagctgcgaatcgaagcggaatcgaagcccaccaccagcagcagtgcccacttgcttggagcgcgagtttaccccgagcaaatcgcggcggcgctcgtgcccgtgcctcccgcgtcgaaccctagtgcaactaccagatccggagatcccgcgcgggcgcgggcgggacaccaagcttctgactcaactcaatccccgcacctgccaatgccaccccctcggcgctgatccgatcccgccgccgccgacactcgcgggcccgccccatggattccgcccggagctggctccagaagctgcagccgcgggacaaggacagagagcggggcgccaagacgccggcgccggcgtcgcccaacggtggcgccggcaactccgcgaggatggccgccgcggcgggggaggaggcgctgtctagcgccaccaagcagaaggtggcggcggcgaagcagtacatcgagaaccactacaagtcgcagatgaagtcgcttcaggagcgcaaggagaggcgttggatgttggagaggaaactagcagatgcagatgtatctgaagaagagcaaaacaatatcctgaaagatttagaaaaaaaggagacagaatacatgcgcctacgaaggcataaaatgggcgttgatgactttgaattgcttaccattattgggagaggtgcatttggggaggtgagactttgtagagaaaaagctacatccaatgtgtatgcaatgaaaaagcttaagaagtccgaaatgttacgaagagggcaggttgaacatgtcagagctgaaagggacctccttgcagaggttgatagtccttacattgttaagctgtactgctcatttcaagatgatgagtttctgtacctcattatggagtaccttcctggtggtgacatgatgactttactcatgcgcaaggacacactgactgaggacgaatctaagttttatgttgcagagacaatactagcaattgaatctattcacaaacgcatttatattcatagggatatcaagcctgataatttgttgctagatcgaagtggccacttgaagctttcagattttggcttatgtaaacctctagatagcagttgcttcccaaatctgagtgaccttgactatgcagcaggtaagagcaccaatccatcatcagatggtgataagcaatccagtaactctactgcccccaggcggacacaacaggaacaactactacattggcagaagaatcggaggatgttggtgggtgcccagctatgtaaattttgactcctgccatttcattgtagatatgtcaactcaaatattggttgtgaacctcaatacacaaatctatctactacacaataaattagcttgtatctgcttgtcaacatgaatttgttctaaggagggtcctttttacacagtgtaggctttacaatgacatttcttatacacaatgtagaactagagagcacaatggcgacaataacaacagtcttttagtttgaagcaagttgagtaggccaggagttgttaagagcactaatgtactaaaactaggttagaatcaagaacatctatacatgtacggttattatgtacgttaaacatgcttgtatgagtgaaaggtttcaagatattattgtcttcaaacactgagcagtttgcatagatacatggagaaaatgaaatttcattccacctaagggcttgttcagttaggggtgtccgggtgtggattaattccctccaatccccctcaatccacctcaaactgaacaagccctaaggtgaagtgtaatcctcagcacatcacatatggaatggctcagattggtcatctgtttaaaactcatgcctggttctgtttcatatccttgactctattggtgtgcatggttcatgaaatttataggcttactctactgttggtacacctgattacattgcacccgaggtactcctgaagaaaggatatggaatggaatgtgactggttagcttgatcttatgtacttgtgcattacacatccaatgatgtccttttacttacattgacttttcataggtggtcacttggtgcaataatgttcgaaatgcttgtggggtatccgccattttattctgaagacccaatgtcaacatgtaggaagatagtgaattggagaagtcatctaaaattccctgaagaggccagcctttctctagaagctaaagatctcattagcaagctattgtgtaatgtggatcagagaattggaacaaaaggtgcacatgagataaaggtattcattaacagattatttgcaatgttacataatgttgaacatttcatgattgatggcacaatgtgtttatgcaggcacatccatggtttgcaggtgttgagtgggaaaaactatatcagatggaagcagctttcattcctgaggttaatgatgagttggacacacaaaactttgaaaagtttgaggagactgctcctccaatgcaaacttcatcaaaggcaggtccttggagaaagctgagctaaagaaaacgaacaacaagccaaagcgaccaaccatcaaatcattatttgagactgctgatagtgaagaccagccttctgatggcagttttctgaacctattacccacacaactggagctgccagagagccttgagccctctcctcactccagtatctcttctgaggattcccaagcacggaataggtagcaggtctctattcagaggacaagctccataaagtttgcttttgaagagatgtttgtggtgctcagcagccatctaatgtacattgtcctgtacattgttactggtttccaaagttcctttggcaacgacacgaggaggttggttgtcatatagaggaggaggtatttgttctctcctgtaaatccttggattctttgagtttctgagatttattctttcgatatagcatgccaagggggtatgctgcctgtttcctttttacgtgcagaaatctgcatttctacatcgttgttgtaagatttgagacagtgtaaagaaattgcaagtgataaacaagcgaccgaaaatgataatgaaaatgctatttttcttctatacagccttttttctttgcccttgtactt

SEQ ID NO: 31740 - DNA, 2982 bp, Zea Mays
caccaccgacctccattccattcatttgccgattcacctacacagacacacacagaaactttggatgcaaacgaggagggagcccttgaaggcaaaccaatgcgcaccgccgcttattcattaaccaaagacttgcatccaaccaatcccaccacttgtgtctacctcttcgagtcaggctgatgggaggtgcctgtcagcaactctccgtggacggagatgcgaggacgcctgcgaatgaccgcgatccggccggcctgctccagcatgatgatacggaaaaccagcagcagcagcaggcctgctgggagcgcttcctcctcaaggagactctcaacgtcttgcttgtggagagtgatgattcaaccaggcaggtcgtcagtgccctgcttcgttgctgcatgtaccaagttatctctgccgaaaatggccagcaagcatgggcttatcttgaagataagagaaacaacatagatcttgttttgactgaggtttttatgcccggtgtatctggtatttctctgctgagtagaatcatgagccacaatatttgcaagaacattccagtgattatgatgtcttcgagtgatgctatgagtacagtctttaaatgtttgtcaaaaggtgctgttgactttttagtcaagcctatacgtaagaatgaacttaagaacctttggcagcatgtgtggagacaacggtgtcacagttggtagtggaagtgaaagtggcattcagacgcagaagtgtaccaagtcaaaaggtgccaatgaatccggtaacaacagtggtagcaacgacgatgaagctggcatgggacttaatgcaagggatgacagtgataatggcagtggcactcaagcacagaactcatggactaagcttgctgtggagatcgacagtccacaagctatgtctctggaccagttagccgatccagccaatagcacctgtgcacaagtaatccactcaaagtcagagatatgtagccacagatggctaccaggtagcagcaacagaaactgcaagaagcaaaaatacactaatgatgactttaagggaaaagacttggagatagatggtcctggaaatctatatatggatcaccaatcttccccaaatgagagacccatcaaagcagcagatcatgaaaacaattccaaggagtcaatgatgggaaatttaggggatgcaactgttcgagctgctgacctaattggttcaatggccaaaaacatggatgcccaacaggcagcaagagctgcagatacccctaatttctcttctgaagtgccagaagggaaaggtaagaatgatgactttaagggaaaggacttggagataggtggccctagaaatttatatatggatcaccaatcttccccaaatgagagacccatcaaagcagcagatcatgaaaacaactccaaggagtcaatgatagaaaatttagaggagccaactgttcgagctgctgacctaattggttcaatggccaaaaacatggatacccaacaggcagcaagagctgcagaagatacccctaatttctcttccaaagtgccagaagggaaagatggtgccaacgatacagtcaatgacgatgaacagcggaatagtgcattaaggcgatcgaatctctcggcttttacaaggtaccatacatctgcggcttccaatcaaggtgggacaggattggtaggtagctgttcgccgcatgataacagctcggaggctgtgaaaacggattctacttacaacatgaagtcaaattcagatgctgccgcaataaaacaaggctccaacggcagtagcaataacaatgacatgggttccactacaaaggatgttgtgacaaaacccagcacaaataacgagagggtgatgttgccctctgctattaaggctaatggatacacgtcaacattccatcctgtgcagcagtggatggttccagataatgcgacagcagggaaagcgaaggctgatgaagtggccaacaatgcaggcagaaatagtcatcctggtgacgtgcagagcaacctgacgcaacaacatcgtccaacccttcattacgtccattttgagaatagtggatcaggtgccctgcaatgtggttcctccaatgtatttgatcccccacttgaaggccaggctaccaataactatggtgtgaaagccgggagcaactcaggcagcaacaaggggcagaataatgggagtacagctggtgcgagcacggctgctgcaaatgctggacggacagatacagagatacgggctatcgataaaagtggacctggaggtggcagtgggagtggcaatgacacatatgtcagacggcttgctgcgagcatgacaccacgacaagaacagctaaagaaatatagagagaaaaagaaagatcggaactttgggaaaaaggtgcggtaccagagcagaaagaggctagccgaccagcggccaagggttcgtggacagttcgtgaagcaagctgtgcaaaatcaagagggagatggagagagatgacccccccccccctctggcttcagctcatggttgttagacgtggcggttgatgattcttccttctctggtgtgatctgatatgatcgacaacacaccatccttccttttcttcattggtttcttcacatctagaatttactgcctgaccgggaaaaaataagctaggaacttctatacatgtgtatgcatttctaatcatgtagaagaataagtgtgtcttgactctagataattttaggtagagtcatgctcgctctcctacattatgtgatgtaactgaagtgttgttgtgttgtcatgtatggtcttggatcactttctgtcaatatattactagcccacaactactattaatttgatgagatgtatataattaaaaatattgtaatagtccttcctttggtaggtagacaacaaacaatcttgaattcagtgcatacataaatcactgta

SEQ ID NO: 31741 - DNA, 937 bp, Zea Mays
catgacgatcccacaccctatactgtttggttgggagtcaaggttttagatgggaccatccctagaaaaatctatcagtagaatgttgtccctgttcgtccctccaaattagacggataatatcgtcctccgcgggacaaggcacctcacgagcccttctcgtcctcagatctagcgccgcctccttcaccctgctgctggccgcctggccggcgagctcctcagcgtgatcaggaagaagacaaaaaacgttatagtgaagaggaggggttgattgctgcattcaaaagtgtcggggataccttatccaatgctactgagaaggttgccacaggggacactgatgtgccagatgatctttttatagtttgataaacctttcaggttttgagcagacccacatatctctgtatttcaattatctggtggcgcaccctcacattgctagagccttcaacaagttgtcattcgaccacaagttaatctgggctcgcaatttcgtcagtgaaaagttcctaggagtgtgagggcagttggtaggtaggcttggagggttcttttgcttgaaccacattgaacaatgaactgcgatctatgtgtaaccaggagtgtgagggcagttagtagataggcttggacggttcttttgcttgaactacatcaaacaatgaaatgtcgtctaagtatgtcagcggattttgcttgaacatgcagattttgtggaagccttaaacttgatattatgtgtaatgctaggacacattattatgtattgtgtggaattaataatatgtgtgttttgtagacttaatattagttgtaacatatcatgagatgggggcaatggctgcaaacattttttatgctctgttctcgaaccaaacagaggacaggaccaatccatccccagttataccgctaaccaaacaaaaaacaa

SEQ ID NO: 31742 - DNA, 1654 bp, Zea Mays
gttagtgcgagcttgatgaatcgaatcgctgatctctgttagcgctccgctcccacagacggacagcttgggctcgacggatgaacatgtgtgagaaagatcagaatttgccatggggatacgacctgttccgcgacccttttgctcctcccaacgggtactacgggcctcctcccggttactgtgatggccactgttgtgacctccatcattacggtagagcatcacatccagatgagactcagttgcattcttctcaactcgcatatgatatgtacaacccatcagaagcacccatgagcacgagcacgagcacgagacagtatatgtagaaccgtctagttcctctccagacacaggtggtgacggttgttttgagatggaggaggaagtagggaagaggttttaccccatggtcccagttccccatgtccccaaaattaatggagaaatcccatcaattgatgaagccactatggaccatgaaaggctgacagaaaggttgaggctgtatgagctggttgaaaacaaggtgaaaggagatggcaactgtcagttccgagcactatcagatcagctttaccaaagtccggatcaccatgaatttgtgaggtcgcagataattaaccagcttaaaactaaccgtgacgcctatgatggatacgttcccatggcatatgatgattacttggagaaagttgcacggaacggtgaatggggtgaccatgtgacgctgcaggctgctgctgacaagtatggagtaaaaatcttcgtgatgacatcgttcaaggatacttgctacatcgagatcctgcctaaggttcagaagtccaacaaagtgatactgttgagcttctgggcggaggtgcactacaactccatacatccgcagaacgatgctccgaggtcgcagacgaccaagaggagaagatggtggccgttctcgcagcaccaccaccattgatggcgggttcagctctcttggggctggatggatgttcaggatcaggtggtggtcccggtcccggccatcgtccagatgatactacaagggacgtacgacattatgattaatatatatatacccagagcggagcagaaagacctgataagggaattagttgggatgaatgaaatggaataaacatgggatgggatgggaatcgtcgtcccgtatatagtttagagtggaggccggtgagcgccaactcaaactctttgtattgttgtttatatctacaaattttgccggaacgaggctagaattattggggaacaattatggtaataataaatcggttaagaattgagatgacccagctgttggcagagctcggatcatcatatgaccagaatcagaatggattccccagtgcatctagttttcctctggaagaacagaacaacataaaagaaaaacgttgaacactgaagtgggaagctgtaaccagaaatcttagatttgagcccaactgctctttttggaaggcaatatctagtttttggcccatgagtccaggacattttcagagggcccatgagtcatttcacaggtgaacaaccattgtagccattatacatacagagtaggctggtgtcttattttcgggttcaattgtaaatgattagtcaatgccatacagtcatttttggc

SEQ ID NO: 31743 - DNA, 1590 bp, Zea Mays
gccaaaggggatttgcccggcgatgcgcctgcacacacagtggttctttctactctacctctccggctcaaggtaggagaagacgatgctccatccggctggccggttacatccggcctttcttcagcccatcggataggagcccaatatctgatcgactgatccgtcttggattggacaaaagccctaaagcccaccacaggatcctcaacagcctaaataggcccatgaaaagcctctcacagctccgagctagacccccacctccccgcctagacctagggttgcttccttccttttaacctcgcgccgccatccgacgcccatctgctccaccctccacccagccgccgccgccgccgcctaaggagaagagggtccggccgtctccttgccccgatggcgtccgagaagaagcagtccaacccgatgcgggagatcaaggtgcagaagctggtcctcaacatatccgtaggggagagcggcgaccgcctcacccgcgccgccaaggtgctggagcagctcagcggccagacccccgtcttctccaaggcgaggtacacggtgcgctcgttcggcatccggcgtaacgagaagatcgcctgctacgtcacggtcaggggcgacaaggccatgcagctgcttgagagcggcctcaaggtcaaggagtacgagctgctcaggaggaacttcagcgacaccggctgcttcgggttcggcatccaggagcacatcgaccttggtatgatccatcaacaggcatctatgggatggacttctacgtcgtgcttgagcgtgctggctatcgcgtcgcgcgccgcaggaggtgcaagtcccgtgttgggattcagcatagggtgaccaaggaggactccatgaagtggttccaggtcaagtatgaaggtgtcatcctcaacaaggctcaggccagcacgatttaaacctcacctgtggggcaaaacagctctcgcttcatctccatgtgaacgcaagatcaccttccaaggtttttgtttgagttgtatcctctggcctgactttttagtctactagcagagctataatcactatatgaattattttttgtgcccttaccatactctgctgttgcttgagaatatgttattagtctgtcctagctcttctttggttacatgctttgtttaccgcatctgcgtttaagtttttgttgactagttactctttagactacagtgcaaaacagcgtcataatcccgctttgcatagcacacatctttgctcgggctgactccagcatgcggtcgcggacacggaactcacggcggcggaggctattgcccgatgcggaaaaagcagcagctcgcgaaaaacaggagaggatacacaggtgtagtgaagacacccttttttcgcaaccgcgacctgctggatggggctacagtgcttcgtgatctaaaaaacgcattcgcgatcgtatatgtcatctgctggagtcagcctcagtcagcttctattttccagaccgggagatggtaactagtcaacaaaaacttaaacgcagatgcggtaaacaaagccaaggggtattttacactttttaataaatca

SEQ ID NO: 31744 - DNA, 1858 bp, Zea Mays
acaagcaaattgattttcccgagccgctgccgaaaaattgccgctgcggcgctgccaccatcccacttctccgcgccgcctccagatcgagcgcgttattaggttttctctgtccctcacccgccgccgcagaacgctgatggcccagcgctggcgctccagggcgcggtgggactcagacctggacgaagatggttccccgccttttcggcagccgcgcaggggcgggagcgacgaggaggacgacgaggtggggaacgaggacctcagcctggagatcatcgcgcgcgcgcagcggaagcggcgttgggcgtcctgcggtggagtcaccgggttcgccaacctgctctcggtgtcctccggcgacgacgaggacgccgtggtggagctcgctgaggcggatgagccccggaggaaacagaagaagaggcagcactggaagcaaaggaaaaggcaacggaaggaggcgaccgctgctgctgcggctgcggctgccgtggacgaggaagagaaggaggttggtaccacccaggaggagcaaattgggacagcagaatcggtgctaactgaagatggggttgatgcccctacatctcacagtatgtttctgcggaagctccttcgcataccaagatactttgatcctggggaaacattgttggagacttgctttaattgtagcgaggaaggacatgtagctgcaaactgcccaatgggaaagcggaagaagccttgctttgtttgtgggttgtttgggcacaatgcaaagcagtgcaagcagggtcaagactgtttcatctgcaaaaaaggagggcatatggcgaaggattgtcctgataagcacaagaggaatgatcatcaatccacattatgtataagatgtggagaaacaggtcatgatatgtttggatgtgccaatgattacccaccagatgatatcgagcaaataagatgctacgcgtgtaatcagaagggccatctatgttgttccgacttctttgacaattctctggaacaggttagctgttataactgtgcccaatctggccattctggcctgggatgtgctaagcaacgcagggaagctagtgctgtcacaaccccaaccttatgcttcaaatgtggcgaggaaggtcacttcgcacgcggctgcacgaagaatgccaagtccgatgggccaaaaggctggtcgtcaccacacagtcagaggaagggaagatggaaaaacgatggcaagtcaccatcacacatccggaggaaggaaaaatggaagaaagattccagtgctagatcagctcctcatgatgcctgtacaacaagcaaaagcaatagcccctctttcgaggaaagaatgggcgcatctaatcataaatcgaaatggaggggtggttggactggtgatgacgatctaccatcgaagaagtacaaacccaatggatggggttcaccagctactcccaagaggtcttacacgaatcaccagtacttgtctggtggtggtgactacttcactccccagtcctcacgaaggcacaaccatggtaccgcgtcacccggtgctaggaaacacaggttctcgtcgtcaatattcgccgccagcaacacccatgtccggttcaaaagaagctagccggatgcacgtgtctgtttttgttgcttgtttagccattgataacagttatctcctggggttgaactctagctgctggttcatgcccttagataggtgtcttgtctgagattacatatttacatatgtaagcgcggttgaaactgattatttctactgtgaacaaagctttcatgccatggcgtcgccctccggataacaatgccttggtgcaaaaaaaaaacggca

SEQ ID NO: 31745 - DNA, 2136 bp, Zea Mays
ttcagacatagaattgctcgtggtgcttctggaggaatacaattggtctttattattctggaggaatatagtaatcttgctttgttctaagcctccaatccatgaatatcccacctctcaaaaaaaattatatttatagatggatttagaggtatccgagggttcaggtactaatgccacctcggatgaccaatcggtgcaaacgctgcctagaagggcaaagcttttggagtattttcaaccggagttagttgaggtcaatggcgtgatgaaggctatttgcaaatattgcggggcgatgttgaggagttcaagcacaaatagccttagaaaccacgttgcggatacatgtcctaaaatttcagttgaggaccgcaagcaattcattgctacaatggaaaaaggaccagcggaagcttcatttgtgtttgactctcaaaaggctcgtgagtgtatggttaagtggtgcatcagtgccgaggtcgcattcaacaagtttgacgatcctttctttgctcagtggatggagtcaatgcagccatcattcagcggtgttgggcgtcaaacaatgcaaaatgattgtattaccagattcaagatgatgaggcaagagctaagaaatgagctacaaagtcttaactctcggatttgcttgacaactaatctttggacctcaaatcagaagttgggttatctttgcttgacagcccactacattaatgcagactttatcttgaaaaaaaagattattgcgttcaaatatttgaaatatccacatacaggcctagcaatcaaagaaggaattacagagtgtctcaaagagtgggggataaaagagaagatgtttactatcacattagataatgtttctaacaatctgtcagtgcgtgaccttcgagaaagtgggctatttggaggcgatcttcgtattgtccaatgttgtgcacacatattgattctcttagttcaagatggaatggcaattgctcatggagcaatctataagattcgtgagctggtcagacatatcaattcctcaccctcccgcatacaagcttttaatgggattgctgagaggtctggattgccttcaaaggatagattaattcttgacgttccaaaccgttggaattcgacacacgacatgattatggaggccattgagtacaaggttgtcttgaaaagatatgctgaagaacaacttgagccttcaccaaatgatgaagagtggacaaattctgaggcaattggagagtttcttgaggcatttgagaaagctacaaaagcattctcgacacatagaagtccaacatctcatttgtttttacataatgtgctatgtatccatcgaactctgagaaatacaaattggcaaatcaattgtgtgcttaaggattcggcacgggcgatggatgctaagttcgataaatactgggagaagggcaagtataacatgacacttgtcttagccaccatacttgatccatcaaagaagatggattttttggacttcttttatgagaagatgtctcaatattttgttgacatccagataaacgtggtcttggttaaacaatgtctcaccaaattatttgaaaaatatgcaacacttgttcaaatagataataaaagttcaccttttattgatataaggactagtaatttaggctcaacagttcttggaaaaagaaggttggatgaagaattttctcaatggtcccaaataagaggaagacgttttccaaagtctgagcttgacacatacttagaggaagaacttgtgagaatagatgaaagatttgaaattctaaattggtggaggacaaatgcaaacaaatacccggtgctttcagctatggcgcgtgatattttagcaatacctttgagcactgttccttcggagtttgcgttcagcgctggtggtcgtattcttgatgataatcgaagcacaatgacaccagaaacacttgaatgctttgtatgctgtaaggattggttatatgaatacccaaatattcaagcttagttgatctgacttccttcaaacatgttgaacagtacggcattcaaggttcatgtgatgatccataattatggattgatgtgttgacagattacatctttctacctttgttg

SEQ ID NO: 31746 - DNA, 783 bp, Zea Mays
cccggaggtccccccaatgtcggacggacgacgggttcacccacaccccctgctggcggatcccccccctcgcctgcctgcccgcgcgccaagaactccattcacctccccccacactgccaggagcttcgcccggcccccgggtgccggacggccaccaggttcacccgtgcctgctgccggcggattcccccctcccccggtggctaggagctccatctgtgttgtcgtcgtgtgctgctgggcgtctcccccaatggcgttacagcatgggcattagagaactctatgacggatggggagctactctggcgcgcgtcgttcaccccggcggtacctattctgacgcgtatggaaggttgccttcatgttcctcacgcaagggcaggtgccgctcagggggtgcctcactactacatctacgtccacgcgctatcggccaatttcaccttcgaatcaatcttctcccaacgccaaatacctagtaagactcagactcaagtttgattgattgctatttgctaccaacaaaaaataggtctcgacaagaaagttttattgtacttcagatttgtatatatgatcaacatctctgtgtgcagtatgcttgagaatagctttaaggctgagtaacaaggttcatcatttttaatgcaccaacaccaatgagccccttctcagcacaatgaaattgtttacattatcttcagggccagtctacaaactttcacagcctgaagtttatgaacagttaatacacatcggttctaacttctgtgtttg

SEQ ID NO: 31747 - DNA, 5012 bp, Zea Mays
tttactcacactagtctgctcctcaggttttgcagatttaacacttcttatcatggatggcaagtgcaaagtcaataaggaaatagatggcccccttggaccacctcctcggtaagggggacttaaattctcaccaaaagtacctcagaagaaacttgtcaaggttgtctttgatagggaaccagttgaggagagcaaggaagaagatgtggataaggagtaattgatgaaacttaagatgtcacagcttgcctcattttgcagaacaagtattcctctacaagaattaagtctgaggaaaaagcaaaaagcggtacaaaggttgcatttggacaaggaaactcttcttatgcaagatattttcccatgcccaaaaaggattcttcagcaggtggaacttcgaagttaccaaaagaatatgcagaaccatgggattatacccatgattatcatgttactctcccactactctggaaatcctggtatattttttttagtctttagtcgaaattgcaagacattttcttcaactaaccccaccattcctacatcactgacacagaagttctggatgaggaagagtttggagaatcctctgccagcaggactgaagatgacaaattgccctatgcagtactaaggaagtcacattaactaactgtgcaggtttcatttggctcgaactgcatgtttccccaggaggttgcagcaaccaacaccagagaaaaacattgctgtacggtggggggagagcagcaagcgtgcctgtcgtcgccccggatattgactccatgttgggttctgttgacaagatgaaagaatagtccattttgtattatgccattacaagagagttttgctcccttatagagatgtgcagctacatgctggatacccagtcaaacaagggacaccaacgaaaggatgtctccttggacaactacagcactcagagatggaataggcattctgatcgtagtagtcatcttggatgcgacgttgcaaaggatgggatagaagaatcgcacatctgacgggagaaaacgcgagcaagcccttgcttgaccagtctcaagaaagctcgtctacggctctgctcctcgccggcgatgacgcccgcggagacctccccgccggcgccacctccacgtgcttctcaccctgtctcctccccgctcctcctacaagaccccacaacccaggccacgtgcccttggagggagcagctcaccgtccgtggcgtcgccgtggctgcggcgctgggcgcgctgctctgcgtggtaatccaccgcctcaacctcaccgtcggggttataccggcgcttaacgtcgcgtcgggcctcctcgccttcttcctcgccgcggcgtggcgtgctgccgccgggtggctagggtttggccgcgggccgcccttcacgaggcaggagaacaccgtcatccagacgtgcgccatagcatgcgccggcctcgcgtttagcgggtgctccgcctcctacatctttgctatggacaggaagacttatgagctcgtgggaccagactatcccggtaatcgagccgaagatgttaaggatccttcacttggctggatgatcagtttcttgttcctcattgctctcgttgggccatttagcattgtcttgcttcgaaaggtaatggtgattgattacaagcttgcattccctggtggaacagctacagctttgatgatcaatagcttgcatgggaaaacggatggtgatcttgcagggaaaaagctgcactgccttgtaaaatacatgggcattagttttgtttggagcttctttaaatggttctttagtggtgttggtgactcttgtggttttgacaatttcccaacatttgggcttgaagcttttaaaagcacgttttatttcgacttcagtcctagttatgtcgggtttggttttatttcccctcatattgtaaactgctcagttttccttggatctgtcatatcttggggctttctttggccatttattagtgcacaagctggtcattggtacccagataaccttggtaacagtgatttcagaggcctatatggttataaggtcttcatagccatttcgattatacttggagatggcctatacaacttggttaagatatttattgtcattgctagagaattatgcagcatgcaatcgaaacaacatgagctgcctgttcaagctctggaagatgacgggagttgtgaacaactagcagatgagaaactacaaacagagatattcctcaaagatagtatatctccttggtttgctgcttctggttacattgtcctggcagcaatatccaccgccagtgtgcccgccatatttccccagctcaagtggtaccttgtcctcctgtgctacttcttcgctcccgtggttgcgttctgcaactcctacggaatgggcctcaccaacctgaaccttgccccgacctacggcaagatcgccctcttcgcgttggcctcgctcgtcggcagtgatggcggtggagtcatcgccggccttgcagcctgtggcatcgtaatgtccgttgcctgttccacagccgatctaatgcaggacttgaagagcgggtacctgaccctctcgtcgccgcggtcgatgttcactgcccagctgatcggcatcgcgctcgggtgcgtcatagctccgctcacgctgtggctcttctggacagccttcgacatcggcgaccctgacggggagtacaaggccccctttgccatcatgttccgggagatggccatcctcgggatggagggcttctccgcgctgccactgcactgccttgacatctgctatgccgccttcttcctcgccttggccaccagtctcctcaaggacgtggcgcccgcaaacgtgtccaggttcatccccataccgatcgctatggctgcgccgttctacgttggcgcctactttggcgtggacatgttcataggcacggcgatcttgtacgcctggcagaagctgaaccgggagcaggctgatggttacgcggtggctgtggcgtccgggctgatctgtggagatgggatctggagcatcccttctgctcttctgtccatcctgggagctgttccacccatctgcatgtcgttcgaggcttcctctgctcccaggcaatgacgaatggaccagcagaggccacctgccctgcttagaagctcacaggtagagctctgcatccccaggacaacactccacgtgccctgcagcctgtgacgtgtcaagctgtgaggacaccacgcagtcatgcttctccttcccgcgtctctcacatcatatggagcacaggggcgagcggcagcagcagaaggtcggcagcagccatggagatgctgagcatgctgaaggtggggtacaccatcctgcgcagcgagacgcccgcgacagacctcgtcaacaccttcatggactgggcggcgcgcaggtcccttatgctcctggccatcttcctcccgccgtactacatctacaagctcaccacgtctgcgttcgctgctgccgtgccagaggacgtcgcagggaaggttgtgctcatcaccggcgccgcctccggcatcggccaggtatgccaaccagtaactcctttgtgtacgcgtatttttgctgaaacaaactaaaccatggattcccatagatcttttcatgtcattttccttaataacaataacaacatcaccgacgacttcgattgcaaaaagggggattttgacttgcactaattgtgatgcgtaactcatggctaaacaaacgccaacatgctattgtgctttgccatgagctcgtagtcgtatctgtatgactgtatcccagcaaatagcttaccagtacgcaaagaaggtagcgagactggcgctagtggcgaggatggtgggaagcctgcatgatgtcgcggcgagagccagggatggcggctcgccagacgttctggttgttgccggggacgttgcgaaaccagaggattgccggaggtttgtgcaggccacagttgaacatttcggccgattggatcatcttgtgaacaacgctggtgtagcaaatgtctgctggtttgaggacgtaccggatgttgctgctttgaagcgagtcctggccgtgaacttctggggcgcagttcatgcgacccactgcgctcttccccatctgaagaagagcggcggtgggaaggtcttcgtcaactcctcggctgcggcggcgctggcaatgccaggaatgagcctctacaattggatgcatgctattgcaggccagcgaggctgctgttctcaacttcttcgagaccctgcgggtcgagctccgcgacgaggtcggcatcaccatcgcgacttccgggtggatcgtgtcggagatgaccggagggaagcagctgtccaaggaagggacggtggaggtcgccgtgcggtgcgccgaggccaccgtggacgccatctgccgcggccggcgccacctcaccgtcccgctgtggtaccgggcgctgttcctgtggcgggcgctcgcgcccgaggtggtggagttcagccagagactgttgtgccgacggaccgcgggcggccgcggtcatcaggcgaagggcaagaggttgcaggaggtcaccggcgccgtccagccggcgccgctgcacagctcggacatcaaacgggagtagtcgtaggcttcggtaaggcagctggcagtgacatggtgctagctgctgcttgtctgttcggtcaaatgtggacgagttgtaaatcagctgtcaccttcgttcgttgtgtgactttaaacttcgtgcatacagtatgttgttgtcccgatttttcttcgtgtgggcggagttattgcattgcatagatagattgctctaaaatccgtagtacgctaggccaatcactaggctaggtgcaacaaaacaaatatacgtgtgagctgctaaaagtcacttgtttttttagttttgctacaactctttttttttaaaaaaaagagacgacgagtatactaaaa

SEQ ID NO: 31748 - DNA, 1903 bp, Zea Mays
caaaaaagctgaaacaaacaggggctttgttgcctgctgctgccttgctatctatctatacaccgcccgcaccttccattcctcctcctccgaagcagcaggcagcagctgcatcgcacctcacacctctcgtgtccatcgatccagccgcccgccgcagctgcagctctcactgttgctgtgccacctcctcgtcgcctgtagtgtcgacagaaaaacgcccgctgaatgagagggaaggaacggaagctgcagcgggcgcgcgagtgcaaggactaggactagcggttgcaacgtcggcgcgcgcgcgcgtgcggcgtacgtcgggcatggattgggatctcaaggcggtgggcgcgtgggacctcgcggagctggagcaggaccacgcggccgccacggcagcagcggggccgtccgagggccacgccaccgatactgccgcggcgggcacgggcacggggacggggacggagagccgcccgcccggagcaggggcacccgccgagtgctctgtggacttgaagctgggcgggatgggcgagtgcgagctcggcgcgggcgcggcgacggcctgcagggagagggaggccgcggcgggggcgacgaagcggccgcgccccgccgggcagcagcagcagcagtgcccgtcgtgcgcggtggatgggtgcagagcggacctgagcaagtgccgcgactaccaccggcggcacaaggtgtgcgaggcgcactccaagacccccgtcgtcgtcgtggccggccgcgagatgcgcttctgccagcagtgcagcagattccatttacttgcggagttcgacgccgacaagcgcagctgcagaaagcgtctggacggccataatcgccgccgcaggaagccacagccagacaccatggcttctgctagctctatcacaagccagcaaggcacacgattctcaccatttgcgcctccaagactggaggcgagctggccgggggtgatgaaaaccgaggagagtccatatcgcatcactcaccaaatccatctgggctccagcagcagcagcaggcagcagcatttcgtgggagccgccacgtctgcctacgccaaagaaggcccgcgcttccctttcctgcaggagggcgagataagcttcgccaccggcgtggtgttggagccgccggcggcggctccagcgtgccagccgctcctcaagtcgggagcaccaccacccgagagcagcagcgccggcggcgggaagatgttctccgatcaggggctgactcgcgtgctcgactcggactgtgctctctctcttctgtcagcgccggccaactactccggcatcgacgtcagcaggatggtccgcccgactgaacacgtccccatggcccagcagctcgtggtctcgggcctgcagttcggcagcgcgtcgtggttcccgcgcccccaggcttccacgggcggctccttcgtctcatcctgccccgccgtgcaggtggagggcgagcagcagctgaacgccgtgctgggccccaacgacagcgaggtgagcatgaactacggcgggatgttccacgtcggcggcggcagcggcggcggcgagggctcctcggacggcggcacctcgtcgtcgatgcccttctcgtggcagtagtcgtcgtcacttgtcagcagccgctgcgttctctcatctttcgcgcttcagacgatctggtagggagatactggctttagtgatcactgatcagcattgatccccccccccccccccccactttttgtcgaatcggctctgctagccagcattattgtggacattttttgaatcgtctctagaatagtcgccgatgcgtgccttagcagcgcacagacattgttagtttggtcgcaacgatcaatggcatgtttgctcactttaca

SEQ ID NO: 31749 - DNA, 2269 bp, Zea Mays
ctcgctgacaactcactggcataaaccaaatattgtacagcattgtattgagctaaaaaaactctcggaactcatgcaaagacaaaagaatggatgaaaggaccggagatatttaagccgcccagcgcccacccacacccctgcctcccaggctcccactagaaaagcacacccaccttctctctcttcaccagcctgtccccaacaatgcacaccaacatccactctctcgtcaggctcctctcccccaaaaatgagcgctgagttctgcgctgctgccggtgtcgtggccatggagctcggagtcggagatgtgctggggctgcagcaaggcatcgcaatcaccgcgccatcgcccagggacagcgacctgggtcttctcaagcgagcaggcctcacccaggctgcggctgctgccccctacccctcccccttccttgacgaggagaagatgctcaggttctccaaggcggctcacacattgcactcaggcttggattttggaggcccaggtgagcaggctttcctgctgtccaggaccaagatgccatttactccctcgcagtggatggagctggagcaccaggctctgatatacaagtacctcaatgcaaaggcccccccataccttccagcctgctcatttcaatcagcaagagcttcagatcatccaatagaggtactgaaccagaaaactaaggttttctacttcaaaactactggcacttgcaaccaaccaagatagaagagaaatattactttgcaaaggtgcagcgttacatggtaaacaaaaaatgctggcagtggcagctctgtagtatttgaaactgcaactcattaggttcaatgtatgaatgccatggaatttcaaagatattacaccaaaaaggaaccaccattttgtacctaaacactcgtatgccataaaggataaccacagtaatgctttgaatatagatgccagagcttgacagacttctctaacgcagtgagctggaggcctctgtatcaaggctacacaaatgcagactctgacccagaacctgggagatgccgacgaacggatggaaagaagtggcggtgctccaaggaagcaatggctgatcacaagtactgtgagcggcacatcaacagaaaccgtcaccgttcaagaaagcctgtggaaaatcaacctaagaagaccaccaaggaggtgcctgctgctgctggctcattgccatgtgctgggccacaaggtagcttgaagaaggcaaaagttaatgactccaagccaggcactgtcagctattgggcagatagtttaaacaggacaatgttgagcagagagaaagcaaacaaaccgacggaagatagctctttgctgcttacttctacgaacagccaacccaccttgtccctgctctctcagctgaagcagcaaaacaaaccagataagttaggccccacactggaaaatgagtcaaacccagacacaatattgaaagcctggggtggcaaccagcctagccacaagagcatttcctctacagagcgccatgatgctgaatccctccaatcagtccttcaaaatttcagcctagcccagaatgagaagatggagtcagaaaagaacaaatattctgattccgtgctagtttcgtcgactttctattctgcagacggtccaagagctacctgccttacacctaacatgacacaggtgaagcaggattgcatatcaagctcttgggagatgcctcaaggtggacctctaggcgaaatcttaacgaactccaagaatagcaaggacttaagcaagtgtaaaccaaggtcatatggttggttgttgaatcttgaccatgcaccatgattcctcaatccatgaagagcttgacatagatatcccatcatgtaggcaaacaatggtcagaaaaaggttatgaccacattgcttgccccatgcatgcttgctatctacatttgtatttctgttacgtagcatttagctagttgaattatcagttcttctggatacggctgtatcttaaacaagttctagtttgtgtcagatgatatcttgcttgctagatgtttcatgttccactttcaacaggaacttcagacaaccactttgattgacagaaaactgtttgaagaaccagctctagtaaacaaggttccaagaaactacatgcacgcttttctgactcttgtttttttttcaaacatacaggagagctgtgtcatcattatattaaatacgagtacatgttaaacagatgaccatgta

SEQ ID NO: 31750 - DNA, 9683 bp, Zea Mays
ccgcatcggcgtaggtgatactgcatcgcggcggcggggcggcggaagtatgaatctactagtcctcgttgccttcgggttcggcctgttttgtttgacgaaagcgactcttacatgaggcttacgtacttgatcaattccaccttctgttcaacttgatcaattctcgaaacaggtatttttaccgttgctgttggccatggtttttattataagggctagtttgggaacaccatttttctaagggattccaattttctcaagaaaaaataaaataattttcttgggaaaataaaaatcccttgagaaaatgaggttcccaaactagccctaaaagagaagttttcattttatgaccaaataatatattttcgtttgactcttaacaaaactttggctcatcccactcagttttttgaactaatcaatattggatgaactttgccttttttgtttctcctcttatagttgaaattccaatacacttttcttagaatgatagatggcatagtgtcattattaaaaaaatacaacatgttctattttgtgtattttatactttaggatgttggaatgcatgaaaatttattaaagaccaatttaaattcggctagattaaacctaatcaaataattaagagggagggagtaaaacgatcctattttttgttcaggggtagaacgagcgatttgttggtgtcgattcgggtgccaatcactgcgatgataatcggtggcggtgtcctctgcagaggctcggacggttccacggccaggggccgaacggtccgcgacctggtgcagggatcgggttcctacctgatgggtcggacggtccgcgcctgatggccagacggtccgcgcgtgcgcagggacggcgaggttcgccggcggcgtctggatctcgctcccgggagggaccccgtcggggaggagagatcctaggtgttgtctagactcggcaggccgacctagacatctctaatcgacgtagagccaaagagaagcggagaatttagggattggaagactaaactagaactaaactataattactcctaaatgtaccagataaaatgtgaattgtattgattgtaggttctaggttcgattgatcatctttaatcggtcgtattcctctgcatttatagaggagggaggctggacccgttacaaacaaatctcccgagttaattccgcgaatttagccaacaaccatagcaagaaaaaataaaataattttcttttgaaaaatgaaaatcccttaagaaaatagggtttccacactagccctaaggtggaatacagcatcaaaacgaacttaacatttcattaataatgtatgtcggaactcctctggatggtaggattctcaatgggattttggaggattctaatcattagattgtcttaggtagatagagtaaaataggagacgcagaactatagaaaaaattgtttgtagactgaagtttgaaatagaagatgagataggagatgtgatagggaatctgttgaaactagccttaagattttgatttcttaaataaggagcactttgaaacgaatgaactgtgttctcccattttcattagatccaatcctttgttttccctatatgtgttttttgggttccaaagaaatcattatctaaaaagaactatattctaatagctgaataatctctttctatgttgatccatgaacaaaattttgactcgttttaattccttgaaatatttaaattgtttcatctaccgcaatctaaatttgcatttaagacctttccaagcactcaaacctccacgctagattctgtttagaacgtcctaaagctaatagttagcctgggtattagaccgcctccaacaaaactcctaccaaactccttgtttcaactataaaaagaagaagatgtcccaaggggcacggaaaataatcagaacataacccggtaaactggacgtgaggtattatcgctcaggagggctcgaatatatataaattttatgtctataggttgttcgcttcaaattaaaatcagttgtttgcactgttgcaattgtaatttatagaggcaaaaatactgtagaatataagccgatacaaattaaagccaagcgaatagggtgttcatatagacagaaattaattcgagatgcagcaagcaacatcacattgaattattttgggtgatagctccgtggaatttgctttcttggcaaatgaaaaaagtggatcatgacgtatccctctttcaagatgctccctacgttcataaaagatgcaactatagaagaatttgggcgagtcaaactagtttaaaaatatattatttggtcataaaatgaaaacttctcttttataatactccatctgttttaaaatataatttgtttgatattttcaaccttaagtgttattcaaaaaattatgagaaaatgaaaaaaattaagccatatgtaatgtatatttgataataaacaaaaccacaataaaattttatgtttttcacatttttttaataaaacgagtggttaaacttgagattgaaaaagtcaaacgaattataaattagaattataaattagaatggagagagtaaaaaccattgcccaaaagaacaattaaaaggcaacatatcaagtgcaaaccaagtttccatgcaagctaagtgcaaacaaaataacaaaagtcacaaaaaatcttaaaaaattatagatgtacttcattgtctactctaccactttataaaattttaacttcaaattcatcatatgctaagagtattggagtgtgaaccctaaccctaacaggggttgggtgatgtattaaaaggccaagtaaactgggccagacccattacagaggggaagaccccaaacctattctaaccccccccctgcagtcacaactctatcctgtacagatgttgagactggatcgaaagtctaaaaatacactcgacggtaaccccttggtgaagatgtcggcgaactgcagcgtgatggggacgctgagaacccgaacgtcaccggcagcgacacgctcgcgaacgaagtgcaggtcgatctccacatgcttcgtgcgctgatgctgcacggggttggtggagaggtagaccgcgctgacgttgtcacagtagacgagggtggcgcgctagagaggactgtggagctcgtggaggagctggcgcagccaggaggcctctgccacgccgttggccacggcacggtactcggcctcagcgctggagcgagagacgacgggctgacgcttggcggcccaagagacgaggttggcgcccaggaacacggcgtaaccgaaggtggaccggcgtgtgtcgggacagccagcccagtcagcgtcggtgtagaccacgagttccgacgtcggggatggtcggagaaggaggtcgtagtcgagggagccgcggaggtagcgcagaatccgcttgagcgcggtgagatggagctcccgcggagtgtgcatatgcaggcacacctgctggacgacgtatgcgatgtcgggcctagagaaggtgaggtactggagcgcgtcggtcatgctccggtaggacgtcgcgtcggcgaccggaggcccgtcgtcctcagagagcttcgcctgagtgtcgacaggcgtggagcagggcttgcagtctgacatgccagcctgctctaggatgtcgatggcgtactggcgctggtggaggaagagaccctgaggccggcgctcggcggtgatgccgaggaagtggtgtaggggccccaggtccttcatcgcgaactcccgctgaagggcgacgatcgtgcggtgtagaaggtcggcggtggatgccgtgagcacaatgtcgacgtagagcaggaggtagacggtgtcgtcgccgcgccggtagatgaacagggacgtgtccgacttggcctcaacgaagccgatggaggccaggtaggaggcgaagcgactgtaccaagcccgtggcgcctgcttgaggccgtacagggaccggttcagcctagagatggcaatgggtacccgaaacccgaaacccgatgggtttttaccccattagggtacgggtttgggtcaattttcgtacccatgggtttgttaatgggcataaatgtatacccgacgggttcatgggtacgggtttgttcctatagtacccaaacccgtgaacccgtgggttttttaaacccgaccaaactagtgcatattgtcattttattttataaacgaacaacaaacttgttatctacctttttacttcctaatttttatcaaatagtgaatgtataagtagttggtgagagtgttgcttgcttgatattatagttattactagtgttatatatgtggtggatgtataacttagtgcaaggtaacttgattatacaacttattatttgtatttaattctctctactaatatttttataccaaatcatgaactcgttgttcattacataaattttggaccatgatctcattaatcattgcgatacttattgattataaaaagaataagcatgttggagataaaacccgcgggtaacccgtgggtacccgctaacccgatggatacgggtttgggcaaaatttcaaacccgtcatgggtacgggttttttaatgggcataaatatttttcacggtacgagtttgggatagcaaaacccgacgggtttgtacccgttgccatctctagttcagtcggcagaccagatccggacggtcagcgtcgacgaagccggtgggctggctgcagtagacagtctccgtcagagtgccatggaggaaggcattcttgacatcgagctgatgaattgcccagtcacgggagagggcgagggagaggacagcgcgaacagtggcgaacttgacggcggggctgaaggtctcgtcgtagaccactccggggcgctgtgtgaagccccgaaggacccaacgggccttgtagcggtcgagggagccatccgaggtcagcttgtggcgaaatagccacttgccggtgaccacgttggtgcctggtgggcacggcaccaggtcccaggtgtggttggccaagagggccgcgtactcctccttcatagcacgacgccaatgtgggtcggcgagggcagtgcgaacggaggagggcaccgaggaagcgtcgggtggagtgctagacgtatcggctgccaggatcagtcggtcgacggggcgaagaacgccagcggcgcgtcgagtcaccatcgggtggacgtgtccggggtcgcggtggatggcgaccgggtggtatacggacggctcggagcggaccgccggaacgtcaagagcggcgggtgtggccggctcgcggcggtgatagacgacggcggggtcggcgaagcgggtcgcgcgtgtcgacgggcccgagtcggggggcgccaaggtagtggcgtggccgcggcggtggtagacgagcgtggggttggcgaagcgagccggggtcgacggggccgcgcgtggcgcaggcggggtcgacgtggccacgcgtggcgcaggcatgatcgacgtggccgcgcatggcgcagaaatgggcgcgagctgtggcgtcgtggctgcacgaggaacaggtaacggcgcaagacggggcgccgggggtggggggaaccgggtcggactcgaggagggagtcaagatcggtgggtggggtggagcctgcaaggggaaacacatcttcgtcgaagacgacgtgacgagagatgatgatgcggtgggaggtgaggtccaggcaccgataccccttgtggtcaggggagtagccgaggaagaggcagcgagtggagcgaggagaaagtttgataggggcagtagcggaaatgttagggtagcaggcacaaccgaacacgcgcaggtggtcgtaggaaggggctgtgtcgtacagggcgaagtgaggtgtagggtggctcaccgccttcgagggaagacggttgaggagatgtgtggcagtatgaagggcctctgcctagtaggtggcagggagagacgcctgaaagagaaggcagcggatcatgttggtggtggtgcgaatcatgcgctcggcccgaccgttctgagcagaggtgtagggacacgagagacgcaactggacgccgtgagtgaggaagaaagagcgggaggcgttgttgtcgaactcacggccattgtcgcactgcagggcacggaccgggcgccggaactgggtggatacccaggcgaagaagtgagtgagggtggtaaacgtgtcggacttcagccgaagggggaaagtccaaaggaaatgggagtagtcatccagaatgactagatagtatttgtagccggagaggctaaggacaggagatgtccagagatcacagtggacaagatcaaaggcctgaacagccctggacgtggaagtggaaaaaggaagacgggagtgacggccgagctgacaagcatgacagaggcgctcagaagagccccgagtatatgatatgtcggagtggccggaaagctgggacatgacgtcaggtccagggtgcccgaggcgacggtgccaaatggcggaggaggtggtggtagtagtaagagcatgtgatgtggtggtagtagtaagtgcaggagaggagactactctggtgtggggagtggagggcaagtgaagagaatagagggggccggagctgtcacagcgagcgagcacagcatgtgtgggaaggtggcgtatggtgaggccccaggggtcgaactccatagagcactggttgtcactagtgaagcgacgaaccgagaggaggggatgagtcagtccgggagcaacaaggacgtcgttaaggcagaatggtcctggaagaaccgatgtacctactgaggtgaccgggagggtggaaccgttgccgacgacgatggaggtaggatgtgaggggtggggtggatgggagtggagtaacgaattagtggtggtggttcggggaggtggaagtggcgaaggtacggtgtgagcggagagggcaagagaaggtgccccgacagaggcactaggaagggagggagatgacacgggctcaaccgctagggaggcgatcgcagcacgtgggaagacaagcggtccaggcacgtgacggcccgcctgagggtggacctcgacgcagtcccgaagaatagggttccagactggatcgaaggacacgaacatgccccggatgagctggccgtcgtggaggaggacacgcacagtcacgagagcggcgggcgaggtaaagctcatggcgaccggtgtgggagggtcgtgtcactgctgggccggggcgcggtcacccggcgcagggaggcgcggactggacagccgggcgcggaacaggaagggcgcgagcaggaagggcgcggctggcggtgggggcgacagcgcctgagctggtcggagctggaggggacctgcagggggcggcggctggggcgcggatcttgccgtccgccgccacaaaccccagattgagatgatgagcgacgcgacggaggtgaagaacagcaggacgaaggacgcgccgacgagccccagcagcgactcgcgatcggagaaggctcggccgaagagggcgacagggcggctctgtcgcgacgctgggcgcgcgcgggtgcagggctcctggcacggggaaggagcgacggggtcgcgcggggctgctcggctcctggcgcgagtgcgaccgtggtcgcgtcctggcggcggccgtccaaggcgcgcctgggcgtgggtccggcggggtgcgcagacggtggctcggccgcagcctgggcgggtcgcggggcagagagcggcgccgggcgcggctgctgctcctggcggcgcgtcgggccgcgagcttggggacgggcggctcggccgcggttgctgcacggggccgaggccagtcggtgcggcggcgcgggctgagcggcgtcgggcgcgcggcgtcgggagtggcggccctggtggggtcgagcgacagtcccgggagcggcgtctcgggcccaacgtcgggggcgcggctacggcagccctggcggcgctcggcggtggggagggagagccggcggctggcggcaggagaggtgtcgtcggttgggggccggcggctgggagggactagagtgggaaaaacctaatctgataccatattggagtgtgaaccctaaccctaacaggggttgggtgatgtattaataggccgagtaaactgggccaggcccattacagaggggaagaccccaaacctattctaacaaagagatacagaaaagaaaaattctgatatacaaaaaagtgaatattatctcataatgttcttttttatcttttaatatacgatggatttgaaattaaaattttatacggtgctagagtagacaatgaagtacatctatatttttaagattttttttgtaacttttgttaattgttttacacgaagtttgtacgaaaacttggcttatatatgatatcttgcaaaaaccattaaaaatacctgttttgagaaggtattactacgccgtaagctgaacagaaggcggaattgatcaagtacgtaagccttatgtaagaggcgctttggtcaaagaggacaggccgaacccgaaggcaacgagcaccagtagattcatacttccgccgccccgccgccgcgatgcagcatcacctatgccgatgcggcggaggcgccctcgccgctctctggcggctccgccacaacacttcctctgtcgtagcgtcgcctcctgcggtctagagcgaccctgcctttctccacggttctactccaccgccgagatgagccagcaactccctacgaacctagtggagatcatggagcagagaatgaagttgatcgagcagaggagcgcgtacctccaagagcaaatcaaccagacagccagccgcctcgccggaagagtactcgagggctaacaaggagttccacaagctggagagcaccatggaattgatcaaagacctgagatcgaaacaggaggaaatcgagggtctcaaatctttggtagcaaatgatcgtgaagagaaagacatgtgtgagatggcagcagaggagcttcttgtggctgtcgaggaggagaaacgattgcagcatgaactgtttagatcgctgcttccaaaggatgaagcagatgaaaaggattgcatattggaggtgcgggcaggaactggaggagaaagaggcttctttgtttgcaatggatatatttagaatgtacgagaaatatgcccagaagaatggatggaaatttgatgtcattgacataatggagtctgctgtgaaagggtacaaggtacaacctttgttagtatttcccagcttttgtttggatatatacacacgtttttttcgctgtagccaaaggtattttcaccatttctcggcacgaacgaacgaaaccagggaacctaggatgccgagccccagctttggatggatggcggcaaggaatgcgcgagacgcgcgccggagcgtaccgcctgaccgagcgagcagcagctggccgcggaaccaaccattgcgggagcccgcagctcctagaaccgcccgcctttgttttgacacacagacaacgagaacaaaaccctacgggcgaagggagaggaagcgggcaccggaacgcagagcgccagcggaggcgcctagcggaccgaaggagaagggacgctcacc

SEQ ID NO: 31751 - DNA, 3637 bp, Zea Mays
caaccgctccccaccgccagccggatctcctgagaggcgacgccgcgactgccggacggcaaccctgctcctccgccggtgccctcccgcacgatgagccgcagcgggcctcgccgcggcatcttcgatggcctccccatcccggccgacaaatccgaaagcctgtcgcggatcgacgagagctgggcggccgcgcggttcgactcgctgccgcacgtcgtgcacatcctcacctccaaggaccgcgagggcgagatccagttcctcaaagagcagagcgacctcatcgaggacgtcgtggacgaggtcgtgcacgcctaccaccacggcttcaacaaggccatccagaactactcccagatcctgcggctgttcagcgagtctgcagagagcattaccggactcaagggggagatggaggaggcgaagaagctgcttggcaggaagaataagcacctcggccagttgtggtaccgctccctcacactgcgccatgtgctatcccttttggatcaggtcgaggatgttgccaaggttcctgctcgaattgaaaacttaatggcagagaagcagctgtatgctgcagtgcaattgcaagtccaatcagttctgatactagaacgagaaggccttcaagcggtaggtgctcttcaagatgttcgttctgatctaacaaagctgcgaggagtactattttacaaaattttggaagagttacatgcccatttgtacaacaatggcgaatatagctctgcagttttaagtatggttgacagtgagcaagcaccgacttctacagctactgggcgattggtaaacagcatgcaacctctttcaaggagaactagatcaattaaaggtgacaaccacattggtgggccagtagatgggtttccaaaagttagttctgttgatggaggctcttcgtttgatggcccagatgataatagcttagatatgagtgaaagtgatggacacactcgaaaggattcgaaaagtttttctcatgaaatcccaatttttctttcctatgctacaccagatgagtttcttgaatcaatgataaaggcagatgctccccttaatgtgaagtacctgagaacattggtacaatgcttatccatgcttggaaaggttgcagctgcaggagctgtgatatgccaacgagtacgccctacaatccatgatgttatcacttcaaagattaaagcatgttctgaagacgcttcaaaatccagtatgggcaaagctgcaaaaacgaatgatgtgttgcattcaaatggacccactccccggtttcaaatgttcacacagaaaacaaagagtggcgcatctgtaatggcagcccaactagttgtcagtcccatttcgccgactatggcacccactggagatgctcagcgtgcagctactcaacttcttagatcaatatttgaatgtcttgtagagatacttgagaaccatattattgttggagagcttcttgaacaaaaatcaacatctgaggttgataatgtaaacacacctcatattgcaaatggggatgcaagctggaatccagactctgaatctttccaagctactggtggtttcagtgttgcattctctctatcagtcgtgcagagtgagtgccagcaacttctgtgtgaaattttgcgggcaactccagaagctgctactgctgacgcagctgtccagacagctaggcttgcaaataaggatccagtgaaggaaaagagggatggatcagaaggcctttcttttgccttccgcattactgatgcagcaaccccagcgtcaaatgaaggtcaaggatggcgaagaaattccaatgtgcctcaagaagggtatggaacagcaagtgtcatacctgaccaaggaattttcctagccgcgtctgtttaccgtcctgtttttgagtttatgaataaaatagggttgatgttgcctcagaagtactcacaacttgggagtgatggcttattggcttttgtgaataactttctgaaggagcacttcttgccagcaatatttgtagattaccgaaaatgcgttcagcaggccatatctagtccagcagcatttagaccacgtgtacatgcaacatcagcatatagttcatcggtggaacttggacgccctgtgcttcaagggcttctcgccattgatataatagccaaagaggttcttggatgggttcaattgatgccaaactatgcgactgagcttgtggagtatgtacgcacatttttagaacgtgctcatgagagatgtcgtgcatcatatatggaggctgtccttgaaaagcaaagttatattctcctttcaaggaatgacattgagagtttaatgcgcctggaaccagcaaacatttctttgcaaaattctactggtgaacatgataacaatgcaacaggtgcagaggcagtcgaagtagagattgaactaagtgatctcttattagatatgtgcccaataaaacaggaaaacttgatccatgacgaccagaaactgatattgttggcttctcttagtgactcattggaatatttagcagattcagttgaaaggcttggggaatcattcataagtccaccaaccacttcagagagcataaatcatagccatggtcgacatgcccgctcatctagtgcaattccaaaaagtctcgcgtctctggctaatgagtacagaaggttagctgttgattgtgtcagagtattgagattggaaatgcagctagaggcgatataccacatgcaggaaatgaccaaaagagaatacgtcgaagatcaagatgctgaagatcctgatgactttattatctcccttacaactcagattgcacgacgggatgaagaaatggctccttatatcacggaatcagaaaggaattacatatttggtgggatttccagtgttgctgctaatgcatcaataaaggcacttgctcaaatgaagtcaataaacttgttaggagtccagcaaatatgcaggaattcgatagctctggaacaggctcttgcagccataccttcaatagatagtgaagcagtccaacagcgattggatcgcgttcgaacgttctatgagttgttaaatttgccttttgagtctttgcttggattcatcgcagaacatgaatatttgttttctgctaaagaatacctgagtgttctaaaggtcaatgtgccgggtagagaaatacctgcggatgctgaacgacgcatctcacagattttgggtcactagatctaatcagacacaatggtgctatttttgactggttatgccttatgtgggctttggctaccaaatggttctccacctgtttccatggcggtgtttgtgtagatttagctggtttttgctatttagtaattttgtttccttttgtatttcacgtgatatattcttttgtatgtcttatcagttatcattgattgtaaatttgtagtgttccggataaaattttcattattgattattgtaaatgtgttatctgtctggatgcgatatttaataagctcatcagattcagtgtcctgtatggtgcacagacgagttgccagtcatgaacttttcagtcttgtaaaattgggaaatttattgggaatggttgaacaagtggaacgcc

SEQ ID NO: 31752 - DNA, 2411 bp, Zea Mays
ctacctgcccgccgccgccgccctgcgcgcgccccgccgccccaccgcgcgccacccagcacgccaccacccagcgcggcccgccctcaccaccccgcggccccgccgccgccgccagcgcctagccacgcgcgccccaccctcgccaccccgcggccccccgccgccgccagcgcctagccgtgcgcgccccgccgccccatcgcgcacctgctagcgcgccgcccagcacgtcgcccgccctcgccaccccaaccgccgccgcagccgccgcccgatgtgccctcgtgcacgagacctctcgaaccctctcagaaggcggtgcgatccggtttgggtcgccgtgccgagcccaatgtgcccgacgcgcgcgcggctgagtcaaagccgaaactggcgctcggagacgacgatgataggccgccccttgaggagaagcaccgctgcagcggtgagggcggattcatcttcctctgcgcccttgttggacacaccgaggctatcggtgggatttctatgccgtctggttcgaacaagctctactccggcagcgtcgacggatctgttcgcatctgggactacaattccggcaaggctaccaacaatctctttgattatggacgagtaacgggctgcttccacggaggttccagtgaggaggttgtcattgttcgtggtggttcatgtgctgattagcaatgtgtgcaccctatggaaccaaccataaccgaatggtgactcctaattttttctgattggttgtgcctaaatcaccaatcgtcagcggatttcttatgattagttgggtgatcctgtgctcctggtttggattggatgttatctgtcaggctagccttgttgctatatattggaggctcttcgcctgattcggttacccgtttgcctgggatcagtttgtggcgctatctggttggttgtcacttggttgatacatatgattgcatgatctgcaagtgaatcttcagagattacaactatctcattagtggatagtcatgcatttatgtaaaaatatagcaatgagaaaaaggaacaaagtaaagaaaaagagaaaatatagatggagatatgtgggagtatatccaagaggatggaaaaaatataatttgttatcatattacaatttttgttcttaatgtttctgcaatagtgtgttgatgtcatcaagatgggaggcaaggttagctgcatgatcacccatggcccatgggtactcattggaattccaaagtttgtggaggcattgaacacaaagacagggatgaaactaagatttcaagggccttctagtctagtttgttccatggctatcacgaatgagatgttgtttgctggtactggagatggtcgcatcatggcctggagatttcctgctaaggatagtaacactgaaccagtgttgatcctcagtggccatcaacggccagtgatttcactgtctatcttggcaagaagactttactctggctcacttgacaagtccatcaaagcatgggaccttacaactcggcagtgtgtccaaacactctctgagcataaagcttctgtaacatctgtgctttgttgggatgagaagttattatcttgctcccttgacaagactgtaaaactctagactctgtcagagtctggaaaccttcaagtcaaatatgcccatgccgaggagaatggtttgcgcacactcttcggcatgcaccgagttgggaagacaccagttctcttctgctccctccacaacagcaattgcgtccgcttgctcgacttgccatcgtggcccatatccctggtgctttgttctttgatgttgatggaatatccgacagaacatctagtttaccacacatgctgccatctgaaaaggcattttcagttgctgtatctgctcttggcatctacaacaaagatgggatagtagtttatgatggaaaggggatgttcagtgctgcttgtgtttggtggtggggaggactgcacagttcgcatttggagcatcaaaacaggcgagctaatctttgtgcggagcatggcagacagtcccttcacgacatcttgttggcccaaaagcagccatggcttgtagtccttggctgtttgatgtaaaccacagctgggaagtcagacatcacctagagctagggtgtccattcttgacatgtttctcttagtgataggtggatactgtctaggtaggaacagagtcttgagggattgatgggcgcatgcatcttcaattcctgtgtgttgtattactactggtacaatctccaatgcttgtgaacttatgtgtttggactgtgaatttgtgatatgaacatatatcaatatgtttaaaatctgtattgtttgtgatattctgtgttgcatgtgatattatgtgtgtctaattttta

SEQ ID NO: 31753 - DNA, 660 bp, Zea Mays
gactaactttaggcagccacaaaaagtgtggcgaggttccctgagcttgccatactttttttcgccgcatctggggcgctcgttttcgatgccccagcaccgctacgcgccgcacttcgcccccttctctccctctcatgccgctggttgatctctcgtcatctcctcctccaagcacggatcttctcgtcgtctcctccaagcacggaccaggagcactgaaattctatctcaaccggttctgccgactgggtaacttgaattctaaagatgggtgtgaaggagatgtatcttcaatattacaatagttacatccagtacctacgaagaagaagggttgatccaagcaggaggtgaatgtgtgatggttggttattttgcatttcttctaggttgatgcatgacggttcatggagaaggctggtggttgtgatagctatcacacactcttttggttaataattagatactctttttgttgagcaatgtgaacctttaatggtgtttatgggtcttgtggagttgtgatggggctattatgaagatgctatggcctgttatggatgattggacatgttatgggctctatatattaatctgttattttggtttcctcatattcatcatgtcatggggctattatgaaggttcttgcagctg

SEQ ID NO: 31754 - DNA, 1354 bp, Zea Mays
tcttggttgactaatatagaatatgtgcgttttgatgttatttattgggttcactaatttagtggtgcttccgtttatgccatctaaattgaaagtgatatcatacaggtgcgcaaagaaaggttgtgcagttacatcaccaatctagtcaattggatattacccaggctttcaaggtagaaaagaagctttttgttccatcatggccttatcaactccagcgtctattttggttgacgagaaccaacagataaatagaggtaagagggccgatggaccaagggccaaagggctgaagccatccgagaatcctggcaatcaagggaggagagctcttaaggatttgtccaacttctctaaaggcactggtttgaaggacacttccaccctgaaagagaagtcccagcagaagcctcgtagtaatgtggccaacactattaaaggcaatgctttgaaggacaagcccatcctgaaagagaagtccacccaggaacagaggtcaaaagctcttaagaacccaatgaaaattttagttgatgaagagatcaaaatgtgccatgagtgggctaaggatggggtggagggatttcactcaacacaaaataattctcaaaagttggataaggatctgctagacaaacgtgtcaagaagaaagtggcggcagtaaactcagccttgtgtggttggccagatacagtatttgattctctaatgtatccatctatggaggttgctgagcttttttatgaacaaaacgtgctggaggtggaacctgagattctcccggacatcagttggcgtctctctagttcagtagatggtaaagcaaagattgatgaagaccgtcttaccgatgctgagcttgaccagtaccattctttggagaacaatccaattatttttgagctgagagacgagccagcgatcccgcagctgggagtgtattgaagaatctgtgccagcaggacagaaagctctgtttgcttgctgcttgctctggagtctggagttgtctagtctagaattctagtaggtcttgaacctggtgttttccccagctatgttctagtgggatgttggtgatgtaggatttcagtttgagtactggtaccagttccagctgaagcgacagccttatggctgctgatgggtgatggttgtggaacaacgggcgatataattctaatattttcagcaaactagtctgtggtctctatatttattctcgtgaatcctaaacagtgctaagttttttttggccctaatctatggtctctataaaatcgatattatttttactattttaatcacttttagcttttactatttagatcttctcctaagtcactaaac

SEQ ID NO: 31755 - DNA, 4655 bp, Zea Mays
gtttggagttcgtcgtcgtccccagcgtgactgcgcgagtgctatccattccaaacctgaaaccactgcggcccaacccggcaaccccgatccccacttccccagtaccatccctatcccagccacgccatcgtcatcgccttgcgcgcaatatccttggctccacgccccagtaagcgaccagtgacagtgagagcggtgaagcaaaccaaagcaaagctatcggaagaacctcagtcgagggggcgagcgagccgacgagacgactgacgagcgcacaagaccggacggggccgcctaatccagagagagccccaggtctcccccaaccccgccatggcgtcgggcagccgcgccacgcccacgcgctccccctcctccgcgcggcccgaggcgccgcgtcacgcgcaccaccaccaccactcccagtcgtcgggcgggagcacgtcccgcgcgggcgggggagccgcggccacggagtcggtctccaaggccgtcgcccagtacaccctagacgcgcgcctacacgcggtgttcgagcaatcgggcgcgtcgggccgcagcttcgactactcccaatcgctgcgcgcgccgcccacgccgtcctccgagcagcagatcgccgcctacctctcccgcatccagcgcggcggccacatccagcccttcggctgcacgctcgccgtcgccgacgactcctccttccgcctcctcgccttctccgagaactcccccgacctgctcgacctgtcgcctcaccactccgttccctcgctggactcctctgcgccgccccacgtttccctgggtgccgacgcgcgcctcctcttctccccctcgtccgcggtcctcctagagcgcgccttcgccgcgcgcgagatctcgctgctcaacccgatatggatccactccagggtctcctccaagccgttctacgccatcctccaccgcatcgacgtcggcgtcgtcatcgacctcgagcccgcccgcaccgaggaccccgctctctccatcgccggtgcagtccagtcccagaaactggcggtccgcgccatctcccgcctccaggcgctacccggcggggacgtcaagcttctctgcgacacagtcgtggagcatgttcgcgagctcacgggttatgaccgtgtcatggtgtacaggttccatgaagacgagcacggggaagttgtcgccgagagccggcgcgacaaccttgagccttacctcggattgcattatcccgccacagatatcccccaggcgtcgcgcttcctgttccggcagaaccgcgtgcgaatgattgccgattgccatgccaccccggtgagagttattcaagatcctgggctgtcgcagcctctgtgtttggtaggctccacgctacgcgctccacacgggtgtcatgcacagtacatggcgaacatggggtcaattgcgtcgcttgttatggcagtcatcattagcagtggcggtgacgatgagcaaacaggtcggggtggcatctcgtcggcaatgaagttgtgggggttagtggtgtgccaccatacatcaccacggtgtatcccttttccattgaggtatgcttgcgagtttctcatgcaggcatttgggttgcagctcaacatggagttgcagcttgcgcaccagctgtcagagaagcacattctgcgaactcagacgctattgtgtgacatgctactacgagattcaccaactggcatcgtcacgcagagccccagcatcatggaccttgtgaagtgcgacggggctgcactgtattatcatgggaaatactatccattgggtgtcactcccactgagtctcagattaaggatatcatcgagtggttgacggtgtttcatggggactcaacagggctcagcacagatagcctggctgatgcaggctaccttggtgctgctgcactaggggaggctgtgtgtggaatggcggtggcttatattacaccgagtgattacttgttttggtttcggtcacacacagctaaagagatcaaatggggtggcgcaaagcatcaccctgaggataaggatgatggtcagaggatgcacccacggtcgtcattcaaggcatttcttgaagtggttaaaagcagaagcctgccatgggagaatgcagaaatggacgcaatacattccttgcagctcatattgcgtgactccttcagggatgctgcagagggcaccaacaactcaaaagccattgtcaatggacaagttcagcttcgggagctagaattgcgggggataaatgagcttagttccgtagcaagagagatggttcggttgatagagacagcaacagtacccatatttgcagtagatactgatgggtgtataaatggttggaatgcaaagattgctgagttgacagggctttcagttgaggaggcaatgggcaaatctctggtaaatgatcttatcttcaaggaatctgaggcgacagttgaaaaactactctcacgagctttaagaggtgaggaagacaaaaatgtggagataaagttgaagacatttgggtcagagcaatataagggaccaatatttgttgttgtcaatgcttgttctagtagagattacacacaaaatattgtaggtgtctgttttgttggacaagatgtcacaggacaaaaggtggtcatggataaatttgttaacatacaaggggactacaaagctattgtacacaatcctaatcctctgataccaccaatttttgcatcagatgagaacacttcttgttcagaatggaatacagccatggaaaaacttacaggatggtcgagaggtgaagttgttggtaagtttcttattggagaggtgtttggaaattgttgtcgactcaagggcccagatgcattgacaaaattcatggttattattcacaacgctataggaggacaggattatgagaagttccctttttcattttttgacaagaatggaaagtatgtgcaggccttattgaccgccaatacaaggagcaaaatggatggtaaatccattggagccttttgtttcctgcagattgcaagcactgaaatacagcaagcctttgagattcagagacaacaagaaaagaagtgttacgcaaggatgaaagaattggcctatatttgccaggagataaagaatcctcttagtggcatccgatttaccaactctctgttgcagatgactgatttaaatgatgaccagaggcagttccttgaaactagctctgcttgtgagaaacagatgtccaagattgttaaggacgccagtctccaaagtatcgaggacgggtctatctgtcttatacactcgttgtatctttgatggagtggctcctagcctttccttcatcctagtgcagattgatgatgaaagaagatcatgggaattagctggagcgaggggtctctcctacttggcagcacctcttcttgaggccccccccctcctttgatctttactctttggtgcttgagcaaagtgagttttctcttggagacgttatgaatgctgttgtcagccaagcaatgttattgttgagagagagggatttacaacttattcgggacatccctgatgaaatcaaggatgcgtcagcgtatggtgatcaatgtagaattcaacaagttttggctgacttcttgctaagcatggtgcggtctgctccatccgagaatggttgggtagaaatacaagtcagaccaaatgtaaaacagaattctgatggaacaaatacagaacttttcatattcaggtttgcctgccctggtgagggcctccctgctgacgtcgtccaggatatgttcagcaattcccaatggtcaacacaagaaggcgtaggactaagcacatgcaggaagatcctcaaattgatgggtggcgaggtccaatacatcagagagtcagagcggagtttcttcctcatcgtcctcgagcagccccaacctcgtccagcagctggtagagaaatcgtctgatatgttaagatccgtgctgaccccacctaactttctcggccgattacataacttagccccctgataagagggtgcctaatttacgagaagcctggaaacaaatcaaagctgccatggcaattcaatgactgaagtgttgttgatgaggctgttttcagtgcaccgctatccatggccatgctgtggtttcaagaccagagttggcggatagttacgtacacaggcggcaaatgtgtctcttagccgctgtttaagtgcaccgctgtaagtttgggtgtccatgtccatgctgtggtttcaagatcagagtccatggcggatagttatgtacacaagcgacaaacgtggttcttagcttaggttcatgaccagttccacgtagtacatatagcttatatgtatatatacaatctattttttactatgcataaggagttgtttcagcttacacggttgtatgttatagtcctttctaggtctactacatcctaatctagatctggttcctctggaatgttggcaccaccgctctgtattttgcggcgaaggtttgagtttggcctacctcggtttatttcattctcagaccttaatgtaaaagctttgacagttgacactgggtgtgtcctttgtagagaaagaaaaccttttcttttaaaaatc

SEQ ID NO: 31756 - DNA, 1632 bp, Zea Mays
tgtccccgtcgtcgcccatgggcctgctccatcggcccgtctcgccctcggccacggcctccaaccgtcggccctgtttcaccaccgaccgcacgccctgccctgtgccagctcttgccctcccctgactcgtcggccccgtttcgccgccgaccgcacacgctaccgtgcgccggctcctgccctctcctgacttggtattcgtggttcgagcaagcaccaaaatcacaacattcttgcattatgagtctttcatgtgatttgaacgctgcgccaacagaaacttggcttctaaatggagctggttgttgaaatgagaggacaaatgaggaatggactgaagtggttgcaacgtaggaaatcaggttgctttatgttacacatgttgtttggtggcaaaaatcagtggtccatcagtgcttcctatggccttcgtttcaaggaccgattcttcttcagtggatgctgacagctagacatcccgaaagtcatctggagagtatagctcggcacatgtagcctcctggagtcgttgacaactcagtgccatctgaatcataggacaactgaagcaaagcgagatagtaatggaagaagaattgaaaagatcaggctgcttgccatcatatatatatacatgggaggaggaggaatagtaagtacatcactccgcttttctgttttttggtgctctgctggatgaacaagaactgagctggaacaggagaagctggctacgtgagagcactggctgcctcgtccgaatccctcgtctgttgtttttttagtcgtatacacagacagaaacagactagacttgcttgaggttacactaggcacaacagccatggtggcggcccgccatgagcaagttgcttctagtgaggctggtggatgacgcggcgcgcggcgcccctggcgtagtgcgtcggcctatccgcgtgcctctactgctgggcgcgcgacgacaacgacggcgtggcggcggcccggggggagctgaagctcagcgccctgagcatctcgagccgatgcctacatgcctccggtgtgagcccgatgacgagtctgggcagtagtgtagtcattcaaccttgcgttttgtaggtcttccctcaagtggagaaggagagaaaagtgcttcccttgctgtgaggacttgcggctcgacatcattctcactttcttcccacaatctcatggggtggatgatcgccatagccttctctccgacttccaggttctgtactcctaccaaggggcaacgtgaggtgtccacaggggcgaggccgtgcctccgtcccgccgcccccgacaatgatccccaccggcactttgtacgaaagcacaatattaggacttttttatgatcttttatcttttttatttgaaggcacaataggatccaaagaggtaggttcctttttgtcactgatttcatatacttgaataacatgtgttcggtttgaaagagcacataattgcattcctatttttagtccttacatgattactacatagttgtttaccggtttgaggtctgcagatctcaagctcgctcgcactgcagataccttgtagtttatttttttactgcattgcgactaggccttccaatttgacaaacacaat

SEQ ID NO: 31757 - DNA, 3156 bp, Zea Mays
cgtgctgcagctatgctacggctactcccctttttctttcccatctccgatttcaaaattcaaaagtccccttcctcactcgccttctctcttctccacgggagcgaggccgaggccgagacctcgaggcggtcgcgtggcgtctcggaacccgggaggaatccacagaaaaatccgcgcgtggggggccgaatctctgctcctggggcgagccggcgaggagcccttcaccggcgacgcacccttcgccgggcacttcaccgccgacgaccacgctcctgtgttgaatggtgtttggagtgtggtaaactggtaatcctgggaaaagatgaaagaggaaatcatgtttgacaaccaaacaaagccatgcagatcgagggttgactccaaaagcaattcaagttctctgaaacctaagtttggatcatcatggggttcccaaattgtcaaagggtttacaacagacaagaaaaccaagaagacagcagcaaatgcaagcaaaaaaccacctcttccaagtgtcgaaaatgttaatcaggccaaccaacagattccgtatcactctagggtgaaaagatcccttattggggatttcccttgttcacctgctggtgctcaagtccacccccatgtctttgattgccacaatattaggtcccctgcatcccatgatctttttcttgagctggatcatctcagagagcagcttcgtgagtcgaaagaaagggaattgacattacagtcagagttgagacagtgcagagaaaacccaaaagtttcagaacttgagaaggagcttgattctatgagggatgaagttgacaggcttgcacgactgaaaatttcattagaagctgagaaaacaagcatatctgaacagttatcagctctatcttctatggaagaacatcatgaagaaaatgtaagattagatagccacggcaatcggatacttactgtagatggggacaatgcaccttcagaaaacttggagtttgaagttgttgaactacgccggttaaacaaagagctacagtttcagaaacgaaatcttgcaattaaactctcttcagctgaatccaaattggctggccttgagaagaatgaagagagtgatattgttgccaaagttcaagctgaggcatcgttgttgaggcatacaaatgcaaacctcagcaagcaagttgagggattgcaaatgagccgactaacagaggttgaggagcttgcttatctacggtggatcaattcttgtctacgccatgagctttgtaactcagatcaagcagctagagcaacgacggatatagattacaatggtggcatggcttttaatgaggatgataatagcgaaggtgatgcaaaaacttccgaggacagttctgatataaaattcagcattgcagaacgcatcaagcagtggtcccagaatgataagagctgccaagcatcgaaaaaggaatcccttcttgatagggcatggattgaagctgcagaagcacgaagcccgacacgtaggcactcactcggtggaccaaagggatgtgcacaagacttcaacatcattaaaagaaggcaatccgatacctttatcagcctcccggatgcgacagatgagtcatttgcctttaataaggatcctgcaatcagggagaagcgtgatcttcttgtagacaagtatgattttggtcgatctgaaagttcaagatttgttctcagcaagccagaagtatgcaaatcacagtgtctggatgttgaaaagcgtgcgttgcgcatccctaatcctccaccaagaccttctgtttctgtgtcaaattctggtccatcaaatggatcgactgtaaatccaccgcgaccaccgccgccgccgccgcctccaaagttttcctcaaaaagtactggggtcatgaagagggcacctcaggttgcagagctctaccattcacttatgagaagggactccaaaaaggatacttccggtggcggaatctgtgaagcagctaattctgcgaatgtgcggagtagcatgattggtgaaatcgagaaccggtcttcccatttgcaagctatcaaggcagatgttgagactcaaggtgaatttgtgaaatcattaatcaaggaggtgactagtgcagcctacaaagatatcgaagatgtggttgcatttgtgaagtggttagatgatgaacttggcttcctagtggatgagagagcagtgttgaagcattttgattggcctgagagaaaggcggacactctacgagaggcagcttttggctaccaggacctgaagaagctggagtcggaagtttcaaactacaaagatgatccacgcctgccctgtgaaatcgcactgaagaaaatggttgcattatctgaaaagaccgagagaggtgtctacagccttctaaggacaagagatgctatgatgaggcagtgcaaggagttcaatatccctacagactggatgcttgataacaatcttattagcaagataaagtttgcttctgtgaaattagcgaagatgtacatgaaaagggttgcaatggagcttcagtacatgggtcctctgaacaaggatccagctctggagtacatgctgcttcaggctgtgagatttgccttcaggatgcatcagtttgctggaggtttcgatccggagaccatggatgcattcgaggagctgaggaacctcgttcacgtcagaaacagcacccagtagctaggacgcggcaccgcaatgtagtgtttgaagaagaggattagttttcagactctcaggcttaccatctcagtaagcgtagcaggcacgatttttggtcgtgtgatgtttgcatgtgttcctgcgtggtgtgtttcagtgtttgcagtgtgtaagatatgtttgttctgtaccgcgtgtggtgggtgggatgaagtgacccgccggcgctggcttttaacctcactgttgccagaaaatagaaaacgcactgggacatgcacatgcttttgttttgtgcctattgagcacagaagtagcggtggggttttgatttgagggtttgtttaggacgtattcaattgctttggatattgtcggagaccataattaggggtacctccaagacttctaaattcggctggtaaccatcatcagcacaagctgcaaaggcc

SEQ ID NO: 31758 - DNA, 1976 bp, Zea Mays
cagcttaaactgtaaaaatcgaggggttcaaacagaaaagtgagccccaaaccctacaccctcatggaagcgtggccacctctcgcccccgcggcggccactccggcctgtgccttggcgtggggagcagcagcaacggcgcagcggaaggccgtggagcaggagtcagcggcgcaggcggtgagccgcatcgtggcgagctgcgccaactccagcggcgtggcagtcgccgtggtggacgccaacgccgtcatctccggcggctccgctctctccacttccgcggggcgccttgtcaccgtgcccgaggtgctcgaggaggtccgggacgcaaccgcgcggcggcgcctcgggctcctccccgttcccgttgagaccgttgaacctgcgccggagttcgttaagaaagaagctgagatccatgggactagccatttgcgagagcaccctcctcctctgcatgaggtgaatgtcagaaagctgtcagaagctcaaatgcctggttggggctctaatgtgcctaacctgaaagagtgggaagagttggatcagatgtctgaagctggtggagatatcaattctcgaatacttcctctgaaggatattgagagtcaagatatcctgatgtgtgataccaacagtctctgtggggcacaagaggatacagagctccagccatcaaagaaggatgcacctgttgcatgggaggacgatgagaacaatgtaggttggatgcctgctgttagccgcagcatgcacagaagatatttgcagaggaaggcaaggcgtgatgccctcaaggaatctggacaaagttttgagacaagttctgttgttccatcaatcgatgatgataaagttctctctgaaaatagtggattggagcatggtctgacttcaactgatggcctttcttctgtcactgagataatcagtgcacgttctgatgattttgaacatcaagcagaaaatgacactgaaattgctggagaacatttgcattctgatcagcgagcttacggtgatgatgctgatgcgtgcaccaaagaactggaaaacctagatatagaaggtgaggatgagggaggtggtgatgcacatttcattgttgatgagagcagcgagcagagttggaccctgaggtccttatccgaatcaactgtagcatgtgttactagtgattatgccatgcaaaatgtcatcctgctgattggtctccgtctcatagcaccaggtggcatgcagatacgccagatgcataggtgggttttgaggtgccatgcttgctataaggtgacccaagaggttggcaaaatattttgtccgaagtgtggtaatggtgggaccttacggaaggtttcggtaacagttggtgaaaatgggatcactatggcttcacggcgcccacgtgttacacttcgaggcacaaaattctccctcccaatgccccaaggtggaagagatgcaataactaagaaccccatccttcgtgaggatcaacttcctcagaaggttcttcatcctaaactgaagaagtcaaacaaggatgatgatttcttgggcgtggtcgacatattttcgcatggtggtgataagaaggcaccattgaaacctccagtgaggaaggcgctcgcaatgttcagcgggaaaagaaatccaaacgacaaccacttctctcgcaagaagtactaagctctgatctgtcgtcttctttttatgcacgcctgtggtaccgtagtctgtaatcccagcatgtacgtaatggttgaagcagagtgcctttttttttgttagtggcgtatactcatcatattcatatacacagatatatataagcatgtaagctatgcagttttgcagcaactttgtatggtttccgtgctactgtttttctaatgcatttgaattttgagtttgaatgtccacagtgatttggagcgtactgcgtaatcgagctgcaatgaaccgtagtgatt

SEQ ID NO: 31759 - DNA, 3113 bp, Zea Mays
acggtttccctccacaaccacttgctcctcatctacttttctcctccgccttaaactcatccttgctcctgcctgccgtcgtgcatcatcatctccggccagggccagggcattcgtctccgcctccggtccggcctcctccactccgcgcccccccagacgcgtcgctgcgtagctgctggccgccatggccaccgtcatggccgcggccgcgtccgccgtcgaggcgcccgccacggccaaggccaagaaggagtccaagaagcaggaggagggcgtcgtcaccaacctatacaagcccaaggagccgtacgtcggcaggtgcctcctcaacaccaagatcaccggcgacgacgcgccgggggagacgtggcacatggtcttcagcaccgaaggcccttctttgcctgcgcgaggtctcagaatccggggggaaaaagaaaagaaaagaaaagatgatgactgtctctacctcttgctacatgtgccgcttcctcgtccgggctcctccgctcaagtccaggagtgcagtgcgctgtccaagcgccgccccaccaggtgctagcggtgccacctccacctccaaggtaaacccacacctactacctgtgtgcttcgtaaggcctatctacacctgcaggctgcagccaccagcacagggatatgtaccagcctgctcgtttcagctggaacagtattctccagttttggattggaacatgcagccacagccaaaagtagctgaagcgattggagttgtagcttttcggggataatcaaatgataggagagtggaggtggtggatcatgtgtaagctttagactactgactgattcacttgtctatccggcgctggttgctttccctgtgtgaagcttgtcctagaggtgaaagaacggctagcaagggagcacccaggcctccccacgggcaggtacgggagggacgatgacgacatggtcctctggttcctaaaggaccgcaagttctccgtcgatgaagccgtctccaagctcaccaaggcgattgtatcctctaattcactcgcttgtagcagtgaagctcacacctaatagcttctttactggctcactaaattcctggtatggtaaccgagttcatatagcactgctatcttcagttttcctttcaactgcattagaaatggcgtcaggactttggtgttgcagagttatcagaggaatcagtgaaaagcctgtaccaaactggcaaggcatatgtacatgattccttggacatttatggccgacctgtgctgattgtagtggcagccaaacattttccttcgacacaggatccagttgaaaaccagaagctatgtgcctatttggttgagaaggcagtcaacagacttccgccaggagcagagaatatacttgggatctttgatctgcgaggctttcgggttgaaaatggtgatctccagttcctaaagtttttgatggacgttttttactattactacccgaagcggcttggccaagttctttttgtcgatgctccatttgtttttcaaccaatgtggcaggttgttaaacctctattgaaatcatatgcctccctggtaagattttgtgatgccgagactgtgaggaaggaatacttcaaagaagaaacggtgcctcctgatttccgcgattaggtggtctcggaaacatgacctttaattgattcagaatcgattggcacccaggggggctggcgccttcctataccttttgattaacttctcaaaagttgctcagacggcagcaaacgattggagagtccagtaaaaaatgaccctgtacttgtataacttctgcgaagtagaatgctgagtttaggctggtgtctggagtgctcctgtaccatatttttctggttttggatgaagctatatggaccaaattcatctctgttgaacaattgccaattacataacttgtgtttgcccaattccatggtgtagtaccataacttctcagtgcagtgcagacaacacatggattccattttttgattaaagtatcatctgctacaaatatgaatcatggcttagtttgtagacttcataaagaaacacacagattaatcaaaccagtcttcgaagagtctctgtggataggaacgttccaaagcaaagtaagatgcaagttgtattgcataaaaaccaggtacacatcaatcagctgcattctggaagactaaactgcaacacaactacatctgcaatcacagagaaatcaggtcaacaacggagagggtcaagcgatccccacgtacagatgccagcatggtcttttacatggttccaagaggaggtaaatcgagtgtagccctaaaaagatctgccttgtgccacttcaacactttaacccagatgcaataaaaaaacactttaacccagatgctgcattgtggtgtggcaaaggcttgagaatatgacaataacagctgctcaaaaactgttggtaggaacatttatagcagcaaaagaacaaaatggaatgtgtggtttcttatctgccttagatgagataagatttcggacatgtgtattcatgttttcgagtgatttggcactatgaatgcgctagatggttggttgcttttttttgttaattgctcaggtgatatatgctgtatttctagtcactagtgttgtattgtttgtgcttgtgctaagatgatctcttttgcacttgtaacaggggctcattcaagtactctactgatcgaaaatggatggcgtctgtgatggttcattcttttgcacgtcttctacacgggtacattgacggttgatggagatggatggtggtgtagctgttttgtttagcaattagcactctaggtgttggaccactgttttgttaatggatgctatgtaacagtagtatgtaactaatgtgaacttgtttaggttgctgtgaaactgttatacaacacattgttatggggttgttacacagctgatatgttatgaacatgatatggagatatcttttcctttttggtttgggttttactgttgtgccattcgtctcataagttatgccattttattatttacttttggattgatatatattcgtctctgaagccttcc

SEQ ID NO: 31760 - DNA, 1866 bp, Zea Mays
attttgcttcctttgcccccctgctggacctgggtttcaggtcacagatctatccgacaagatggtgaagatctgctgcatcggtgctggctatgtcggtggcccaaccatggctgtcattgccctaaagtgcccagacattgaggttgtcgttgttgacatctccaagccccgcattgaggcatggaacagcgacaccctcccgatctacgagcccggcctcgatgatgttgtgaagcagtgcaggggcaggaacctcttcttcagcactgatgttgagaagcacgtcgctgaggctgacatcatcttcgtctcggtgaacacccccaccaagacccgtgggcttggagctggcaaggctgccgacctcacctactgggagagcgctgctcgtatgatcgccgatgtctccaagtctgacaagatcgttgtcgagaagtccaccgtccctgtcaagaccgctgaggctattgagaagatcttgacccacaacagcaagggcatcaactaccagatcctttccaacccggagttccttgcagagggcactgctattgaggacctgttcaagcctgacagagtgctcatcggtggccgggagacccccgagggcaggaaagccgtccaggttctcaaggatgtgtatgctcactgggttcccgaggacaggatcctcaccaccaacctgtggtccgctgagctctccaagctcgccgccaatgcgttcttggcacagaggatctcctctgtcaatgccatctccgctctctgcgaggcaaccggagccaatgtctctgaggtggcttacgccgtgggcaaggacacgagaattggccccaagttcctgaacgccagtgttgggttcggtggctcatgcttccagaaggacatcctgaacctggtgtacatctgcgagtgcaacggcctgcccgaggtggccaactactggaagcaggtgatcaggatcaacgactaccagaagagccggttcgtgaaccgcgtcgtggcctccatgttcaacaccgtcgccggcaagaagatcgccgtcctcggcttcgccttcaagaaagacaccggtgacaccagggagaccccggccattgacgtctgcaagggcctgctgggcgacaaggcccagatcagcatctacgacccccaggtgacggaggaccagatccagcgggacctggccatgaacaagttcgactgggaccacccgatgcacctgcaaccgacgagccccacggccattaagcaggtgagctgcgtgtgggacgcgtacgaggccaccaagggcgcccacggggtgtgcatcctgaccgagtgggacgagttcaagaccctggactaccagaagatcttcgacaacatgcagaagcccgccttcgtcttcgacggccgcaacatcgtcgacccggagaagctgagggagatcggcttcatcgtctactccatcggcaagccgctcgacgcctggcttaaggacatgcccgcggtcgcttaattcgtctgaggtgctccattggattggatccggggaaggaagaggaactggttgaccattcttcattacagtttgttttttgcaggattcttaaaagttggacggcgctgctagtattccatgtttcgtgttttcatattggaggacgtctgtagatgtaaaaaatcctcgggcgcttgtgctcggcttgaggaaatatgcttgtacggttgtaccctggacccgctatagctggttggttcttcaagttgtgttcctatagaagccaaagttactacacgatcgatatgttctttttgcataataacaatacttgtctcacgtttcatcctttcatctttccacggagaatgttttcttct

SEQ ID NO: 31761 - DNA, 275 bp, Zea Mays
cccaaataagctgcagatgtggctgctggctgcaacctgatctcacgcacctccgcgcaagccccgcagcccgtaaaagtccgacgggtacggggtaccttgggggcacatttgcgaggcaacccgaccatgtgccacagtacacgaagctatggcttccatgtacgcgctccatttccgagacgacgtggccaccgtctccgggccgttgcggcggagccacgcgacgagtcacgacattaaccccatgcatatgcgtcctctctgatctttgg

SEQ ID NO: 31762 - DNA, 2573 bp, Zea Mays
cggccacctccgctcgcgtacgccgttgtacactgggaggccctcgcccggccatctccgctcgcgtacgctgccgcccacggggccaccctgccccggccatctccgcccgccccggcctcggaggcgccgccctgcgctctctggcgctaatggcgccgccgcgtccacccacaggaccgatcctcttcctgcccctcgtcttcctcttcctctttaccaccgccgcggcgtctgcggcggcgcctgaggatgaaaagttcactgaggagctgctcctgcggccgctcccggaccgcaaggcactggcacacttccacttccgctcctctgcgccccccgctgcctccgttggtcggcaccaccacctcttccccaaggccatctcccagctggttaagaaatatcatattagcgagttggagctatctttcacccagggaagatggaactatgagcagtggggtggatttgatcctatgtcaactaataatgcaaagcctcctggtgttgagctgtgggcagtttttgatcttcctttgtctgagatcgatgcaacatggaagaacctgacacatacactctctggcctgttttgtgcatccatcaactttttggagtcctccactgcattttctgctcctcgctggggcttcaaactgaacgaaggcaatttgcgatatggtgcattgcctcgtgaagcagtatgcactgagaatctgacaccttggttgaaacttcttccatgtcgtgacaaagctgggatagcttctttgctgtacaggccttcaatttacaaaggatattaccattcacaaaaactgaaactgagatcctcccagtcacttggtattattcttgatcaaactctgactgttgtgctgcaaccaaataatgtacatggcgaacagctacattccaatcatggtcaacttcagcccaactggtccatgagacatcttttcaacagaaagttgtcagggaaatgccttgtttctaaatccagcagagtattcattgaggttgataaaggcattgctgacgaagttaacatatctggaagtgttcattcttggagtaatgaattctttgtattgtccaatagcccggacaagttgatcaaaggtcaaaatcacttagaaatgcaatcttcttttttatatgtttatgatgctagtaactacagtgaggaacaacctttggatttgggcataacttggaagcttcccctgatatggacttgcaccccatcaccttttcatgcaagcagatttcttatgggcagtggcaatgaaagagggtcaattgctctgtcgtttatgtccactaatcttcataagaagatatctggcagcgcaaatgattgttcaataaaggcagttattttccaggttgttccatggtatgttaaggtctattatcacagcctagaaatatttatagatgggagcaggaagactgtgtcagaagtagttgacaagattcatgtcattccttcagaagacaagcttttgcctggtaccttggagatgctactaagattcccttgcagtatgcagtcgggaactctgacattggattttgacaaggggttcctgcatatagatgaatatcctcctgatgctaatcaaggatttgacattccttcagctttggttagctttcctgagttcagttctgctcgaagttaccctgaaattgatccagtacttggatcacctttactagaaaatttccaggaagatagtgttgtgaagtcgtatacagaagtattgctcgttcccctgacaactccggatttcagcatgccatacaatgtcatcaccttcacatgcactgtcttagctctttactttggttcattattgaatgctttgagacgaaggattggcgaggaagagagggagttgaagaaaagagccacaaggcatgggctcatttctcggttgctagccaagttaagggggcagaaggtggatccatcggagtcagggtcttcatttgaatcgactgggtcaaagaagctgctattcaaggttgtatttgttgcagtagctgcggttctatttcactatttctcaaacaacagttaatacttaacatcggtgtctaaaattttgggtgacttttgtggagccacggcagtagaatgtaccatgttgtgtagcatatgtattgcctgtaagttcgcttgcttccaggcgctattttgccatcctagattcttgaaagccgagggccatgcaatttggacccttctgttgtcgtttttttttggtatggttcgtttcgttttctggccggatgtaatgtaatcccctgacggctgttccctgggcgaacagtgtcagtgtgatccgtttggcaatgtttttattcatgaacgccacgcactgaattctgtaatttcgttactactgtaatgaatttttggtttttaccggttttgaaaaaaaaagaaagcagaggttgatgtcccttgattgcaccaggttaaattttcttttgaggaacccactacattttttacgttgatctaaagctgactccaactagagcctgtaaagctgctc

SEQ ID NO: 31763 - DNA, 2153 bp, Zea Mays
gaaaactagcccagcccatgtatatccaccggcactcggcacgaagtccatagccagcgaaactcccgaaaccgtaccaaccagacaattcaccatggcggcgccggcgcaggcgcaggcgcaggtcctgcctctcctccggtggagccggagcgcctccttcctctgcgcctcgtcgcgccgcctcttctccgccctccaacgcccctctgccgctgctcgctgcgaggccggctccaaggccatgctcaaggggatggactactcggaactcgagaattgggtgcaggcgcaggggtttcggccaggccaggccatgatgctgtggaaatgcctgtacgggaacaacgtttgggctcattgctacgacgagttggctggtttaaataaggatttcaggaagatgataaccgagcatgctgatctcaaggcattaactatgaaggacatccatattgcatcagatggaacccgtaagatattgttctctcttgaagatggttcagtgattgaaacagttatcattccttgcgctaggggcaggacaactatctgtgtttcaagccaagttggttgtgccatgaactgccagttttgtttcactggaaggatgggtttgagaaaacatctctcgacagctgaaattgtcgagcaggctgtgtttgctcgtaggttattctcagatgaattgggatcaattaacaatgttgtatttatgggcatgggtgaaccatttcacaatattgacaatgtaataaaagcctcagcaataatggttgatgagcaaggtcttcattttagccctcgcaaggttactgtctccacaagtggtcttgtccctcagttaaaacgcttcctccaggaatccaattgctccctggctgtcagtcttaatgcgacaacagatgaggttaggaactggataatgcccataaacagaaagtacaatcttaacttgcttcttggcactttaagggaggaacttaacctcagacaaaaacaaatagtgctatttgaatatgtcatgctttctggagtgaacgacaggtcagatatctgctttagtgtctttgctgactgtttttgtatgttatgaatctcttagcataggttgcatataaatctccttgcaatagataactttctcccctatattcaattgttcataaggtttttctttttctatctggtccaggcatacatgtatgcctactaacgacagtctatagttgttattgtaatgcgtagcccagtaggtaaattgaatcttctctcccttcctactccgttggtaaactgaatcgttttctcagtattaacctttttcgaagctatcacagttaactagtacctgcttccaccctgaaccgtatatttttgtttgatttactgtgcttgcagtatggatgatgccaagaggcttatagagctagtccaagggatcccatgcaagataaacctcatctctttcaatccccacggcggttcccaattcaagcccacaccagacgataagataattgagttccgcaacgttttaattcaaggtggcctcactgtttttgttcggctcagcagaggggatgatcagatggctgcctgcgggcagctaggagagcctggaggctatcagctacctctgctccgtgtgcccgagaaatttcaggtcgccttgtgatgctaaacagtgcatacagtaaaaatggtcctgagcagcttgacgaacacacggagtaattggcttggaacgacgattcgatcgtgcaaatcttgcaagttctaccgccttcggaagcttgtgtggacttctgcaataacgtgcaaatctgaacctgggtacttgtgcgacaacacatttagacatggtgttgcttctgctagtacgtggtgtacccaaaccaaattcgataagattattattattataaattggtattttctggcaaatcgttgctgtataagacattaacagtgtaacatgctttcacttggtacttcgaaaaatatggaatgaacttatacggtaatcagcaatgagagaagaatctggaggacaaggttgcttgcctgaatgagataccttaaccactaaggtgtgcatggtactagccacctacacacctgatcaccccaaatgaaagaaagaaaaaaaa

SEQ ID NO: 31764 - DNA, 226 bp, Zea Mays
cgacgaccgagctagctaggcgacgtgacgtggacacctttttggcgacctccgcaaaaacaggaccacctttctgactcgccgccggcggtgactactgactgcccggacgtacacgtactacgtggacgcgcgtgggaggagccttcttggctgcttcgtcgtccgtgcttattccaggacagtgacggccggagacgacgctagggacgggacgggacgggac

SEQ ID NO: 31765 - DNA, 3117 bp, Zea Mays
cggggaaaggagaaaaatccacctcgccccttttccaccaggtcccagcccaagcctcttcgcctccgctagtacgcctccatggacgcgtaccagcaccagcgacgcttcgccggcgccggcgacgcaccgccgccgccgcctcacccctcccacccgagcgctcagtggtacccggcgcccccactgccataccatcctccccaccccggacacccctaccctccgcagcaccaccaccagtgggccccgccacccgacatgcagcaccagcaccatccgccgctgccgcagccctacgtgtaccaaccgccacccccgcccatggcgatgcagcaacagccgcccccgcctcctgggaacccctggccccctcaccacggcgccgggcagcacccgccgcctacctaccctcctcctccgccggggcaggcttggaccaatcactcatgggctcagaatcatggatatcaaggtcaacagagagaaacaaaccatttattagatagaggtccaatggtgtctccagcaaagaattttggttcattttcgtccacctatgagcaggaggtatcttataattattcttctgctccaggtactgggaataatatgcttcaatatccaaactctcaagcacagccatttccaaccacggcagctgttcaaggtggattctcacagggttgccttagtatgcctgttcccttgacagaacagcctctttttgggcatgaaagacagccaattgatccaagtgaccaacctttggaatttaacagtaggaaagctcctgatttggcagtacatataaatgtcaattccaatatcccagctcctcaaacactagcacctaatcatgatgtagctgcaacctctacacattcatggacgccatctgctacagtagggtacctgcctcgagctcctgtgccaccacaaacagcacagatggatccttctgtgcatgctgcaccactttttggagcagcatctagttctagttatgtttcacctgcagcatttggtgttggtaatgtaacagaagtgttccctacagatccaaacactccttttagtgttgcagataaatcaaagaaacctccagtacctaactggcttcgggaagaacttttaaagaaaaaatcggaaccactgagtgcttcagcgcaaaactcagaaaacttaaatcccatggaagctaatgaggcagtacagacaataggaagacctgaccaaagtgacagcagaagcaatgattccgctaaatccactgaagacgatgacgatgatgaggatgaaattgaagcagctcgaatggcagcaatcaacaaggaaattaagcgtgtgttgactgaggtccttttgaaggttactgatgagctttttgatgagatagcaacaaaagttctaaatgaagacgactcagctgaatccaatgaagccactggtgttttcggatcaaaggagactggtctgggaagatcaagagccaaggcctcggctaaagttgttctccctgctaagtcaacaaatagttctgatcataaagatagtactgggttaagttcccctaaaggtgctcttctcggcctggctagttatgattcagatgatgacgacgatgctgacactgacagcaaggataagatgccaatatcaaatttatcttctaaagataatgctggtgctgtaaatactgaaggtgataaaagcactcttggtaaaagaaatgggaatcacaatgaacagaattcttcacttggaagttctccatcaggggaagatcttaaatctaataatcaaaactttcaaaggaatgcgaatgcagaacctgaacaaatgcatattcgtgatacagagaatggggagttccgtttcaaggccaagactcgtactgagccaaagggtgcatttgacagaatggatgagaaggcacatacgtatgcagaggtagatatccagaacagaaaaacctcttttggcaataatgctgaaaagcacaatgatttggaaagcagtcacagacattcagaaaagagcagcaaagaggactttgttaatgagttgaaggctgatcatacaaaagaactcgaatattctagagcagaaaaatataataacgatgacaaatacagcatgtatggaaatattgacaaaaggggtagctgcaaggagggaaaaggttctgatagtgctgcaaagcatgaatccgatacaagggagccacattacagaggtaactctaagcttgatggtgcaaagggagattggaaggatttgccgaaggatagagagagaaatagagatgatagaagggggaaaggaaaggatgaaaaggacgacaggttaaggcagatgacaagtcataacagcagaagttcacggtcacgatcaccaagggggagaagtcgtactagaaaggagaactcacatgttcgagggagtgtttcaagtgatgagccttctgatagtgtgaaaaagagaaagcattattcccataaaaccagcatgtcaccttcacccccaaaatctagaaacagacgaatttcgcggtctccacatagcaagcattctcaccgcaggcattcgccttattcatcggctggcaggaagaggcggtcgagatcgagaactccggtcaaaaggagatagaaggcatggacagtttatccgacgagatctttgcctaaacattcctctgaaacaaccaaagacatttttgcggttctgctgttgtctatctagtgcgtcttttgctccgacaacataatggtagaacagcattcctacagtgacaaacatgaaggcgaggactggatgtaccttgatataagatgcacattgaactgtatcttgtttgatagatgagctatataactagctcacgcagctggctgtatgatctgtagttcccccgttatctgaattgttcatgtattaggccatgtactgctcagcagagctatgtagttagttgcacttgtatgacttcagcatgcctgttgccagttgtttgtttgtctatgcaggatttttttcccgtttcctacttttttgataaaaataaactgattcctgtgaaatctatatatgatttctctcaaattcctgcca

SEQ ID NO: 31766 - DNA, 3034 bp, Zea Mays
ccactataaagaattctcccagtgtgcgctgttctcagagcgagcaattttccaacagatacgacaccagacgagagggaacctcgagccaagaaagcgagagggggaagctgcggccgccggccgagcgagctcgccgtccccatccacccctctcactctcctcttcctcctctctgtctttcgctccgtccagccgccgcgtaatccgcggaaccagatgccctcatccgccctctgatcgaatcccgcgagaaaggccggttctctgtcctgccgtgccggcgatcttgatggcattggaggcggggagcagcggctgcggcgggaggggatggggcggcgggttccggagcctgatgcggcggaagcaggtggactccgaccggatccgcgccgagggccagccgcagctcgccaaggagctcaacgtgccggagctggtcgccatcggagttggttccacagttggagcaggagtatatgttcttgtgggaataattgctagggagcacgctggtccagcattgacaatttcatttctgatagctggaatagcagccacactttcagctttctgttatgctgagcttgctagtcgttgcccctctgctggaagtgcctaccattattcatacatctgtgttggagaaggtgttgcctggttgattggctgggctctagtgctggaatatactattggtggatctgctgttgcccgtggtatatctccaaacttagccttgttttttggaggacaggatagtctgccatggattttagcacgccatcagcttccatggtttggtatcattattgatccctgtgcagctgctcttgtttgtgttgtgactgttttactctgcatgggaattaaagagagttcatttgcacaaggagttgtaacagttctgaatgcttttgtaatgatatttgttattgtagctggtagttatattggcttccaaataggatgggtcggctacaaggattctgatgggtatttcccatatggagtaaatggaatgcttgctggatcagcaactgttttctttgcatacataggctttgatacagttgctagtacagctgaagaggttaggaatccacagagagatcttccattgggaatcggagtagcgttggctatttgttgtgcattgtatatggctgtttctgttgttattgttgggctggtaccatattttgccatggacccagatactcctatttcatctgcctttgcaaaacatggaatgcaatgggccatgtatgttgtgacaactggtgctgttcttgcactctgctcgaacttgatgggctcacttcttccacaggtatacagtgataaaacataaaagtatattatgacttactcctgatgacacccagtggatgaaattgaatggaatttgagttgattctactattctagtacatgtgaacttttcattccactgtcagttactctgcaataagttgtgaacctagccttgtaagtggccaaaactcaatgactcctgacccttattgtataatttatctgttcttcggtttgcactttggattcctcatttaactcaacattatccatcaattacattgccccccattcattcattttgaatttaaatcccattgaactaatgctgcaatgaactttgattcccatgccacatctatgagcgaagatgtaggcatgtagtactatggtgaaccacatcagcactatgcagatgatattttaatacttggtgtcattatgatttgaattgttattctcgcagcctagaatacttatggccatggcacgagatggcctgttgccatccttcttctctgatgttaacaagcaaactcaagtacctgttaagagcacaattgtgacaggcatctgtgcagctgctctggcttttacaatggatgtctcacagttagcaggaatggtcagtgtaggcacactccttgcattcaccgtagttgctgtttcgatcttgatactcagatatgtccctccagatgaggtccctttgccaccctctctgcaagaatcattccgtttgaaccaggaatgcgatgaggaaagggacagggctcttcttggagttgggaactgtaccttgtctcagacaaaggatgtgattgtggtagtagaatcagttaaggaccctctcattgatataccgctgcataaaggcaagatggatgagacaaagcgccgaaagatagcctctttaagcataggatctgtgtgtataggggttctgatcctcacatcttcagcctctgccacatggttgccttttctcccgatatgtattggctgcatcattggagttgtgctccttctggctggcctcagtttgctctcctggatcgaccaagatgctggcaggcactcttttggtcattctggaggattcacatgcccttttgttccagtgctgccagttttgtgcatcctgataaatacgtatctgttgataaacctgggtggtgacacatggatgagagttggcatatggctgctgatgggtgttctcctgtacattttctacggacgaacccacagctccctaacagatgtcgtctacgttccagtagcgcaggctgatgagatgtacaggagttcatcaggatatgtatcatagaaaagaacagccgcagttacttcaaggtggttggtcattcagttgtagataattggttatcaaccaggaaagaggggaattggctgttatttctttcatgcttggccaacaagatctcgtggatgcaactttgcaagatatatatgatgttcacgagcctggtcaatttacacattgtttgttggagtgtgcgtagatgtggtgtatataaacccagctgggtggaatgatgtggtacataatttatgcaattcatgtaaaagccctttctacctttctactgaaatgggagagcatttaaagggcatattgaaacagtacatgaatggcaagagaagctacctttttttatatctttttacctcgaacaagtcataattgtg

SEQ ID NO: 31767 - DNA, 1060 bp, Zea Mays
  misc_feature (1059)..(1060): n is a, c, g, or t
tatagggggaaaaatttagagggaaccgctgcggatagcctaagccgtggagtgccgccagtggcagcggtggaaactggcagctctgaccacatccaatccaactgcccttgctgcacaaccgaatcccacgccttctcttccttttcccttgctctctccagcccctgctgctcctgccgggcgctgcctgccgccgctgaccgcccccgctctctctctctctctctctctctctctctctctctctctcgtcccccaatcaccccaattgccgggtgctcctcttcctgtcacccccatgttgactgctgcccgccaggccgccagagagggaggattaggaaaggggggaaagagagacggacggcttctcgggagtgggttgctggccgtggaacatttcttcagttgggcccactctctgtgccggttccatcgggttttgacgcaagagtagaggacttggaacccgtaaaacccatccggagaattttccctgcgcgtcccatgattaggagctgcggctggacagtgccctacgctctggagttttagtgcgaatcgttgccagtttcagtcaacttttgatggagcccaggtgttgagcgccaatttgggagttccagctgacgctgcagtctgcattcttctaaggccatcagtgaggaattttcgttccttggtggcagatgggttcctccagctctaaagtggacaatgaggagcccgtgaggcgctccaaggacaggaggcggctcatgaagcagctggtgcgccgccgcccagagcttgcagctgcgcacattgcatacctgcacgccctccgcaacacaggagccactctccggcaatttgtggagctggagtctgctttgtcacagcagcctccggtaggccttgcggcgccgccctcgcctactccacagtcgctgccgcagccgcagcccccgccacctcctgaaccctcactgccaccctcgccacaccccccgccgcctctgccttttagtccagtaaccaccataagaaagatggagaagagggatggtgaattcnn

SEQ ID NO: 31768 - DNA, 2529 bp, Zea Mays
gacgaagtgtgtgcggtgtcgaaggacaaggttttggctctcggcgctagtttcccccgctcctccggtttggacaaccgcttgcagcggcttcgcttcgtcctcccaccctcccctcgtccctctccgctccggcgtgcttcggttgcccaccaagatctctaatttcccatcaaaccctagccctgtcgccgcctcctcactgccctgaccctctcctcctcacgcttcccgttccccatctcgccgccgtttctttggcctgggagacacgctctgctagctgtgtccgcgtatggcctccgacggtgcccccagaggccgccgtcccaagcgccccgcttcgggaggcctggtccaacccgacgtcctcacctacaagagacgacgccgcggcaccggcgccaacgccggccacagcgccgtcacgtcgggccccgaccccgatcccgtcaagatgagcgcggtggtgcacgccaccaattcccagcaaggtgggcgccaaacgctggacaggcactggagaagctggagggacacgctggagggcgtccttcgatccactgctgtgaaccagagcgccggagggattcagaactgcatccgagatgcgctcagatataatggttggcatcccacagaacatggaaacttagttgatgaccgaggaacagacgaagaggacgctactggagctctacattctgaagagagtagtggtgccttggttaagttagaagatggaacagttgcatctttggaagccaacaaggcgatgtgccacgacactctctttgacattctaatctccgagaagtttgccatgttgtgtgatctgctagctgcaacattccacggcagtaagccagacgacgttattggtttgcaaataattgatgccaagatgagaaatggggattatgcacagaaccctgcgctgtttgaccatgatattaagcagatatggaagaagtttgaacacgttggccaagaaatggctggtctggcaagcagtctcttactgatttcacaagcttctaatcaaaagcaggcttctgacatttcagaaattgatgtggctgaacacaagatagaggaaacaagtctggttggtgtcacccgcaaagccctaaggaagttcactcccccatgcgattctggctattctaccataccaagacgaactgggacatctggatcggatggaatttgcaaggattgtggtagaaaggcagacagcaaaggaagaattatctgtgacaggtgtgaagccgcgtaccatgtttcatgtctcaagcttgccattgatgaagaggccccagcaaaatggtactgtcccacctgcgtcgaaccagacgtacctttaaagagcaacaaccatggcagagcacatgaaggctgcgatgtatgcgagtggcttgaggtggagaagccagaagaacctgccgaagaacctgaattggccgtcaaaacacaggagagctcagtgtcaagcattgtcgaagacagtgaaccagacctctcgataaccgctctagcaaacttgtgcaagctttgtggcacgtgtgaagatgagaacaagaagttcgtggtatgcgggcatggctactgttctttcaagttctatcatgccctgtgcctgaaagaaagccagattgcaagcgagaagcagaggaatctaaaatgctggtactgcccgtcttgcctgtgcagacgctgcttcaagaacaaggacgacgagaaaatagtgttgtgtgatggctgtgacgaagcttaccacacttactgcatggatccgccgcgcagttctgtcccgagaggtaaatggttctgcacgccgtgtagtgcatggaggtcggcgaacgggatgcagaggtatgagaagtcgatcctgcagagcgtcaagcgtgttcctgatgccaaagggcccaaggtgcaggcagcagctgctgctccaggaaaataagcagcggcgctgtggatgcgagggtacaaaaagaaatgaaaggattcttgttcctctgaaggtgtatgcattactctgacagactgaatcgagtaatcggaggatgggctgtgtatacgtggggagaagacctgttggcttgtgaagacggagatggtggcatccgagtggacacgcacttttgtctctgtggatggagctgctgatgttggttccctgtcctgttatttccttcctggaattcttctgactaccccaagcgagtaggttgttgttgttgttgttgttctgttatgttgtgtctgccctttacctgatgctaagtggtaacactgacacccgcccatgttgacattgatatgtacatgcccgttacctgttttctttttgttggacaatccttatatactttctgcatggcatgtggtcgatgtctgtataagttcattacatatctgattgaacccataaggcagaaagcttgggtgatatctaaacaatgatgcatctccatgttttttctttctttctttctttcaagtgtcatatttatgttgttgggg

SEQ ID NO: 31769 - DNA, 2614 bp, Zea Mays
attgttttcgagattgctagcgaaaagcatctcaatccctgaatcgcacacccagccagaacgaacgccagaaggcccagaaccgctacctcctccaatacactttcgtggctccgccgcagcacgaaaccctagcttctgcatctccgccccctccacctcccctccgcgaagcaggcgagatgtcgtcgggcggcggtggggggcagcagttccgctacacgcagacgccgtccaaggtgctgcacctgcggaaccttccgtgggagtgcgcggaagaggagctcgttgagctctgcaagcccttcggccgcatcatcaacacaaagagcggcgtcggcgccaaccgcaaccaggccttcgtcgagttcactgacgttaatcaggcaatctcgatggtttcttactttgcatcatcttcagaaccagcacaaatacgaggcaagactgtttacattcagtattcaaacaggcaagaaataattaacaacaagagtcctggagagactgctggaaatgtcttgcttgttactatagagggtgttcaagctagtgacgtcaccattgatgtgatccatatggttttctcggcctttgggtatgttcataaaatagccacctttgaaaaggctgcaggttttcaggcattgatccagtacactgatgcagatactgcttcagctgctagagaagccttagatggaaggagcatcccaagttacttgcttccagagcacgtgacatcctgctgcctgcggatttctttttctgcacataaggatttaaacatcaagtttcagtcaaaccgcagcagggattataataatccatatcttccaattaattattctgccatggatggtacattgcagcctgctgttggatctgacggaaggaaagtggaggctcaaggcaatgttcttcttgcatcaattgagaatatgcaatatgctgtttctgtagacgtgcttcatactgtgttctcatcatttggtacagtccagaaaattgctatttttgagaagaatgggggaacacaagctttgattcagtaccctggtatgtgtctacaaattgatcatgccaggctttaaatcactaagctttactggaagatgtttaagtagctgtagttgggttggtgtttgctggcggactttgtttgttttgctatcttgcttgttgtgttcagaagggttagtgcctgctgaccccttggtgatcagaggcaggagcgtgggaagcttgtgatgggaggttaatcattgaacttgtgaaaatgtgaagtctgtaatttcgttgctttggtattgaagctcggttttatcatgttggaaaaaaatcagtaggctttgatatagtgggtcaatcttgtctagaaaaatagcaaattgccccttgataccttgaacatcttacttcttttttgcagtaatcgtttaccatctgccaactctgaagtgcttggatctccctaaaaagaaaagattttccttatcagatgatgttttgccaaaacccaatgtgaaagtgattttcctgtgttataacaaaaacaagaggctttcacatatttaggaatggcatctcctgggaccctggagcccttgattaatctgcttatagtaacattgactttctcactaaacatgcagctgattatttcattttcccatgtgcttttctatagaaattattcatctgaatctgattaagtctttctttacactttagatgtaaatactgccgctgtagcgaaggaagcattggaagggcattgcatctacgatggcggctactgtaagcttcacctgtcatactcccgtcatactgatctgaatgtgaaggcacatggtgacaagagcagagattatacaattccagctggcgtaatccaaggggcgccacaaccacctggtatacaagccacgtcccctgggtggcaaggtaaccttcaagcagcagggccatatgccccacccggtgcccctcctcaaaatcacagtgccaatggacaagtgccgaactggactcctggcaattcagggtattccccagccccaggaacatatccaggccagatgtactcatctccggcacagtatgtagcatcagggagcttccttaatacctcagcggccactccgcctcagtatgcaacctcagggggcttccctaataccccatccaccgctccgtcacagtatgcagcatcaaggggcttccctaacaccacacctgccgcccctcctggtgctccatcacaaacgccgcacgcttcccagcagatgccgcatcagcatggaaatcattcaggaggaggcacgcccggaactagccaaccgccactgccagcatcatattaccgttaagttggatcttcttttgctattgtacttgacctgtgttttgaactgagtaatcatgtaatactgcaataacctgcggtctgtaactgtgtttagatgtgatagcagatggatacgagtgaggaatacatgaatatgtttggggttttcattcattttaaaaaacggatcagtgttggctcatggcgattactggcaagatcatgattgatgttggattggtggtaatgttctgaacagccgac

SEQ ID NO: 31770 - DNA, 501 bp, Zea Mays
gtccgagttgccttgtggcagttggattctcctgcgtcccaatcacgcagcctcttggcctccgcgaccgtcccctcccctcccctttcgacgagcgaggggctgtatgctgggcgccgtcgtccgtgtcccgggcccgatcctacctttcctgcccgggccgacgcgcccctctcctccgccgccgccactacctcccgcccgaaacgcccatggcctcggccaccccttgcgatggcggcaccgggaagcccgacgccgcgccggctcccacgcccgcgccaacgccgctgccgcccgagaagcctctcccgggcgactgctgcggcagcggctgcgttcgctgcgtctgggacatatatttcgacgagctcgacgcgtacgacaaggccctcgccgcgcgcgcggcctcctcaggctccggcggcaaggacgactctgctgataccaagcccaaagaaggactccaattgggatgcattgatttgaggagagcaacaa

SEQ ID NO: 31771 - DNA, 229 bp, Zea Mays
acgtggtggggacgctgagaactcaaacgtcaccaacagcgacacgttcgtagacaaagtgcgggttgatctccacgtgcttcgtgcgctgatgttgcacggggttggtggagaggtagatcacactgacgttgtcgcagtagacgagggttgcacgctgaagagggttgtggagttcgtgtagtagctggcacatctaggaggcctctgccacaccgttggccacaac

SEQ ID NO: 31772 - DNA, 2776 bp, Zea Mays
gtcagctcttgaaaaaaaagttccacttcttcttgttcttcctcttgttttctcgtctctcggatgacatctcagagttgggactagcaaggtttcattgcgctcaattgctatgtctaccacacaagcctcagaagcagctgctgacaaaggattgcctctggcagtggacgctaccatgattgatgagtatgcctcccagtcaaagttgctgcaagaatttgttaaaatcccaactattggcaaggcttggatcttcaattccaaggatgacgacatgtccaaagcagtggtttcgattggcaaatcagatcttttggccaataagaggagacaattccttttgaatactcacatttcaaagagtccctcaaagtctgtcgattttcagtggtcccccttccctactgaaataagtggagtgtcagcaatagttccatctccatctggagaaaaacttcttctagtacgcaattctgaagatgattcccctacaaaactagagatttggggcccatgtcagttagagaatgagatacatattgcaaaatctgttcatggatcactctatactgatgaatggtttgaagggatatcatggaaccaggaagagactttcatagcttatgttgccgaggagcctcctcaaccaaagccagtgtttaatgattatggattcaagaaggaaggtttatcagaaaaggactgcaagagctggaagggacaaggggattgggaggagacctggggagaaacctattccaagaaaaggattcctgcactgttcgtcatcaacatctccagtggtgaagttcgacctgtcaagcaaatacctagatcattaagtgttggccaagtgatttgggctccatcatcttcatatagcttggtttttgttgcatggtcatctgacaatgggttccaagggacaccaaggaagcttggtattaaatactgctacaacagaccatgtgctctgtatgctgctcctgatcctttcggacaagaagctgagaaatcattaactgagggcaataagggtgaaactacaactatgatcaaattaacagcaaacctgagcagtgcctttttcccacggttcagtccggatgggaagtatcttgtcttcatctcagcgaagagtgctgtagatagtggggcacacaatgctacaaattcattgcatagaatcgaatggtgtacagatggaaaactggatgggagccttggagttgctgacgtggtgcccattgtgctgtgccccaaagataactgttttcctgggctatactgctttggcttgcttagggatccatggcttaccgatggacaaactatgattatatcttctgtctggggaagtagggaagtaatactttctgtaaatgttgtgagctgtgaactttcaagagtgagtccccaggactcagattattcatggaatgttcttgcagttgataagaacaacattcttgcagtttccagcagccttattacactccctcagatgtactatgggattaaggtttctcagactgaaagcaattgggagtggcagggagtttcaactcctttcccaaagccatctgataagatcagctccgtactagcagagcataagttcagcatactcaaaatcccaattagcaacccttctgacgaacttgccaatggggctaagcttccttttgaggctatttttgtgtcgcataaggattctgcaagtaatccaacaatcgttgttcttcatggtggaccacactcagtttatccatcaagttattccaaatccttggcttttcttttttcgcagggatataatcttcttgttgtgaactacaggggttcattaggctttggggaagaagcactgcaatcccttcctggcaatattggttctcaggatgtcaatgatgtattgacggcattggaccttgttataaagagaggactaatagatccatccagagttgccgtagttggaggttcacatggaggtttcctgacaacacatttgattggccaggctccagacacatttgttgcagcagctgctcgaaacccagtatgtaacttatcattgatggtgggtacctctgacatccctgattggtgctttgtcgagatttatggaaaagaagggaaaaagtacttctcagagtctccttcagtagacgatctttgtcaattccaccagaagtcaccaatttcacatattgcaaaggtcaagacaccaacactctttcttcttggagcgcaagatctcagagttcctgtttctaatggcctgcagtacgcaagggctttgaaggagaggggaatcgaaacgaaaactattgtcttcccagaagatatccatggaattgacaagcctcagtctgatttcgaaagcttcctcaacataggggtttggttcaagaagcacatgggcaaataaacattagtgcttcccattacattcatgatttactttttcattgttactaaatgcctgtaaccgggtcaaagtatacatgatttgcctgtccaatctggtgtttgccaagatggaataattcttgaagacatatagaagcccgtgtttattctagtgtggattctggaataccaactgtagctagtttatataataatcttctaataaatgatgcttatgtgttaatgtgaaacggtgcgtgcttttgaattgtattcagaaaaaaaatggcccagctgaccagctcactgttgtttagttcatactaagactgtctccaacaggtcctgtaaaccctcc

SEQ ID NO: 31773 - DNA, 3232 bp, Zea Mays
cgcaccaacccaatccaccccccctcggcccacggcggcaccactacaccagtcagtcaccagaccactctgccgtcgccgcctacctcggcaacagtcaggacttaggacgcaactcatccccgccgcgagcaacgccaatgctccgaccgctacacgctacagccgccgccaccgctagctaggcccagccgcctcctcccttcccctccacgacgatggacccgaccacgcccgtccttgcgctctccaaggccttcgcctcctcccgcaccaagcccttcctcctcctcgccccgcaccgccgccgctccctcttcgccgcccgcgcgtctgccccctcctcgtcctccgtgccgggcgacctcctcatctcgctcgcgcggctcgcgctccgcggccccggaccccccgcggcgcctcggcggtggttcgcgagtgtctcttctgcctcgcctctcgcctcgggtggtccgccccgcggcggaggcggtcgggggaacggtgatggtgacggcggtggtggtggcgacggctggaagcgcccgcgcgcttcccagggagcgggtgtggtggaggaagcggcagcgcagggagccgatgtcatcgtccttgacgttgggggaatgtcgtgtggtggatgcgcagcaagcgtgaaacgtattctggagagtgagccccaggtacggtcagcaactgttaaccttgccactgagatggcagtcgtctgggcagtgcccgaggatagtgttgttcaggattggaaggagcagctgggtgagaagcttgccaatcagttgacgacatgtggctataaatccaatcttcgagattcttcaaaggttggttcacaaacagttttcgaaagaaagatgcaagacaaacttgaacagctgaaacaaagtggtagagaacttgctgtatcatgggcattatgtgcggtttgccttgtgggacacatttctcacctttttggagttaatatgccactgatgcacgtcattcattccactggatttcatttgtctctgtcaatatttacatttgtcggtcctggtcgaagactaatacttgatggcctaaagagtctgttgaaggggtctccgaacatgaatacgctggttggtttaggtgctttgtcatcctttgcagtcagctcaattgcagccttcattccgaagctggggtggaagacattttttgaggaaccagttatgttgatagcttttgttcttctagggaagaatctggagcagagggcaaaacttaaagctaccagtgatatgactggactgcttagtattcttccatctaaagcacgcctaatggtggataatgatgctgagaaatcatcattgattgaagtcccatgtgatactctagctgttggggactatgttgttgtgctacctggggatcacatcccagcagacggtattgtgaaagctggaaggagtacagttgatgaatcaagtttgacaggtgaacctatgcctgtaacaaagataacaggggcagaagtatcagcaggaagtattaacttgaatggtaaactcactgttgaagttagaagacctggtggtgagactgtcatgtctgacatacttcacttagttgaagaagcccagacaagggcggcccctgttcaacgattggctgacaaggttgcagggaactttacatatggagtcatggcactttctgctgctacttacatgttctggagtattttgggttctcaacttgtacctgctgctatccaacatggaggtaattgcttgtccttgtgctcttgggcttgccactcccactgctgtactggttggcacttcattaggtgcaacaagaggacttcttttacgtggtggggatgttttggagaagttctctgatgttgatgccgttgtgtttgacaagactggaactttaacaattggtagacctgtgataactaaagtaataccttctagaggcatgggcgatgcgaatacaaaggatttgggggccaaccagtgggcagaggctgacattctgagttttgctgctggagtggaatcaaatacaaaccacccgcttggaaaagccatcatggaagctgcaggggctgccaactgcgtcattatgaaggcaaatgatggatccttcatggaagaaccaggatctggtgctgtggctaccattggtgagaagcaggtttctgttggaacattagattggattagaaggcatggggtcattcacaaccccttcccagaagcagagcattttggccagtctgttgcatatgtagcagtgaatggtgctctggctggtcttatttgttttgaggataagctcaggggagattctcgtcaagttatcgagacactatctaaacaaggaattagtgtatatatgttatctggggacaaggaaagtgctgctatgaatgtggcttcagttgtcggtatccaggcagacaaggttcttgctgaagttaaaccacatgagaaaaagaagttcatatctgaactccagaaagagcacaaggtagtcgccatggttggtgacggcattaatgatgccgcagcactagcttcagctgatgttggaatcgcaatgggtggaggtgttggggcagctagtgatgtatcttcagttgtacttatgggcaacaggttatcccagcttatcgatgctttagagttgagtaaagagaccatgaagacggtgaagcaaaatctttggtgggctttcctgtataacattgttggactacccattgctgctggagcattgcttccagctacggggacgatactgacaccatcaatagctggagctctgatgggttttagttcggtcggtgtgatggccaactcgttgcttttgagggtgaggctgagctcaaggcggaagcgagaaccactgaaagccatctctgatgaggttgagaaaaattactcatcgaaatggagtacctgagtagttcggatcttagaccatgttcacgttcactcattcatatgatttggacacacgcatcaaaggcagttgtcagttgaacaaatgaaacagatgtagtatgcaattgctgaggtcagtcagttcctgtggtttggtagatcttcatggtgtgctataatataataccccctctattccaatttataaattttttgacttttttttaccaagtttgattagcttgtcttatttattttttttcgaaaaaatagaaatttcacttaaa

SEQ ID NO: 31774 - DNA, 1756 bp, Zea Mays
acccataggaaattttggtccccatattgcagctttcccaaccaaccatgaactcacccgcaccacgccgttaacgggtccagaacctcgcttccaatctgccctcccgtgtccccctccctgtccgattccccacagtagcgcctcgccctcgtcctcctcctccagtccggatcgccatttcccaccgatccgtcccggcatcggcatggctgcgcccaagccaaaggcgccggcgcccagtgcttcggcagcctagcgtttgtttgcctccgaggatttccgcctatcgcgttaccggatcttcggtgggccggcgaccctctacgccactatgagctccgacgggcgcctccgccgcgcgctggccgcgttcggcggcgacgtgtgggacctcgtggacgcggcgctcgccgccgccgcgcgggacagccccggcgacctgcgcgcgcgccgcgacggcatcgtccagcgcctctacgcaggggcagcccgctgccgcaactgcgacgccgacgcaaccccggcgcctgctcagccgaggaaggcgaatgacgccgtcgctgctgctgcttctcctgcggcggcggcgtcggcgtttccggcctcgcctgaacaggaggtcgacgcggacggcctcgacgacgtcgacgacgcggccgacgctggcatggagagcaagattctggcgatcagggatttcctggaggacccggaccagtctgaggacgacatagtgagcctactgcagaacctagcagacatggatatcacttacaaggctctccaggacacggacatcggccgccatgtgaatggcctgcgtaagcacccatccagcgaggtccggcaactggtgaagctgctcgttaggaaatggaaggaaatagtggatgattgggtgaggctgcacaactcatgtggtgatggtagtggctccatcataagcgatggtgactcacctgacaaagttcaatccaagtaccatcaaaatactcatgcttcagacttcaagtatccccccagcccacagaggcataatgttttgagctcagagagatctagcaaccacaatttggtggagtcaacaatggagaagcgtagaacgagccctgctcctgcatacaataacaccaagcagaacaacagcaacaactattccagtatttcatcgtcagcaccagctagagcaatacgggagcaaaagaacactcttttggattctgagaagctagactcagctaggaagaggcttcaggaaaactaccaggaagcgcaaaacgtgaacttgtcaaaatgacgtgctaaattcaggccaatgctatgccacgaaaaagcagaggacgatacaagtgatggatatccacgacataccgaagccgaagaacaggaacaccttcgtgcgcaagagcggcagcagcgccggattcccggcaaagcaccggtgatctctgcctgaccaccatcggatctgtagcggactcagcgtatttatttctgtactagcaaaaagaaaaaaaagaaagaaattttaagaagcaaactcttgttttcccagtttgatttgtagccctgcagtccagctcactgatattatagggatatatatactgcctagtccatgaggctacgcttttgtacctctctttaagattggagaacagaaggaaagcaaattgtgttattattcaatgacattcacattcctgcctgataaagatatggccggtagatcatgcatatggctggattacgt

SEQ ID NO: 31775 - DNA, 845 bp, Zea Mays
ccctccatccatttgaatctctccccctccccgatcatcgcaggccgatcgatcggcggctgcggcggcgatggggcggaggaatgacgacatcgactggaagagcgtgtttctgtcctacttctctcatggcgcctcctccgaccccgccgcgacgcgggcgtcgggcgtcgcgatggcggcgtcatcggacgacgacgagcgacggcgggggtctccgggcctccaccaacggtccgaggagccgcgcagcgagctggagcggcgcttcggcaagtgctgccgccccggcgcgcaggttgatggcggggcgcaggcgcagcactgccgagtcacccgtgcggcggccaaggctgctgttggtttgggaccggatgtttcttctgcttctaacgttgtatatgacctcagtccaataaatgatgacaaagaaggggaacatgtccatgacaaaaactattctaagttatctcccaagtttagcgagaagaagaattatggccaggtacccttgagcaaacagaaaagtcaaggccatggtggaaaaaggaaatctataccggtggccaagatttactcaagccaaccaaattcaacaactcatgccattgatttaaaggagcctgatcatcaaagttcacttcccagtaaattctctaagaggaggaagcaacaactccaaaaatcatcttctatttattctcgaaaggacttaatgtccttgcatcttcacaaggtgacaagttccaatcttggtggcgctgaagcacatggagggcacccaaggtggcaagaaaggactaaacacattagtcatcatcattgcttgagtgatatggaaacat

SEQ ID NO: 31776 - DNA, 1169 bp, Zea Mays
cgtttctttcctcacctcccgcgacagcaccggtagctgccatggcctcttgcgacctccttgatgtcgaccctctggagcttcagtttccgttcgtgctcgacaagcagatcccctgcccgctgcggctcgccaacaggactgaccgtaccgtcgcctttaaggtgaagacgacgaacccgaggaagtactgcgtgcgccccaacaatggcatcgtaccgccccgatccttgtgtacggttgtagtcacgatgcaggcgcagacggtggtgcctccggatttgcagtgcaaggacaagttcatggtgcagagcgtggtcatcagtgatagcttgtcagccaaggacataacctctcaaatgttcgcgaaagaggggggtaatgtgctccaggaggtaaaattgaaggttgcttatgtgatgccacctgaaccaccatcagagattgcagaggagcacgatggtttagatcgagttttagtgcctatgcagaggatcgtggataatgggaaaagtacttcagagctatcgagtggctccgtgtcattgaggagtttggatcacctgttggtcgaattgtgaagagtgaggagtttctgaaggctgcaggacctgctatggaaacaaaaacatatgcaggacctggtgaacaatctcatcagctgtcagctataattacaaagctgactgaagaaaagaattctgctcttgagcaaaacagaaagcttcaagttgaattggaacttgtaaggtgcgaagccaggaaacagcaaagcgcgttctcgttggttctcctaatagcgtttgggctccttggcattgttctaggttacattgttaagaaatgataatttcatagtctaatcgagcaatcgctatggtaaataaaaggtaacatgtcgtgtgattcttacattcatcagccagctgccaatgctacagagaagtgcaagcgtcagttgacaaaccgggggtgggggtgggggtgcggagtacaatagcatgtattttgatccacatgatgtatttacacgaatcactggaaaagtgattgttgtttggtttctgtatctatcccataccgtttgtctctaaaattgtgaattgggtccactcatggatgtgaccacgttgttaacaaaatgagcgggagatcgtgtccgagtaatg

SEQ ID NO: 31777 - DNA, 2424 bp, Zea Mays
ggcggctcatccgttgtccgcttcacttggagtctccgccgccgacgccgcctccgtctccacctgaccaccaccacctcgccgcgcgcggacctgaccgatcgaggtcgacgacgatggccgctggcggcgccggcgcgtgccctccgccggggctgggcttcggcggggagtactactcggtggtggacggcgcgtgcagccgcgacggcagcttcttcggcgggaagccggtgctggcgcaggccgttgggtacgccgtcgtccttggcttcggcgccttcttcgcgctcttcacctcattcctggtgtggctagagaagcggtatgttggatcgcagcacacctcggagtggttcaacacggccggacggagtgtcaagaccggcctcatcgccagcgtcatcgtctcccagtggacatgggcggcaacgatcctgcagagctcgaacgtggcgtggcagtacggcgtgagcgggcctttctggtacgcgagcggcgccaccatccaggtgctcctgttcggagtcatggccatcgagatcaagcggaaggcgcccaaagcgcacaccgtctgcgagatcgttcgcgcccggtggggtcgagcggcgcacgctgtgttcctggcgttctgcctcgccaccaacgtcatcgtcacggccatgcttctgctcggtggctccgccgtggtgaacgcgctcacggccatcaacgtctacgccgccagcttcctcatccctctgggcgtggtcgtgtacacgctcgcgggcgggctcaaggccacgttcctcgcgagctacatccactccgtcgtcgtgcacgtcgtcctcgtcgtcttcgtcttcctcgtctacacctccggcaaccggctcggcagcccccgggtggtgcacgaccacctcactgccgtggccagcgcggtgcggaactgctccgccccgctctcgcaccctgaccaggcatgcggccccgtgcacggcaacttcaagggctcctacctcaccatgctcagctccggaggcctcgtcttcggcatcatcaacatcgtcggcaatttcggcacggtcttcgtcgacaacggctactggatgagcgcgatcgctgcgcgtccgtcgtcgacgcacaaggggtaccttctgggtgggctggtatggttcgcggtgcccttctcgctggccacctcgctgggtctcggcgcgctggctctggacctccccatcacggcagccgaggcggcgaaggggcttgtcccggccgccactgccaccgcgctcatgggcaagtccggctccgtcctcctcctcatcatgctcttcatggctgtgacctcagccggctcggccgagctggtggccgtctcctccctttgcacctacgacatctacaggacctacatcaacccggatgccacaggcgagcagatcctgcgtgtgtccagggccaccgtcctcgtcttcggttgcctcatgggtgtcctggccgtcatcctcaatctggtgggtgtctccctcggatggctgtacctggccatgggcgtcatcattggctccgccgtcatccccatcgcgctgctgctgctgtggagaaaggccaatgccttgggcgccatcctcggcgctgtcagtggctgcgtcctcggcgtcaccgtctggctctcggtcgccaaggtgcagtacgggcgcgtggacctggacagcaccggccggaacgcgccgatgctggcaggaaaacctggtgtccatccctgcctggcgtggccgcagcaatacgactgggagagcagccggcagatcaccacggtggagagcgtccctgccgacagtgacctggcggaggaactcaaggaggagcggctggtgcacgcgaagcggtggatcatcaagtggggtgtggccttcacggctgtgatcgcggtggtgtggcccgtgctgtcgctaccggcggggaggtacagcgccggctacttcaccatgtgggctgtcatcgcgatcgcctggggcacagtcggctcagcggtgatcatcttcctgccgctggtggagagttgggacactatctgcaaggccatcatgggagacatgcccgaggcggaggagcgttaccaggagatgcagaaggagaaggaccttggcaccatggagatggtgcatcctgcatccggtacccgcccatccattgtcgccaatgacgatgaagataatctttcgctagcttaaaattaaatattaaagctattcttccgtactgatgaatccgcagattcagtgtatatatatatcaggctagcagaagctatatatctttgtgtatatcctaccgcatagtatttgtgcactcaataaatctcaaacggaacaaaccgtaaacttgttcgattaggtgtatttcattttagtccataaattactgaataagaaaactaaa

SEQ ID NO: 31778 - DNA, 1217 bp, Zea Mays
ctcacctccaccaaacacgcatccacccgccagcactactgctgcgtggcaaaaatccctggatcagcattgtccaactccgacacgtctctctccctagcttcaatcttcagccaccgctttatataggatattttcctcatcgtgttcaacaggtgcttggaatcagcctcaggtttcttcctcccagtccgtaggagccacgtagctctctgcgtcttccatggtcacttctccggcgttactccagctcgccccgacccttgcgccttagtgtttatccatgctccatgccatggcttctcctaggtcgctctcttcgcgggccgtgatgcccctctgctcctgcctcgcctagccgtcttcggcgtccatcgcgtcctgctccttccattcgtatgctctggtgatcgtccaccccggcgtccagcgctgcccttgtctcttcgggttttgtctccccaacaccagtcggacgctccttccattcatatgctctggtggtcgtccaccccagcgtccagtgctgctctcgtctcgtcgggctttgtctccccaacatcagtcgctgcttcaactcatgttcgtggatgccgtatctacgactccgacactccctacacataatctgtgttttgtgttcatcgccgaataaaaatccctggcgttttggagaaaggaagatgaagtctgctcttcgatccctaggtgttcagtgttatgcgcgaaccagaaatcgttgccgatatcacggtcttcaagttgagtttattttattggtacgttaagtgatcacgtgatgtggaggaccagagctgagtcgaccacaagatgttgttaagcgtgggcttcttcgcaaggtgatgctgatggacgaacctaaggatggatgacctgatcaagaaccatgatgaagatgatcgtcaagtgaacgtcgtctaacaaacactaacgtagtgtttattccaggtactagatttgtgctactgtggatggtgttaagcgccaattggcacgaccttcttataagtctaagtacctctcctataattcttattgaggattgtcattgagctagcatatatttcaaaattataaataatttataacatttcaaagtttaattctttgaatcacttttgcaatcactccgataaacataatgtaaatttgttgtaacttgtaacttttgtaataaagaaattccgctgcaaaaa

SEQ ID NO: 31779 - DNA, 3067 bp, Zea Mays
aggaaacagcccgtccaatccatcccctcaccccattgcctctccctctccctcacccgcacctcaccactcctcggcctcacttcttcacaagttcacatcagcagcagctcacgaaacaggagcgtcataaagacatggtcgtcgcaggatagcctcagacccagcgacgcagcggcagcgacccaggaagcaacagcgaccggcatcgatcgcggcagccgaggcggggggacgggaggagggagggagcggtcgccgcaggagcagagcggcacggcatggggtcctgagtgactgactgactgacgactgagtgtctgactgagaaggagatggctggagcgcgacggccccggagccattaatggggcgctcatcctcctcgtcctcccactcctcgcctcccccccgccaggtcgcggtcggctccgctttttaaccggcttgtcctggagcggggcgaacggcgaacctcacgggcgccggaacacgaaccggaaccctagtggtggtggtggtggcgcgccccatgggcatcgacctcaacatggcggacggcgagagccaggagcgccgcccgccgccggcggtgtgccgggagctgtggcacgcgtgcgcggggcccgtggttgcgctaccgcggcggggcagcctggtcgtgtacctgccgcaaggccacctagccgcggccggcggcggcaacgtcgctgtggacctgccgccgcacgtggcgtgccgcgtcgcggatgtcgagttatgcgcggatgcggcgacggacgaggtgtacgcgcggctggcgctggtcgcggagggcgaggcatttgggagaaatctgcgtggtggtggagtcgatggggacgatgacatggaggattttgatgttgaaaggaagtcccggatgttgcacatgttctgcaaaacgcttacagcctctgacacaagcacacatggagggttctctgttcctcgtcgtgctgctgaggactgtttcccgcctctggtcagcctcgtaggcatctcttgactactggatggagttcatttgtcaataaaaagaaactggtttctggggatgcggtcttatttctccgaggtgatgatggtgaactaaggctgggcgtacggagggccattcagcttaaaaatgaggccctttttgacgatttcagttgcgacagtacaaaacggcatacattgttggctgtagctgattccttgaagcacaaaagtgtttttcacatttcttacaatccaagagctactgcttcagaatatattataccacaccataagttcctgaagagcctaaatcttccattctgtattggagcaaggatcaacttacagtgccataatgaagatgttagtgaaaggcgatctggaatggttgttcatgtcagtgaaatagatcccatgaaatggccaggctcgaagtggagaagcctgctggtaagatgggaggatggtgttgaatgtaacggccaagatagagtatctccatgggagattgagatagctggtggctctgtctctgttgctcattctgtgtccgcatctagctctaaaagaaccaagttgtgtcctcagggaaatttggacgttccaacaatgtggaatgggaatggttgtactgactccgtggaaactggaaagtttcccagggtcttgcaaggtcaagatttgatgagttttaggactcgtcatgttccgtctgctcctcaaactgttgaggctgcaaaacttcaatcttctggtgctagtaggttcctcagtaatgcacgtggctgcgcattgggtggtccaacaagcagactcgcagtgcataactctgattttacctaccaatctgtaggcttcaatgaatctattggattctcagaggtcttgcaaggtcaagaaatttctcgggcagttcctatgttccaaggaatgatgtctgaggcttgttcactaaaaggaggatatgggctgcatagttatatgcgtaccccagttgctgttactggattgtcagccacaactcaagagtgttctctcacactatctactccgccaggagcacaagttccttctgtctaccctgataatatttttaaccgaactgtggttcgacagcttggactggcaagcaagtttgatggtggagctacaaatgcccagcagtctgtcccatttgataggccgagggaaatttggagcaagccacagcatgaaatatctgatcaaacgaaaatggatcactttgagactagaagagcttcagcacctggagatgatgctgctaagcatgggtctggtggagaggtggttcgcaaaactagctgcagactttttggtttctcgttgactgagaagatcttgccagcagatgatgatggcatcaaggaagtgacctatgagcctgagtgccagaatccacggatgctggacctgttcgggtacaactgctcagccccaagtgctgctcttccagctctgtgtgctgccccctttggaatgtgatgctacttcaataacgctgctgagtatttccatgtactcttagaagttttactttcctaatacccaagtgtatgtcataagctgccttttgacatcattccccctgttggtctgcctcaagcgaagcagtcatttgcacaagtaaacaaaggatcgttgatgatccacttctcgccatgcctcaccctatcgctaagatattgtaattagtcttaggatacgaagaggcagtacattgtaactgactaacttctgtggctgatccttcagaaaagttgtgcgatgaagcaaacaattttctttagaagttcttcgctggcagattttagattcatgtggggaggtttgtcagctcagctttaatgtactggttatgtatctttaaatcagctgctgtacgactttttttttagctccaagccctggttgcagtcgcctaggccgtgtgattgtatcagtatgtaagacatgctatattttaatattcttatcgatatttattctgatgcattgtgtgtgaatattctgttcttcatcgcatgcaatgcaagtcatgtcttct

SEQ ID NO: 31780 - DNA, 1568 bp, Zea Mays
tgcagctgtgtcgcgatttagaggatgcattaggcgaggtaacctttgaagatggcattccagaaatcaagtttagtaaggtgcttggaaaaatttggtctgtggcatttaaatatcacttccgtatgccaccttactacacacttgttctccggtcacttgcctctttggaaggactagccgtggcagcagatgggactttcaaaacatttcaagcagcatacccatatgttgttcggaagcttctgtccgaaaattcacttgaaacaagaagactcttgaatcaggcaatttttaacaaaaggaaagagttccaatggcagaagattgacgcgtttctaaaattggcttcagcaaggaccaacttcaagtataacagtgaagttttgccagagcctgacatgaagtccatgaatgtggctagccttgtggagatcagtgatgcatattcacttgaccgtgctatagctacaccagagagagcattgcatactgcaaacctgtgtgtgaggcttttattatctaaggagagcattgtgattaggagacttattatgacagcgaatgcaaaatctcttgcccgtgatctgatctccagagatgctttgatgttccgggtgctccttagtaaggttattgcggatgttgtctaccaatggatgttgagtgccacaggcttgaaacgagttatggagaccaagatccagacgcccatgaccacaggaaagaacgagggacatctggtgctggctgaagaaccatcgaccctgatggtactccaggcggcagtaaaagaccgaaggattcagctcatgttcaccaagtttgtgagggagttgagagaggagcccgtcttgatgattagggtgagctggaacgtgttcctcatctcggtctcatctgccgctgtaggcctgcaccgtttcttggtgttcttcttgaaggaggatggtgccaggttcttggatgacaaggtcaagaaaatgaagatttggctgatggagttctcgaagcggacggctaatctggagattcaaggaattctgtgaatgttggtggcttttggttgaaggatttaatagctgcttcgcactctggtttttggagttactttctgcatcgagtgaatccagttcctgtttacgctggctgtctgagcttgcttggctgctggtgttcccagagatttataaaaacagggttttcctccgtcattccgccgcagctagtatataatagatggttcttggttgttcatgtactgtgtagctgtatataatagaaacattgcaggatcagtgagtaattctgtggccgagtaaagtgcagtggtggaaggcatgtgttacctactggatataaatatgatgatgtgaatgttcagttgaaaaacttgggtgacatgaactgatgaactatagctgatgcctccactttagaaatttagctgttttagtttgtctaaaatcaaacctttctttgacaagtaacttgcataaactcgggcgaaatcgtttgggtagatcatagatgtttgtaaatttgtccgattattaacatgaacagtg

SEQ ID NO: 31781 - DNA, 2035 bp, Zea Mays
gcgtggggcgcgcgcgcgagcgagctgtgagcatcgccgttcctctcgcgctctcggctgtctcgctccttcccgcggtcgcctccgcccgtgcccgtgcccgtgccccgtcccaactcccacccaacatttcccaatccctccgggctccggcaccgcgagatgtttcgttagccattcccacgacacaatcagcaccaccggtgccctcgctgccaaggcgcccgctcgtgtgacgagtggcgctccaccaccgcccattgcgcgctcagctccgaggcctcccgctcgccgcggcatcatctccggctcctcccgccgccgtgggcgtcatgaaatgaacctgacttgcttgagttgcttcttgacaccataagaaggcgatccatctgtttccagttgcacacagaaagctagtgccttgaaagataagaatggtaaggggggcggtaggtgtcctaagatgaaactgcggttgcatctgttggtcctgtgcgtgatcatcatattcctggtgtacaacatggctagctttcaacataagcagacatcgtcggaagcaaaatcccatccatttgatacagtgacggtctctgacagagatgctgttaagttgccccaaaaagctgaggttaggattggttatttaccccatggtatagtggagtctaactccgacatgaagttgaaaccgttgtggttgacaacaagtgcgcagtcaaagaagtctaaacaaaaagatcacttcttgattgctattgctgccggtataaatcaaaagaaaagtgtggacgctataatgaagaagtttcttccagaaaattttacagctgtattgttccattacgacgggaatgtcaatgggtggaatgatctaccatggagcaaaagtgtgatacatatagctgcttctaaccagactaaatggtggtttgcaaagaggttcctccatcctgctgttgtgtctatgtaccagtacatctttctttgggatgaagacctggaagtagataactttaatccgagaaggtacttaaatatagttagatcagaaggactggagatatcacaaccaggtcttgattctaagctttctgaaattcatcaccgaataactgttcgtaaaaatacagggacctttcatagaagagttagtcgggctaacaaacgttgtttaagagaaggaccgccttgttctggatgggtcgaaggcatggcaccggttttctcaaagtacgcttggcaatgtgtgtggcaccttatacagaatgatcttatacatggatggggcatcgattacaagtttgggtattgtgctcagggtgacaggacaaagaacatcggcgtagttgatagtgaatttatagttcaccgaggagtgcagacattaggaggttctacaataacaaaggatggtattcgtggcaaaaatgcccagtcactccgccagaaagcagctcaagtccaaaaatcgagagggagggatcctggccttgatatgcgaacaaagatccggagaaaatcacgatcggagcttcgtgatttccagaagcgctgggcccgggctgcaagggaagacagaacatgggttgatccgtttgcccactcccgaagaaagcggaggaatagaaacccacagtagataagcataatcatcattgtttaagcttgcacagaattcgtctgcacctaccatctagggtgtgtttgatatagctccagagcagaattctaaggaggagctagcaagagtctactaaacactcgtaactctagagttgcaaactccataaagttttcagagttgtagtacatatagttggagtacttcttttgctgctctgaaaacttaaaaaaacaacctagacgtggagtttggagttatttatccgccactgtcattggttatgagaaaataatttaaatctggagtagagctgcttcatccagagttttgaagtggaactgctctaaagtagaacagagttataccaaacatgcctttagtgtatataattgcatggttcgagtggga

SEQ ID NO: 31782 - DNA, 268 bp, Zea Mays
gttttagtagagaaatctaactctttccatctctagatccaattcgaacctccgttccctttgatttcgtttcctccctgtcccgtttggccaatcatgaataacccttaacaaaaaaaatacctaaacaataatgaggagaataataaagagggatgcccactcatcttcctgtgtcacctccttcctgttttagttcccatcttaaaccctttctcgtttcgtaatcctcgcacactgggagagcagtaaattagggatttgtatt

SEQ ID NO: 31783 - DNA, 672 bp, Zea Mays
ttggaagctttccggtggttacgcggtacgggcggggcggcggcgtcatatctcttttcgaggcacgacgaggcggttggaggcttggagcgtgtgatttgcaagaggacaggacaggacaggagaacgcccaagttgaggtttgagcggcacacgtcgatgagattttctagaaattctgttgaggcagttagctgctggtgtccaatgcaggatggctggcggtcgagactgaaaccacgacggcggagtgaaccagcgagctctccgtccggtgggtgggtgccgatgcctgtactccccgggcttcatgtcgattcaggcgcttgagcttgctttcccgaacacaaatgttcagtttgctaattacctggttcgttgtttctgtacaaatagagtttgggtgaagtctgttcaccatgacactcagttatggtatttgtgccttttgactattggtttgtttggtgtgagagttgtattatgatgaatacacaatgtgaagttacatatttgattctgagaagctttaatgttgtaaatagcaagtatgtcctttttaccatttttgccagtattcaaggaaccatcagatcagtgtgaatgagttgtatacgtagggagtaatctgtagattgtatctgaataacaaggtatagatgagtatctaag

SEQ ID NO: 31784 - DNA, 458 bp, Zea Mays
atggccgtctggccggcagggagggtggcggcgaggctctcttcttcgcgttggtggcgcgctccgcagcaggccggcaagacatccctcgtgcggctgcgtagagttgtctggatggctactgcggctgtggcggcgccggctggtgcccgcgcaagtgcaggggacggcggctggggtcgctggcccgtggcccaggcggtcggctccggtgctcgggggctagatctggaccctgtcgaccggatctgcctcaacagctggcagttgagccttgggcagtttacaccatttttgactaccgaaagtgatctaagaccttggcttcttctccttgaagagtgcaagcagcgacacaccagaaaccttaacaaccttgaacctgacaccaggaatgtctcccacagcatgacccttacgagttacgaccaaatccagcaatcaacacctcatcattc

SEQ ID NO: 31785 - DNA, 3820 bp, Zea Mays
caggctggctggctcggtgcctcccctgagttccatctcctgtcatgccgccgccgcagtagagctaacgagccacgggtagcatgcgccgcggcctgcgtcgcgggttgggcatcctcctcgtcccgctcccgcacgcacccagccgcctgccgccgatctctctcgcggctctcctcccccgacgcttcaatggcttctcccgccactccttctgcagcttccccgtcggggagcgcgccgtcgagcagttctcagacgacgaatacgaccacgagtacgaggacctccggccgtcgtcatcggtggcgaacatcgacgagtggaggtggaagctgagcatgctgcagcgcaacgcggaggaacaggagatcatctccagggaccggagggaccgccgggattatgaccagatagccaacctcgccaagaggatgggactctacagtgagatgtacggacgggtcgtggttgcgagcaaggtaccactgccgaactacaggcctgatctggatgacaagcggccgcaaagagaggtggtaatcccgctgggtttgcagaggagagttgaaggacttgtgcaggagcacctagaccgcgcattcttaccactgaataaatgtggtggcaacacaaaaaatggctctgacatgactgagaatgcgaacctggatgagcagcatgattcccttcttgatcggtcagtcatggagaagatacttcagaggaagagcattcggatgcggaattttcagagaagttggcaggaatcacccgaaggtgctaagatgctagaattccggagatcccttccagcagacaaagaaaaagaaaggcttctagcagccattgcacgcaatcagccacgaagaatatctgcaatggcagttgcagaaagggtatccacagagagaggagaaaatcttggtgaatcggttggctataaagtccgattggagggaattaaggggaaagatacacatttgcttttctgcaccagtggcatcttactaagacgcttactgagtgaccgaaacttgaatggtgtgactcatgtatttgttgatgagatacacgaaaggggcatgaatgaagatttcctgttgattgtactaaaagagctgttatcacgtcgccgtgatttgaggctgatattgatgagcgctactctaaacgcggaactcttctcaagttattttggaggagcgccaactatccatattcctgggttcacacatccagtaagggcacattttttggaagacatattagagaggtcaggctacaagttgacctcaagcaatcaacttgatgattacgggcaagataaagtctggaaaactcagagacagctattgcctagaaaaaggaaaaatcaaattactacacttgtcgaggaagcccttaaaaattcaagcttcgagatctatggctccaggacacgtgattctctagtgaattggaatcctgattgcataggtttcaacctcatagaggctgttctgtgccacatatgtcgcaaagagcgacctggtgctgttttagttttcatgactggatgggacgatattagttgcttgaaggatcaactgaaagcacatccattgttaggtgatccgaatagggtttttctgcttgcatgccatggttctatggctacttctgagcagaggctaatttttgagaagccacctcctaatgttcggaaggtagtccttgccacaaatatggcagaagcaagtattacaataaatgatatcgtttttgttgttgattgtggtaaagcaaaggaaaccacatatgatgctctaaacaatactccatgcttactcccctcatggatttcgaaagcttctgcccgtcagaggaggggtagagctggccgtgtgcaacctggagaatgctaccatctgtaccctagatgtgtgtatgatgcatttgcagactatcagcttccagagcttcttagaactcctttgaattcattatgtctgcagataaaaagtttgcaagttggaagcattggggagttcctatcagctgctctacagcctccagaaccacgagctgtcgagaatgcagtggaattcttgaagatgattggagcattagatggaaatgagaaccttactgatcttggacgatacctttccatgcttccagttgatccaaaattgggaaagatgctcataatgggtgcagtttttcgatgcatagatcctatacttactgtagttgctgggcttagtgttcgggatcctttcctgttaccacaggaaaagaaggatttggcaggaacagcaaaagctagattctcagcaattatttagcaagaagcttattttgcatgaaggtaagaaggcttgtttttcatattattactttatatattagttggcaggaacagcaaaagctagattctcagcaaaggattatagtgatcatatggcccttgttcgggcttatgaaggatggaaggatgcagagagagaagggtctgcttatgaatactgctggagaaatttcctttcttctcaaacactacaagccattcactctctccggaagcaattcagctatattttaaaggattccggtttgatagactctgatgggaatacaaacaacagtttgagccataatcaatcattggtccgcggtattatatgttctgggctttttcctgggatagcatctgttgtgcatcgagaaagctccatgtcctttaagaccatggatgacgggcaagttcttctttatgctaattcagtgaatgcaaaatatcagaccatcccatatccatggctggtctttggtgagaaggtgaaggtgaatgctgtcttcatccgtgattcaaccggagtatcagactccatattgattttgtttggcggtgctgtagcaaaaggaggcatggccgggcacttgaagatgctcgatggctacattgatttcttcatggaccccagcctgtctgaatgctacctgcaacttaaagaagaactcgataaacttatacagcagaagcttgaagacccaaacttcgacatccacaaggaaggcaagtacatcctattcgccgtacaagagctcgccgccggcgacctgtgcgaagggaggttcgtgttcggccgcgagacgagccgggcccggctccggagccccgaggacgacggcaagagcaacctcataaaggacgggatgaaccccaagagcctgctgcagacgctgctgatgcgggccggccacaccccgcccaggtacaagacgaagcacctcaagacgaacgagttcagggccgtggtggagttcaaggggatgcagttcgtggggaagccgaagcggaacaagcagctcgcggagcgggacgccgccatcgaggcgctggggtggctgacgcagacctccggcgtgaaggctccggacgagaacgacgacgactcgccgctggacctgactgacagcatgctcaagctcctcaccaggccgaggcggcactcgaagaatagctctaggaaacggtgattttttgggcgaggatttgctgtagattgatcgcgcacacgcacaaaaggcatagagagagagagagagataggaaacgtcagctttggttacacgaatgcctcatggtctcgatgtgttgctttgtacattttttatttttatttttccacgctatgtcatcagaatcagaagttcctccatcctgctgattgctgtcaccgtagaacatggtttaaaaaattaaaataactgcctatagcgctgttatttctatagaaataaccttccgaagaatctaaatctacgatattac

SEQ ID NO: 31786 - DNA, 2897 bp, Zea Mays
ccgccacctcactgtcgcccctcgctctcgcccgcgaagacgccatcgccaacacgtcgccccgctctcgcctgcctatcgtcggacggtggcagtagcacccgccaggtcgctctcgcccgcctcccgccccgctctcgcctgggcgctatcgccgtcactatagctggcaccagccttaccacaccccagcggcccctgccccgcacgccgtcctccctcccgcctgcgtcgccaggtctcggcgacgcaattattgccgcagcgaagcgacaggtgtggcgtcaatggggtgggtctgaccctgactgcccccatccatccgtcgcctacttgtcgcgtactagctagctccgggtggagtggagctagctagtcatggcagccatcatcatagccgtagagccatagccacacttgtcgctcgtcatcaagagctgccgagatagttgcggcagcaggcagcacagtgccgctccgtccgtccacgggctgtggctgtggtgtgcacacatatgcgccgccgccgctgccgctgccgccgccttgtcgtttgccctgtcgcggctctgctcggctgcgtgggctagtttacagccggagttgtacttcgcgttcgcggcggggggaaggagggggggagtaaagaatcggaggcgcgcgcggattggatgctgtgcgtgcgcgcggaggacgcgctggccgccgctgcagccgcggccgcagcgtccgacaagatgcgctccgtgaccctgggcgggacgatccagagggcggtgcggaggatggctggcggcgccggccggaggagaccccacgccttggcggactcggggaccgccgactcgtcggcgtcagcatcggccagctgctccggggatgatatcagcagcactggtagtgccaagagggaagcggtacaaaggtgcaccatgcatcggtacagatcgcagctagagcaggaagttaacaaattgcaaaggcaactccaagaagagattgatttgcacatggcgttgacagatgccattacatataatgcggcgctgatacttaaggcatctatgaagcttcctgacaaggcacacgagctattgattagcatatcctctctggaaaccgctatcacaaagcttgaagaggatctacatcacctgcactaccagttatgtgatgcgaggaatgaaaggctacttgcagaaaataagccagaatgcttgctacctacagcgtcagattgccaaccttctacagcttgcgattgtacaagggaagagcctgaacaaacattaagatattcgagattcaaagattatcaccaagtggaggacggtttgtcaactgaacctgaagatcaacaagatgacgaaaaagacgccgaagatggagaacatgtatctctaaatatgctgatgcaagaggcatgctctatggaaaatgaaggcaaagaagatcagaagatagatgcattaacatttagtcagcccaatttcaagaaaagcgacatgagtggaaatttgtggaataatccaaaccagctctctgaagagatgaacgtctatctggttcaacattgactactttgtcagattcatctataatcgcctcagtgctgcggagtccttcgattgactggaacaacggcgatggtattattgatgatgttagaaactttgacccgtacaacgttaaaggcaaggaagcacggagagacgttgggagctattgttcagtagctgaagtgtcttggatgtatattggcaatgaacaacttgaatatgcatccggagctcttaaaaagttcaggtttcttgtggagcaactatcaaaggttgacccttcttgtatgaactgtgatgaacagatagcattttgggttaacttgtacaatgcattaataatgcatgcttatttggcatacggtgtccctgaaaatgacattaagctgttcgcgctaatgcaaaaggcctgttacacgatcggcgggcagcctgtcagtgcagccgaaatagagtttgtgattctgaagatgaagacaccggtgcaccggccacagctctccttgatgctggcccttcacaagtttaaaacgtcagagaacctcaggagatattcaatcgatggcactgagcctcgcgtcctcttcgcgctctgctgtgggatgttctcttctcctgcggtaaggatcttctctgctgaaaacgttcgagctgagcttcaggagtccatgagagactacatccgagcgtcagttggcataaacgacaagggagagctcgtagtccccaagctactgcagagctacgccaagggcatcgtggaggactccctgctcgccgactggatctgccgccatctgacactagaccaagtcgccgcgatccaggacacgtcgtcgtcgtcgtcgcataagcagcggcttcttggagtgcgcagcttcagcgtcatcccgttcgactcgaggttccggtacctgttcttgtccaacaacaccaggtgccagaattgaaacaagagtacaagactgcattgctatgcgcagacagccacaggagtgggtgcttgacaagttgacacttttttcgagagctgaaaatattagcttttgctgtacattctgtaaatttttccgttgactaggattcttctttgtacgtaacattcagctaactttttgtacatcaagcgaacccagaatacaagtgtagattcggtgatggttcagtctcaggttagtggcttgattaccgccaaggaacccaaaattacactgcaaattcacagccagtaaaaaaaatctgcatgttgcacatccaacaaactgagctatcgctgctactgaactttacaaggcgatttttccgtgactaggattcttctttgtacgtaacatccgc

SEQ ID NO: 31787 - DNA, 1644 bp, Zea Mays
atgacggccaccgccagctgcttctccagccccgtcgcgtgggcgcggcctcgcgccggccccgcaggcgcgagtgcggccttgcgcgtgggccggtgtcccgcggccgcggtagcggcgcacgacgtggcgttccacccggacgtgtcccgcgcggcggattcgctgcaggcggagttccgcgccgtggaccgcgccatcgctctcaactcctcccgcgtggccgccgccttccgtcgcgcgcgcgtcgccccgcaccatttcggtgggtccacggggtacggccacgacgacggtggcggccgggaagcgttggactccgtcttcgccgacattgttggtgcggaggctgccattgtgcgcccgcagttcttctcaggtacccacgccattgcctgtgcgttgtttgcgcttctgaggcctgggcatgagctcctggcagtcgctgggcccccgtacgacaccttggaggaggtgattgggatcagggggtcggccaatgtagggtcactcaaggatttcggagtgacgtaccgagaagttccgcttgtagcagatggtggccttgattgggatgctcttgcttgctccatcaggccggaaactgggtgtgccttcatacagagatcgtgtggatattcgtggcgcaagagcttaagtgtagcagatattcacaaagctataggtttgatcaagatgcaaaatccaaactgcatggtgatggttgataattgctatggtgaatttgttgagatatcggaacctgcaatggtgggagcagacttgattgctggaagtttgataaagaatccaggtggaactattgcgccttgtggtggttatgttgctgggaaggagcatttagtcgaagcagctgcagcccgtctatctgcacctggccttggggtggaatttgggtcaacacctggccatgttatgcgtgcgctgtttcaaggcctgtttcttggtccgcaaatggttggagaagcagtaaaaggaggtttgctcattgcggaagtcatgtcagccaagggatacaaagttgaaccacttccgagggttcctcgtcatgatattgtgcaggcagtggagcttggcagcagggaaagactcatagcattctgtgaagtagtgcaacaaacttgtccagtaggatctttcatcaaaccaactgctggggaaacgcctggctatgcttcagaggtcattttcgccgacgggacattcatagatggaagcacaagcgaactgtcatgtgatgggcccttgagagatccatatgccgtcttttgccagggaggaacacattggacgcagtgggcacttgtccttggtaatgttctgaaggtcatataaacgtgcggtgtgataatgttgtcacatttctttgaagaggcaggcgtcactaatatgcgagcgcttgcacttcagtggatacggacaacgacaagctgtcgttagtgttacccgactactacctcccctgctgctcatgtggacaaatcaccagcgacctcaccaccagtgaccccacttttaacctccctatttactcaccaccagatattttttagggactcaaacatgatgtatgatttagcatatgatctatgagcacaaagaatatgcaaattgctgtattgt

SEQ ID NO: 31788 - DNA, 4245 bp, Zea Mays
atggggaatctttgctggagcacaaatagagaaagatggcgacgtacggccccgtccccctccgtccccgcctgcagcgacctcccggctgccgtatcctccttcgccgacgcgttcgtggactttgccgtgtccgacatcttcttcccgaccttcccctcctcctcctcgctccctcctcgcccgaagactccaaccaccttcctcccttccccatcccggctcgtcgccatcggagacctccacggggacctgcccaagtccctctccgtgctccgcctcgccggccttgtgcccccgtcttgcaccccgactccccctccgcctccggcctcctcatggcccgcggggcccaccctcgccgtccagctcggcgacatcctcaaccgcagcgacgacgagctccgcctcctatacctactccaccgcctctccctctctgccgagacacgcggaggcgcgttcctccccatcctcggcaaccacgaggtcatgaacgtctccggcgacttccgcttcgccacgccgcagggtttccacgacagggcggtgtgtgggggggtgctggcgtgcgcgggattcgcggcgtgggctgctgaggcgggcgtcgcgggagcggcgggttgctggcgcacgggcgttgcaggagcgggagcagtctacactgcctccttaatagttagtagagattgtttaaaattaaactctacgctaggactgtggacgtgtttttgccccatccgatctaaacctaatccattgccatcctatattgatataggatcatgggcaggtttagttaatccacggcgaagaaaaaaatacatgctgccaagtgccaactggcaagaaatgaagaaactgtcctctggcaagaaaagcgggaaaggcgatgggctgggccggccaggagagtcgctcgattcgcaggccaggcagatcgcggtcagatccccactgccttggcgggaagcctatcaatcctcaccccaaatcccccgctactccccgctccggctccgttcacgactacggcgacgagcaccaccctcacccccagccccacaccgcgccacgccgatgtactcccaactcgtcgacggggactccgactccgagggatccctgatctccgacatctccgcctccccgccccgcggccgttcgccctcgcccccgcccccgcccccgccgccgcccgaacaccgtcccaaccccaagcacaccgccaccgtgaaacctaagcctcccaagtccaaggcgaagcccaagcttgcagcatccgcctgcaccgccgctgtttcgccgcctcccctcccctccgccgcgctctccgacccgcacggtctcgtctcgcgcatcgccgctgctcccgcgcttgtcaccgccaccagcaccgtctcttcctcctccttccgccgtctcgtccagtcgcgcaacccctccttcgatcccgccgccgctttcagcgctccgacacccgcacccactctggcgcccaccgagatagcaaccgcagcgacagcgcagtgccctgcgccggacgcgccgccgcagaccaggcccaagcgggtgcatcccaactcggtgtcggaggtggtcccgcccgcggcggaggcagagcaaccgaagcggccgagagggggtgccgaaggaaactttgtgcggctcaacatcaatggctacggtcggaggaggacgttcaggaacgcgcaggccaggcgccctacgaaataccgctcctggcggcggcagcgacatggcggcgcaaagcctcaaggccgtggtgacgaagaaggggattttgtggctgaagctatgatagagcgggagaagaagagggcaggaggagatggtggtgtcctcgaggccgtcgaagcagcgcgagaggacccgtctgagcagaatcttgagaatttgctcagaattatctatgggtacaactctttccgcgaggggcagcttgaggcaattcagaaggttgttgcaggagagtcaactatgcttgtgctccctactggtgcgggcaagtcactatgctatcaggtacctgctatgattttgcctggactaacactggtggtaagcccgctactctccttaatggtggatcaactgatgaagctacctgcatttttgccaggtggctttcttgcaagcaatcagacaagcgatgagtttcatgagacattacaaaggttgcgtggaggggaaataaaggtgctttttgtttcccctgaaagattcttgaatgaagaatttctgctaatatttagggacgggctacaaatatccctagttgctattgatgaagctcactgcatttctgaatggtctcataattttagaccttcatatctaaggctccgtgcatcactacttcgaagaaaacttaatgttcaatctattcttgcaatgactgcaactgcgacaactcaaaccttggaggagatagtgactgtcttagaaataccatctgataacctcattaaaacatctcaaataagggacaatctgcagctgtttatcagcatgagcaataacagactgaaggatctattgctgttgttgaaggcttcaccttttgttgacatgaagagtataattgtctattgcaagtttcagggagaaactgactatgtttcaaagtacttatgtgataacaacattactgctaagagctaccacagtggacttcttatgaagaacaggaatcgtgtacaggagcttttctgctctaacaaaataagagtggttgttgcaacagtggcattcggaatgggtcttgataagagtgacgttgaaggggtgattcactatagcttgccagaaagcttagaagaatacatacaggaaactggccgtgctggaagggatggacgactgtcatattgtcatctatttcttgattcaacaacattctataaaagtcgtagtcttttgcacaggtattttcatgtgaaaattcagtggggtgcatttgctccttggttaaagagtcgacttcgcgcaagttcgatataaaagaggaggtgctcttcacagtcctaacacagctagaaattggtggtcagcaatatctccgtttacttcctcagttcagtgttacctgcaccctgtactttcacaagacgtcaccacagctgcttgcagacaaggatgtactagttagatcagttctggataagtcagagactaagggtggacattttgtcttcgacatgacaaaggtagctaatgatctgagcatcacagtgaatgaagtatttgaccatttgcaacagctaaagttctctggagaaatttcatttgaattaaaagatccagcctgcatttacgtgatcttaaagaagccagatgacttgaatgcgctttcagcagatatcacaagatggctttctgaagtagaaaactcgaagatcagtaaattggatgcgatgtttgatctagcaaactttgctgtcaagggttgccaaaggactgatggctgttctggctcccagcacactccgtgcattcaaaagaagatcatacagtactttagtaagaactactccacctcagacagtggccaatgtactcagccacaaaggggcagcccattcttgcaagctgacataaaggtgttccttaaaagcaattcgtttgcgaaattcacgccaagggccgttgctaggattatgcatggcatatcaagcccggcttttccatctgccacctggtccaagaaccacttctggggccgctatttggaggttgatttcccagtggtcatggaagctgccaaggccgagctggtcaaactcgtgggaaaaggagagtagcagtgtagtacttaccggcacggcaataggaacagttgctttcactcggtacgtgtcctgtgccgagtagaatgcttgcaagccgcaaccgcaatcgatgatagagagctgctacatgttcgtgccttcttcccagcttgtccgcagttggtccaccacaagcattctaaatggttacacatctgcttggcatcacctcctcacttcatacagatggcggtatttattcaagcgatgctgatgcggccagccaagctggtgttagcacctagaagggaatatcggagagaagagaggtagaagaagggttgaagaagaagataacagcgaggaagacgatctgatttgatatctgatagccaaaatggttcatgaccccttacagccagggtttgggtgttacttgtaaccacacgaccac

SEQ ID NO: 31789 - DNA, 2940 bp, Zea Mays
caaacccctctcctggcctcctctactcctcccgcgtgtcccgtcttcccacaaatccgcgctgctcgtagattggattgtttcgttgtttagattttggtttgccgttcgagttggtgctttgggctccgtgttagtgggctcggttcgtcggatctgtagcggagcaagcgcttcgccgggaattgttgctttggtttgggattcttggattctattggcttctatcttcagcatgggtgagccaaacagcaatgataatgcaatggtgcatgacaatgagatgatcgatggcaatggggtgatccatggtagtgagatgattcatggtagtgtgatgatacatggagatgagatgccccatggcaatgagatgatccatggaaatgagatgatccatgggactgagatggttgaaggcagtgagatgatccatggtcatgagatggttcaggttaatgatctcatccacggtaatgagatggttgccgttaacgtcatggttaatggtgatgagatgccccatgttaatgaattcatcaatactgaggtgaccccgcggagacgtcggaagaagaagtcgctagtttgggagcacttcactatagaacccatgccaggggggaactcaagagcatgttgcaatttatgcaagcaaacctttgcgtatagttctggttcaaaaatcgcaggcacgagccatctgaagagacacatcacgctaggctcctgtcctgttatgaaagatcaagaccgcaggctaacactgccgctagcagggggccatgccactgataatgatggtgagggtacagtagagcgtcctactaagaggcgttacagatacactggttatgcaaatgctacttttgatcaggaacggagctcctcttatttggcgaagatgataattttgcatgactacccacttcacattgttcagcagtcatcctttacgaagtttatcgagagtctgcagcctcgtttcagggttgtagatgtggagacaatggaaggagaggtgtatgctgttttccagaaagcaaaagaaaacctgttacaagcattcagcactatgccaggaaggatcagcctcactataggactctggacaaccagtcagactcttggctatgtttctcttgctgggcagtttattgactccgattggaaagtgcaccgaagaatgctcaacttcatgatggtgtcttctcctcattcagagaatgcacttagtgaagctattagctcgagccttttggagtggaatatgaaggacaggctattcactatcacattggataatgattgctcttcccatgatatttacagtgcaaatcttagggatcacctgtccaataagaacaacctcatgcttaagggacagctgtttgttgtgaggtgttatgcacatatcctcaatgtagttgctcaggatgtaattgcttcaattcatggtgtgatttacaacatccgtgagagtatcaagttcataaaagcttctccaaatcgtgaggagaagtttgctgagattgctctgcagctggagattcccagtaccaagactctctgtttagatgttacaacccagtggaacacaacttatttgatgctgctggctgccttggactataagcaggcgttttctacactggagacatgtgatgataattacaatgaatctccttcagcagaggactggaagaaagttgaggctacctgtaattacctgaaactgctatatgactctgcacatagtgtcatggcttcagcaaatcctactgcaaacatctttttccatgaagcttggaaaattcagcttgagctagccaatggcacagaacatgaaaatcccatcttcagcagtattgccaaggatatgcatgagagatttgacaaatactggaaagattgcagcctggtattagccattgctgttgtcatggatccacgtttcaagatgaagcttgttgagttcagttactctaaaatttatggtgctgaggctatgaaatatgttaaggttgtcaatgactctctgcatgagctgtataaggagtatgtggcacaaccactccccttgactcctgcttatgttgaagctaataatgtggctgctaacgcaagtgtgaaccagggaaatccttcttccactggtgatggtcttcttgattttgatatgtacctttctgagattcaaagtacccagcctgcaaaatgtgatctggagcagtacttggaggaatccctcactccacgtatccaagagtttgatatccttaattggtggaagcttaacacactcaagtttccaaccctgtcgaagatggcccgggatatcttggccatcccaatgtcgatggttagcagtggcagctccatattctctgctggaactgggaaccgcatgctcgatgactacagaagctctcttcgtccggagactgtggaggcacttgtctgtgcaaaagactggctccagtattcaccgcctgcaactgaggtgctaggttctgagatgatcaaggcagaagcattgtagcttgccgatactgcttccatgatgaagcacaaataagattgtgttattttttagtgtagttaaccgtaggcatattttaggcagcaattgcagacatatatctcttctggcattgatcttatagttgtaatttgtcatgtcgaactcagtttaactcattatagtgtgtattgagtttagctgtggtctgagggatgtctaagggattgaggtggtaaacttatttccagattctgtctattgttggctcgggcattcaggtgatacacttatttccagattttggttattgttggtgctgctgtttatttcccttcctttaggtcataacctctgttttgtgccatggattggtatctatttacacttttttttgattgagacaaagtgcacacttc

SEQ ID NO: 31790 - DNA, 237 bp, Zea Mays
ggttgcctttggtgcaatctatgctcaggtaaagaacaaggcgtcgaggcggatctccaggagttccaggacgtcgatgagttcgaggattaggctagcgacctcccccagtcagctgcctgtggtgggttgtttacgttggccacgtttcgattctgtgtactttgattatattatgtaaatgactctagtttgtaatattattacttactctttattgtaattcgaagcattgtg

SEQ ID NO: 31791 - DNA, 7094 bp, Zea Mays
ggaaagatggcgtcaaaaggtccccggtcaaagttagaccatgagacaagagctaggcgtcagaaggctcttgaagctccaagggagcctcgacgaccaaaagttcactgggaccatgtccttgctgagatgatgtggctgtcaaaggagtttgattctgagagaaaatggaagttgtccatggccaaaaagattgctcaaagagcaaataagagcatagttgaccaagcaacaaagggcgagagaaaacagaaggagaaagaacatagaatgcgaaaagttgcccttaatatttcaaaggatgtgaagaagttctggatcaaaatagaaaagctggttgtttataagcaccagctggagcttgaggagagaaagaagaaggcacttgataagcaacttgattttcttttaggtcagactgaaaggtattcgacaatgttggcggaaaatcttgtggatatgccctatcccgaaaacctagaaaacaggacttcacagataaaccaacgatcccatcaagaggaagtaccagaaaagaacttaaatgcaaccatttctgatgattttgataatatggaagtcgatgatgattatgagagctccttggacgaagagccagaagatgatgagcacacaattgatgaggatgaagctcagatcactgaagctgagcgcaacgaagaactagctgctttagaggcagaagctgatctaccacttgatgttattctcaagatgtacacaaaaactaaagttagcagggaaggcagtccagatagcaaagacatgctaagtaacttaggttcgaagattttgattgtagattctttgaagcaggctaatgggcgtgatcatgaacctgctcactcttcaagtgaagatggcaattcttctgaggaagtggatgatggccattcttatgctgagtttgtgaagaagaatcattgctgtgtaccttcctggtgcggcgccttcgcagttaggctcatggctctatccttggctgcagctatcgaggacaaagattacattgctactgaagaagtaaaggatgatgaagcaactttgtctgaagaggaagaattggcaaaaaaagaagatcctgattatctggaagaggttaagttactgcagaaggagagcgagataccactagaagaacttctcgcgaggtaccgagaggatggctgtgcagatcatgaaacagcggagttgaagaattcaccccattttgttgaagaggtcaatactgacatgtctttggatgatcaatctgtgagcattttggaagcgaaaagtgatttatttgtggatcaccaatccagggatgtgctggaaactgaggacacggctccacgatcagaaatcgcatcagagccttgtgctaaacaaaattttgatgaagagaataatctcactgatgttaagacagtcaatggagataagagtgatgatgtaaagagtgatgatgtaattgctgatgctgcagctgctgcaagatcagcacaaccaactggcaacaccttcttgactacaaaagtgcgcacgaaattcccattccttcttaagcattctcttcgtgaataccagcatatagggctggattggttagttgctatgtatgagaagaggcttaatggaattctagcagacgaaatgggtttaggcaagacaatcatgactatctccttgcttgcacaccttgcgtgtgagaaggggatatggggtcctcatcttattgtcgtgccgactagtgttatgctaaattgggagactgaatttcttaagtggtgtcctgcttttaaaatactgacttatttcggaagcgcaaaggagagaaagcagaagcgtcagggctggatgaaaccaaatttcttccatgtttgcatcacaacatataggcttgtcatacaggactctaaagtgtttaagagaaagaagtggaagtatcttattcttgatgaggctcatctgataaagaactggaaatcacaacgttggcagactttgctcaactttaattcaaagagacgtattcttctgactggaactccactgcaaaatgaccttatggaactttggtccctcatgcattttctgatgcctcatgtgtttcagtctcatcaagagttcaaggattggttctgcaatccaatttctgggatggtggaaggtcaagataaagtaaacaaagaaattatagatcggttgcacaatgtccttcgtccatttatactgcgtcgactgaaaagagatgttgagaaacagttaccaaagaagcaagagcatgtcatatattgccgactttctagaaggcaaagaaacttgtatgaagattttattgctagctcagagactcaagcaacactggcaagtgggaattattttggcatgataagcatcattatgcaacttagaaaggtctgtaaccatccagatctttttgaaggtcggccaataataagctcatttgacatggctgggattaacatgcagctcagctattcagtctgcatgctccttgataagagtccattttctcaggtgggactgtctgatatgaatttagtgtttacgcaaaatgaatttagcatgagttcctgggaagctgatgaggtcatttctgcctttcctttgagtaccacttcctggaaccatgaccttgatactttttgctctaataaggatcgtcagggaagtaatttgacaaacatttttgaagatattcagaaagcactacaggaggagagaataaaggaatccagagaaagggcagcttccattgcatggtggaatagagttagatgccaaaagaggcctgtctatggcacaaacatgatacatgttttgactgtaaagcatcatgtatcaaatattcttgataagaggaacaaccctttgtgccacatggactattcatcaagccttgcagatcttgttcttccatctgtggaacgctttcagaaaatgcttgatattgttgaatcatttacattcgcaattcctgctgctcgagctcctccccctgtttgctggtacagcaaaggaaactctcctgtttttattgatccagcatatagagaaaaatgcatgaacgagttttctcccatcctgtctcctataaggtctgctattgttcgacgtcaagtctactttcctgataggcgtttgatccagtttgattgtgggaagttgcaggaacttgctattctgttaaggcgcttgaagtcagaagggcacagggccttgatatttactcagatgactaagatgcttgatgtcttggaagagttcataaatctatatggatatacatatttacgtttagatggttctactcccccagaagagaggcagactctgatgcagaggttcaacacaaatccaaagttcttccttttcattttgtccactcgaagtggtggtgtgggaatcaaccttgtaggtgcagacactgtcatcttctatgacagtgactggaaccctgcaatggaccaacaagcacaggacagatgccacaggattggtcagactcgtgaagttcacatatatagactcattagtgaaagcactatagaggagaacattctcaagaaagcaaatcagaaacgagctcttgatgatttagtgatacaacgaggtagctacaatacggaattcttcaagaaacttgatcctatggaattcttttccgggcacacatctcttcatgcagaagatcaggagaagaattgctctacaacctcaggagtttcaaatgatgttgatctggctctgtcaattgcagatgttgaagcagctattagacaagcagaagatgaagctgactatatggctctcaagaagctggaggaggaagaagccgtggacaatcaagaattcagtgaggaggctgcgggcagacaagaggaggatgaattggttaatgaggagaatggaaaacccgatgagcacattaacgaagaacaaaaatataactcttctgatgtagagaaggagaagcacattactctgtctaccaatcgattaaataaggaaaaggctcttacattggctgttggtgatgaagatactgacatgcttgctgatgtgaaacagatggcagctgcagcagctgcagcaggacaagcgagttcatcatttgagaaccagctccggccaattgatagatatgcaatgcgctttatggaactctgggatccagtaattgacaaagctgctttaaatcatcaagtaaatgttgaggaggaagaatgggagcttgatcgtattgaaaaattcaaagaggatttagaagcagaaattgatgaggaccaagaaccactttcttatgaatcatgggatgttgattttgctacgacagcctatcggcaacatgttgaggctttaactcaaaagcagttgttagaagaacaggaaaggcaagctcaggaagcaacaaaagagttggaggagaagaatgataatatgagtcaccacagaaagtcaaaaaagaacaaaaagaagacaggcaaactcaagcccctgaaaagagtgcgtctgtcgcctgaatcagaagtcatactggaggaaacctctgtagataatgcaccctcacctgagcttacaagtgatgaatcgccacaccattattgtaacaagcgtaagaagattacggttgccactgaggaaaatagtaacagcagaagtttaaagaagctcaagaaaactactaaatcaagttttatttctgaagccttgtcacctaggctgaaggaggaccttaatgattcagattcaaaatcagtgggtagaactaaaagtgatggcagatttttcatcccttgcatgccagtgaaacgtgttattgtaataaagcctgagagattgaaaaggaagggaatatggtctcgagattgtgcttcagactcatggtcatctgaggaagatgcagttctttgtggaactgttcatgagtatggtccactttgggaattggcaagtgattttcttcattttttgccaggcggttccttgtataggggaagatatcatcatcctgtgcattgctgtgagagatacagagaactgttctgcaaacatggaatgtcagcaacagataattctaacagtgaaaaggttccttctgggactggaaaggctatacttagagtgtctgaggatcaagctcagatgttggtgaatgtgaccagtgaacttcctaacaatgaattgcttctccagaaacacttcatggctgtaatttcgtctgtttggagatcaaaatgtcaccgtgatacctcctgttttacgaacacttactctagtgcattacatgtgttttctcctgtgaagaaacctggtggatcatgtgagaactggcccatggtaaactttagaccaagcttcaatctagttaggaaagcccttgcagatgttcaggctaagtctacactaatggtgattccacctccgtcaaggaatcaggaatacccatgcaattatttagaattagagttagatttcttgaaagatcaacatgcttatgatgaagacatcccatctgtagtaaatgtgtccatacaggaaccagaaccatccaaacagacgccagagccagtggaacaatcgttgttgtctgcactttcttgtagacaggctgagaaccggctcagaagcttgttatgatggtgaaagttctcattgggcatcatcagcttttcacataaatgatgctgcccgccacaaatctggttcaaagtctataggaaagcacaaagccgcattggaatctggtagacttctcaaatccaaagttcagaagattactgaatcgcatcaggaaggggcaattgctatgagtagttttctccgtatgcctgctcaactattgccaagtacagctgacttccacattagtgactccctatctgactttggtatcagagattctgaattctatttttccgaggatctcttgcaagaggttgacgcccttgagttcttcccagatcagggtgactctggtctccttcctggtattgaagagttagaatctctttcggatttcacagatatcggatgaacatagatgagcaaattattgttgatgggatgccctcctataccaagaggagacaagattgcctctggcaggagcccaaggatacaggttgaattgctcagccgtgcacagatgtgttgcaagcagcaagctatcatcatggctggctggagcaaagcactggcttggtgaggtcacattgatctgacaagctcggaggatgggtttgcactaatggcggcatttgggtaatttccatacatgtatgtatattggtagtctagaatcgtaggatgtagaaatgcctccctcatttgtgtttgagggtaggaccttgtaactcgaccacatggaaattttgttgagcaggtaccaacatagaagggaaaagaagaggccctcagcatcacccatttgtcgctgtatctcttgttatgttcattctctgtttaatccaatgctgtttggctatcttgccattgaaaacatctcagatgtcaagttggtggtgtacatatctatcagaagtttaggatgcggcgtcaatatagctgccaaagaatgatcagtcaagtgcaacttatgggcacattatatatttggtcaggactcaacgcatggtatcaatattggcagaaatggtgttccagatgcacttgaggactgcaatttctggtttgattgagacaccggagacaggtttttcataggaggtaaagagcgtggtcatagttgtacatgtaataaaattatgtagggtagtaatctccatcctgtacttttgggcttatggttctttggactctcggtctcggttatgcacttgtagaacagcgggctgctgctgtgagcctgtaacaatgctattgattgttccccaccatattgttgttttggtaagtagactctgcatcactgcaaagcggcgttagatactgtgacgggtctgtttcgctcaaaaatactttgagcttgtattcagtcttggcctccaataatctgtaccgctgtacgctgggaatgtttggccaatcccattaatggtaagctg

SEQ ID NO: 31792 - DNA, 588 bp, Zea Mays
gggtttagagatgtgccaggagtttgtattcagatgcaactgatgctaaaaccctaggagtattcaatagctctctactgatgaagtatccagcatcgctgctttaaatgaggagaaaaaaagggccatggcgaacgagctggtggcgaagctgacgtttgtctgctgggacaagtgcgtgacggggagcgtggggagcagcctgagcaggagcgagacctcgtgcctgtccaactgcgcgaaacgcttcgccgaggtgaagatgatggccctgcagcgcttcaccactaccggccgcggctgaagtcccaacggccaaccacgcgcgcaaacgcaggcatctctctctctctctctctctgcccctgcgtggacggagcaatgtgtgtgtgtggtgtgtcctctggagtgtgccattgttggtgagatggtagaaaactagaaagacatgtcaatgtatcctatgcattttttttgtttaagacggtgttagaattaagttgattctgagatgttgatgcaagaagtggctgcggctcttccgttcctgcagggattaaagaaaaagtcaaaaaaaatttaaaaaaa

SEQ ID NO: 31793 - DNA, 3312 bp, Zea Mays
aaaagggtaaaacctggaaacaccttggagcaccagttacccaccctaccttcaaaaacaatcgcctgaacctgaacaaacgatctcacgaggaggaaagcgagagaagcaagcaagcgagaagctggagcagcgaacaccaagaattcggtgccgaagcggaggcgaaggggaggaggacgaagggaagggcagtgaccgaagagcgagcgcgccacgtttgatctgggtatattatgagtgttccaagactaatgcatcatctttgatggtgtaccaaaaaaatggttgttaacatcaaggcctcaacgagctagcctgagacaagaacactggaaccatggtttcaaaatcatattcaaatctgctagacatgaccccaggagatgggtttgactttcgacgaccttttaagtctcttcctcgtgttgtaacttctcctagcattatatctgaccatgattgggattccataagtgatggtgattcagttggttcagcattttctatcgagaggaaaataattgtcgccaacttccttccgctgaattgtacaagagatgaaaccggggaactgtccttctcattggatcatgattcactactcatgcaacttaaagatgggttttcaaatgagactgatgctgtgtatgtaggcagtttgaaggttcatgtagatcccagggagcaggaccaagttgcacagaagcttctcagagaatatcgatgcatacctacttttctcccatctgatctgcagcagcagttctatcatggcttctgtaaacaacagttatggccactttttcattatatgcttccaatttgccttgacaagggtgagttgtttgatcgcaccctgtttcaagcctatgtccgagccaacaaactttttgcagataaagttatggaagcaatcaatacagatgatgattatgtttgggttcatgattatcatctcatgctgctccctacattcttgaggaagaggttacaccgaataaagattggtttcttccttcacagcccttttccctcttcagaaatatacaggactctgcctgtaagggatgaaatcctgaagtcactgcttaatgctgatctgattggtttccaaacatttgactatgcccgccacttcctatcttgctgtagcagattgctaggcctgcattatgagtcaaaacgtggttacattggaatagagtattttggccgaacagtgagtttgaagatcctttctgtgggtgtccatgttggtcggcttgaatctgtcttaaagttgcctgctacagttagtaaggttgaagaaattgaacaaaggtataagggcaagatactcatgttaggtgtagatgacatggacatcttcaaaggaataagtctgaaattgcttgcactggagcttcttctggacagaaacccaaagcttagagagaaggttgtccttgtacagatcatcaatcccgcaagaagcacggggaaggatgtgcaggaagctatcacagaagctgtctctgtggctgaaagggttaacacaaagtatggttcttcaagttacaagcctgtcgtcctaattgataatcgcataccgttttatgaaaaggttgcattctatgccgcgtctgactgttgtattgtaaacgctgtgagggatggcatgaacttagtaccatatgagtatactgtttgccgacagggaaacgaggagatcgacagagtcagaggccttgacaaagacacccatcacacaagcacacttattgtttcggagtttgtgggttgctccccatctctgagtggtgctttcagggtaaatccttggagcgtcgatgatgtggcggatgccttgtgccgcgcaactgatctatctgaatctgagaaacggttgcggcacgaaaagcattatcgctatgtcagtactcatgatgttgcttactgggcgcacagctttgctcaagatctggaaagagcatgcagagaccattacagccgaaggtgttgggctattgggtttggcctgaatttcagagtcattgctctttctcctggcttcagaaagctttcttcggagcactttgtttcttcttataacagggcttctagaagggcaatatttctcgactacgacggcacacttgtgccccagtcgtcaatcaacaaggctccaagtgaagaagtcatctccattcttaacaccttgtgtaatgatccaaagaacgttgtgtttatcgtaagtggacgaggacgtgattccctcgacgagtggttttctccatgcgagaagctccgtctagccgcagaacatggctattttatcaggtggagcaaggaagctgcatgggagtcgagctattcgagtccgcggcaagaatggaagcacatcgctgaacctgtcatgcaggtatacaccgagacaacagacggatcttcagtcgagtcgaaggagagcgctctagtgtggcactatttggatgcagaccatgatttcggttccttccaagcgaaggagctaaaggatcatcttgagagggtgctatcaaatgagcccgttgttgtgaagtgtggccattatatcgtagaagtaaagccgcagggagttagcaagggtcgtgctgtcgacaagctgattcaagcactggccaacaacaacgggaaggcacaggatttcctgatgtgcgtcggcaacgacagatctgacgaggacatgttcgaatgcatcaacggtatggcctccaacgatgtctcatcgaccacagtaccggaggtgtttgcctgttcggtcggccagaagcccagcaaagcaaaatactatgtggacgacaccagcgaagtgatcagattgctcagggatgcaacccgcttctcatcgtcgcagcggagggaggacgtcaacgccagccgcgggcgtgtgaccttcagagacgcactcgattacgtggactaggcaccagcagcaattcttagttactcgaaatgattagctgcggagcttgtaaattccgctgtcttctgtctgccaatggttttcgttctagagaattgtagtgtagccgacatcgacatggatcgtcgtcaccgatacacgaacagcggaaatatgagttgaagttcgccgtttcgaggctcagaattggtacatttatagaattgtagtgtaggcaattttttggtagggaatagtaattggtacatttatagaattgtcaattgtttttcttctaccgctgataatactatagcttcgctaaattaatattattgtttcacttagcgatgaaatatatttagcaccactgatattgatcaacg

SEQ ID NO: 31794 - DNA, 3478 bp, Zea Mays
ctcttccctccctgggggtttgggcgacaaggccgagagagagagaaaaaaaaaaggtggaggagagacaaggccaaagcaaagcagccagcgcgagcaggggaggtagagagagagagaaaaaaaagagcagcgccacgaacagaacaacaagcctcgcctcactttctctctcctccaccatccctttttttctctctctctactctctccccttgtcgtcctccggccctctccgcattcctctccccctgccacctcgtgtcctactactccaactcctagcacccccaccccacctccccctgtattctctctagtagtagcaactagcaagtgctacggggctacagcctacaagtagtaggccttggtacccagccgacgaatcccggctcccgcgtcgtcctagaggccggctaaagctggcgaggagggtggcggcgcggcggcagctgcactgccggcaggagagagcttctcggcctgcgccgtttgctgctccccactggtcgttggagggctggcggttccgccctctggaaaaaaaaaaaaaatccaatcttggctcggctcggctcgtggcggccggctgcctgatcgggcctcgccccgtggctagttcgatctgagattcgaagaccacccccgggtgaaaacctctccgcctctgaggagtggatcctggattcgagtcttcccgctgcagggagatcgcggcttgaggaggtacggtggtggtggtggcggcgcggcgacagatccccctatgcgccgcctgccgtgccgtgtgctgagcgcggagcaggagctatgagacaatgacggaagaaagcgccaagaagagcaagctttcgtggtccaagtccctcgtcaggaagtggctcaacatccggcccagggcgcaggacttccatgccgatttcgacgccggccaccaggcaagggacggcggcggcggcggcggtggatcatggaggcccagctgttcctcgagcgaagcgagcgcaagcactgccaagaaaagcagagctgaccggccgtcgtcgaagcggagcgccgaacgcgctcgccgagggaggaataatttcgacctagcacgcctgacagaagtgcaagattacaggatcttcgctgcgacgtggaacgtgggtggcaagtcaccacccagggggctaaatctagatgaatggctccatacttctccttctgccgatatctatgtcttagggtttcaagagattgtccctttgaacgcgggaaacgttcttggcactgaagataaccttccagccaagaagtgggtgtcccttatcaggcggacgctgaacaagaatcctggatctagtggctgtggtggtggctaccatacaccctcaccagtcctggatccggttgtcgagttagacgccgacttcgaggggtctgcgagaaggcaggacaacttctcattcttccaccgtcggtcgttccacaatctcagccgtagcttaagaatggacggggacttgatgttcccgcagccaaggctagatcgcaggttcagcgtctgcgatccagtcaacctaggaggcagaccaagcgattttgatggaagtctgcgttgccccggatcacctgatgaggatacaatcgatatggaaatgggtgacagcgtacaagtttcaccattccctcatagctacagtgcatctgcaccttccgaacagaacgatgaccaatcaaacagctccaggtattgcttagttgccagcaaacaaatggtcggcatatttctcacggtctgggtgcgcaatgaaataagagacgacgtcaggaacttgaaagtctcttgcgtgggtagaggattgatgggttatctcggaaacaagggttcgatttcagtgagcatgtgcctgcaccagacgagcttctgcttcgtatgttgccacctgacctcgggggagaaggaaggcgacgagctgcgcaggaactccgacgtcctggagatcctaaggaagaccaggttcccgcgggtccgcggcgccggtgacgtcaggtcacctgagacgatcctcgagcacgatcgggttatatggcttggggatttgaactaccggatcgccctgtcttactgctcggcgaaggctctcgtggaaatgcatagctggaagcagttattggagaaagaccagctgcggatgcaacagagatacggacgagttttccagggctggaaagaagggaggatctacttccctcccacgtacaaatactctttcaactcagaccggtacgccggcgagggcaggcaccctaaggagaagcggaggacgccagcatggtgcgaccgcatcctctggcacggcaacggcctgagccagctgtgctacgtccgcggcgagtcccgcttctccgaccaccggccggtgtatggcatcttcctggcggaggtcggcgtcgtgcgccagcggaggaggaacaacgccgggtacttcggatctagggtcgaggtggaggagctgttgccgcgctctcggagctatagactgagagatgatgaagttttgctgagctgacttatagcatgatataatagaaggtaagctaacttgtgtgtgtgtgttttttttttttgtgtgtgtcactgataagtagtccccaaatgataccacagcttgcactctctgatctggctgccaaatctcgaggccctgcagagataatatgccctctgcgctttgttgactttgcgttcattttttttcttctgtttccctgttggcaagcgttggctttttactactagtttagtgctctccactgtgcattccagattcagttcagttcagttcagttctctaggcagtcagatgcgagcacgcttaaacaattccgtttcccccggcccctcctccctcggcgatctgtttgccgacttgatgcatatgctcggtgtcggtgacacccggaccctaatggcacggtgtgtttttgtttggcttgcttgatggcaggtacccctcccccaacagcacccaagagagaatgtgcagacactaactggatgaaaaaaaaggacgctgggcggtattttttgctcaccaagagcaggcaggcaacagcgggacacgcacgacgagtatgtcgccgctcgtcgtcggagacgtagcagcagcaggcatgccgctgactggctatagagtttacccccagctttagccggcccacacttagttattcctcctcctagcaactgcatttgcttcaattttgttttcctcgtttttttggtaggtggaccttgggagtgtcagcaaacacaacatgttttcttcctcttctttttttgatgattcttttcgtttgtaagaaactttgtaaaaacctgctggtgtctgtgctgtgcttgccatgcaagtcgtggaacctttttaagataagctcagcatggctagagagcagtttggttggttgagggggcaaggcattttcactc

SEQ ID NO: 31795 - DNA, 389 bp, Zea Mays
cggccaccatgcgcgctcgtgctgggaccttggtgtcccggccctctacctccaatcccctatataccgctcgcggctcgcccgaccaccggtcgcacccatgccaccaccacgaaatccgaagttgagtgccggaccgctattacagaggaaaaggtgtgccgccatggttcctcgctccactagcgttcagtgtgcacggcccagttgctgacaatcgcatgccgtgggaagtaagagcggagccacgactggctaatctgggcatcggctcgttgattctcctgggcatgcagtgttctcggcgcgggtggccggatcttgaccagaaatgggaatcccgccagacccacgctccgccgcgtccagcttcgattacgctgcgattc

SEQ ID NO: 31796 - DNA, 2855 bp, Zea Mays
gacggcaactaggcgatcaacctcgccgcccgccgccctaatttacgtgcccaggtcttcgtccgtcccctctctaggacttcgccgatcctttctcaggcgacgggagccaaccaggttcacctgtagttaattttgtaaattattgttatatctgtagctgccccaatggaagttgagctgccaaacatccataaagctacttcgagtgaccattggagtttaaccagcagccaatacccgtctggtaaatttcctaaggtctcagtgggtatcatgattccgaaggcaggtagtataccaagagccagaggtggagatgctaccccaactcctacatttgacaggaacttgtctcaaggaactgatggtttatctagaccaaaaggtgataatacttcacttcgtgtttcacaagaagctctgaaccatgatgtatccactgaaggggctcctaaagctgatcctgttacgaaggtctctgtatcacaacctgatgacaatacatgtgagcaaacaggaaccttttcctttggaacaagaagagaacaaggcatcagcgttgaaaaattggagacacctgagtttttaagttcccaaagaaaacggaacacggagtctgcagataaagccaaacccaatagtgagatgctcaggatgaagttgtgggagatccttggtggcacttcacaaaacaagcaggccgctgcttcaccaaaccctgatgacatggagacacctgatcagcctaaaggtcaaactgtcaaaggaccatcttcagggaacaaggaggttttcacttcaccttttcttgataacatcaagacaccagatccactgaagcgtcaaacggtgaacttcacaaagtgtaaactgtcccttgatccaattgaatcagattctgatagtccaaaagttgatgaaagaagacctgttactcgctccttgggacgtaagaaagcactggcatcctccaagaagcagagccgaagttcaaagaaaccattatctacttttcagtctacacccaagaagaaaatgctggacaatgtgtttatctttaatgagaaatgcacacctaaaacagtggatcagggtgaaacaaataaagcgactgagtcacgtggtagcaggtctcctgattctgccaaaaaaagagtaaacaggaaacagccatacctttctccaactgaggatgaagggattaaaagttctgaaacaagttttgcaaaaggatataaatctcacaaatggccttcagatattgatgttcctgataaatctcctgttgagcatatgggtaggaaatcaaatctaaaagaggacagaatgagcaaaagacgcttatcttcagctgctccttttcccactgctgcaacacaagaaaatactgattctgataaagaacaagaacaatgcccggaaaacttcctaaccagggcttttgatcaagcctccaaggagctgagcaaaagcgcaaagaaaccattttctacttttcactctacacctaagaagaaaatgcagggtaatgtgtttaccttcaatgagaaacgcgcacctaaaacggtggatcaggacaaaatgaatcaaactactgagtcgcctggtagtgagtctcctggttctgcagaagaaagagaaaacagtaaacaaccatctcattcacccctttctccaactgaagatgaagggactcaagggagtaaaagttccgaacaaagctttgcaaaaggatataaatctcaaaaatggattccagatatcaagggcacagataaatctccccttgagtatgttggcaggaaaacaaaactaaaagaggatagaatgaacaaaagatacttatcttcacctactccttttgccacttctgtttctgacaaagatcaagaacaatgcccagaaaactacctaactagggcttttgatcaattgatagtggttctgggaaggtttcaaactaagatcaagtctgaaacaagcaagaaaagttctgagattcttgcagctactagagagactatatgtcagcaccttgagggggttgaggcgcagatgcaggctgacgtggacaaattggtcaatgcaggcaggtctaaaaggaaacgcctagaatctacatttgaagatcaacaagaaaagttaagaattcttcatgagaagttcaaggaggaggtcaacaagcagcttctgaattgcaggagttctcttgaggattttgaatcctaccatgcagaacttaagggagtagctgacaagcaaaaatcatcccacaagaagctcttagcaaatgccgagaaaacagtaggcgctcagctcaacgatgcagaaaccaaaatcgcagaggtccagaagagagcacgcaagaggatgaatggcctgaaatacgtgctcaaggagcttatcacagagactgttgattgactgatcgaagttgcttcactttgtccaagtacatatcaccggtgcgaagattaggatacgcaggatgcacatgcgaacacgtctagggttccatttgaaaggggtacaggagaatcatgatgcacataggttttgtcagaaatcgagatttgcaaaggctattttacttctagacgtccttagtattattttctgggtcgtaccttccgttagggtttttgctacctggtcgatgtgcacagtgcactgctgcactgcaacacccagacgtctttcagcgatatgcgacctgtaggatgtgtgtactgttcctcttcgttctagccaaaccctgttgctagctggaatactaatgaagaggtgtcttgatatttacgtgatttgacgcttgcttgatgctgtgcactggagtctaatggtgactggtt

SEQ ID NO: 31797 - DNA, 2272 bp, Zea Mays
atcgagtccagcgtcaacaggcaacaggtgtcccagccgcgcgccgcacgccctgttgccttctctcgacttcgagagcaccgccgcacggcataacgctcgcacggccgagccccgacattctaccgcactccctccgctgcacccctttccattctaccgccggcgacgccaaagttcttgggcctcctcatcggcgacttttccgccggcgacaggaaacaacgaaccaaaccacttctctgtcgagaggcgtcgcgctcctctcttcgccctctgctgttatttttcttaacccggctttctctcgattgctgcgtaaagttgaagatgaggaagctcaagttccatgagcagaagctcctcaagaggcacaatttcttggagtacaagagggagggcggccaccgcgaggcgctcgtcacacagcgctaccgcctcgtggagagggacgactacaagaagtacaatgggatatgcttaatggtgcaaaagctcgttaacatcataaagcagatggacccaagagaccctttcagaatccagatgacagacttgattctcgataagctgtaagactgctagttcactttacttgatcgtgagattgtatataccattggttatgtaaattttgagctggggttacatcctcaagtaccaaaatcttacaagttcgcctcctgtgtagctattgattgtatctttgactgcttgtagagttaacggtattgaacttcacctgtacctgtttgtagtatgtaaggaaaggcatactgctgtttcctttactacctcacatatataggaacattttataattgcattctcgaatcctgtgttttcctgtgaaattgagatggttcttgtgaaatttctgtgtttcaaatgggccctcagtgtgttgaggtatctacatatgaattgtttgactggttgctcagaactcactgcagtgtaaatgtgccaaaggttgcttggatatctgaaatcatgagatttctaattatatttcctgcgttccaaatggaccctcagtgtgttgaggtatctacatatgaattgtttgactggttcctcagaacttactccagtgtaactgtggcaaaggttgcttggatatctgaaatcatgagatttctaattatatgtttgtattcttcctatgtctggtcatacaatccaatattgaacttcactgcgaaagagtctctagccgatttggttaggtggtctgagtagcactcctcaggttctgagttcgaatccagtgggagcgaattttaggctgaggttaaaaaaggtcactcgctggttcccatggttgtgtgcacgcgagatggactgacctatgggggcggatcctcttgtaggggctaggagggctcaaagcatgagtaaagatctgtcctaaagggggcgcatccgttgcatggggggcagcttttctgacctttctggggctctgattgaaattcttcttaacataatactgtgggggcagtattttccttaccggccgagtttttttaatattgaacttcactagtactatcataatttcttcatctgcattggacttcattgccattgcctgtcatctgtaatagtggtcgttccctgattgtggcaatggattgatttttttaaaagaaaccactattcagtgagctacttatttttgtggtctgatggagctacttaaatttcaggtataatatgggtgtaatttcaacaaaagagagcttgttaaagtgtgagaaactttcagtgagcgccttctgcaggcggagacttgcaacagttatggtgaagctcaagtttgcagagcaccttaaggaggctgtgacgtacatcgaacaggggcacgtgcgtgtcggtccagatgcagtcacggacccagcctttcttgtgaccagaaacatggaggacttcatcacctgggtggattcctcaaagatcaagaggaaggtcatggagtacaatgatgcattagatgattatgatgccatgttctgagaaaataattctgcagaaatttatgtgcccgtcagtagtgtaatcttaagcctgccacatatgggtcttttctgaacaaatctgtgggagttgtcttctgcatggctacttgcatttgtattgcacctgcagatgtgatgcaattttgtggttggttgaaggcacattataaattcatatctgatgtagttgtgcaattgtctttgttaaagagcgggtttgcccggatttcccctaaaaaaaaaaaggtaaa

SEQ ID NO: 31798 - DNA, 3633 bp, Zea Mays
ttggccatctctagtcgccgttggctgtggctatgctgcactatctttttattgtagataataagtagctgcagtgttgttcagttaaactgtgtccaaaagtttacatatagttactaaaaacactgttttacatcgtggattgtactgttctcagtggattaatagaattggacgctggagatagacccgccggagaagatggcctgcccactgctcacagtagtctagtccctgcccaccaagtacggatctcatctcaccagctgcctgtgcagcagtccaattcctcttgctggagcataccagaagcagaatcgggtgagaggaaatgggatcaacaagaacgtctcatccatctttcccggtcctcctgctcttcctcctcgctaccgccgccgccgccggaagcaacaaggctgaggaggtggacgacctccagtaccttattgacaactccgaagacatcccacccaacgaccctgacgggtggcctgagggcggcggcggcggcgactacgacgacgaccttctcttccaagatcaggaccaggacctcccagactacgagccgcagatcgacgagacccacgtcgtggtcctcaccgccgccaacttctcctccttcctcgccgccacccgccatgtcatggttgagttctacgccccctggtgtggccactgccgcgagctcgcccctgaatacgccgccgccgccgcgcatctcgccgtccaccacaaccagaccgatctcgctcttgccaaggccgacgccaccgaggaaaccgacctagcccagaggtacgacgtccagggcttccccactatcatcctcttcatcgacggcgtccccaaggactacaacggcgcgaggaccaaggacgccatcgtcgactggatcaacaagaagctcggcccggccgtgcaagatgtcaccagcgtccacgaggccgagaggatactcaccggggatgacaaagccgtcattgccttcctcgacactctaaccggtgctcacagtgacgagcttgctgctgcttcaaggctggaagatagcatcaacttttatcaaacttcgattcctgatgttgctaagcttttccatatcgacccagcagcaaagcgtccatccatagtattactgaagaaagaggaggagaagttgaccttctatgatggaaagtttaaagcatcagccattgctgattttgtgtctgctaacaagcttcctttggttaccacactaactcaagaaacttccccttctatttttggcaatgcaatcaagaagcagattttactatttgctgttgcaagtgaatcctcaaaatttctgtccatctttaaggaagcagcaaagccatttaagggaaagctattatttgtctttgtggagcgagacaatgatgaagttggtgaaccagttgccaactactttggtcttactggacaagagaccacagttcttgcttacactggtaatgaagatgctaggaaatttttccttgatggcgaggtgtcacttgaagccattaaggacttcgctgaaggtttcttggaagacaaacttacaccattctacaagtctgaaccagtacctgaatctaatgatggggatgtcaaaattgttgttggaaagagtctggatgtaatagttttggatgaatcaaaagatgtacttctggagatatatgcaccgtggtgtgggcattgtcaatcactggagcctacttacaacaaactagccaagcatctaagtggagttgactcccttgtgatagccaaaatggatggtactaccaatgagcatccacgtgcaaagtctgacggatacccaacaattctcttctatccagctgggaagaaaagctttgagcctgtcacgtttgagggggagcggacagtggtagatatgtacaggttcatcaagaaacatgctagcatccctttcaagttgaagcgccaggagtcaagaagggagagcatccagacggatggtgtcaaggacgaactgtagggcaggcgttgctgggggtgcatcgtcaggcaaaagtaccgtgtgcaagatgatcattgatcagctccgtgaccagcgcgttgtggctgttacacaggagtccttttattatggattgacggatgaagaattagtccatgttcatgattataattttgatcatccagatgcatttcatacagagctacttctctcttgtatgcaaaacttgaaacatggcaaagctgtcgacatccctaattacaacttcaagacatacaagagtgtaccaaatgcaaggaaggttaatccttcagatgttattattttggaaggaattctagtttttcatgattcacgcctcagggatttgatgaacatgaagatcttcgttgatacagatgccgacgtacggttaacaaggaggatccgtcgtgataccattgacaagggtagagatatcaaagctgtgttagatcagtactcaaaatttgttaagcctgcttttgaagacttcatcctcccaacgaagaagtatgctgatattatcatcccacgaggtggagacaatgatgtggcaattgatctaattgttcaacatattcggactaaacttggacagcatgatctttgcaaaatacaccccaatttgtatgtaattcagactacttatcagatacgaggcatgcacacaataataagggatgctgccacagcaacacatgatttcatattttatgctgatcggttgattcgactggttgtggaacatggtcttggtcatcttccttttcaggaaaagcaggtcatcactccgactggatctgtttacactggtgtggagttctccaaaaggttgtgtggtgtctcagtgatcaggagtggcgaaagcatggagaatgcgttacgagcatgctgtaaaggtataaagattgggaagattcttattcatcgggaaggagacaatggacaacagctcatctatcaaaatttaccaaaagatattgcaaataggcatgttcttctgttggaccccatattgggaacaggaaattcagcagttcaggccatctcccttctattgaagaagggtgtacaagaagcaaatattatattccttaatcttatttcagcgccccaaggagtgcatgtggtgagcaagagattccctagagtgaagatcgttacttcggagattgagtttggtctaaatgatgatttccgtgttgtgcctgggatgggcgaatttggagacagatactttggaacagatgattatcagtcatcgacgccattcttttgtgacgataaaaatcgtgtcaggctcttgtgacatgaagccatggctgcggcgtattctccaatttttgagaaacttatatcagcattccaaactctagaatgccatcataatgttttcattaccagacactgtaccatggaacatccagacagaaatcacctcttaatataattggatttgttccatttttattttttttgtcccagtttcgaaagcagcctcttgttcagctcattttggcactctacacaatacatatcgtgtcctcttcagcagcctctagaggacgaaatgtatgttgttttggattggacccaagggtttgatgttgtgg

SEQ ID NO: 31799 - DNA, 6221 bp, Zea Mays
cgcacgttcgccgtccgcgccttcggcttccgcagttcgcacagctgacagcagtccattcaccgtccgcgcctccggtcaccgcacagtacgacgcgcttccgaggaggttagagcgttggctgctatggcgccgcctcgcgtcaccaggaagaaggggaagggcgccggcggcaagaccgacctgcgtcccgaccggaagcagttcaaaaggcaccacaaggaggatgcagccgctgagcagggggatggcaacggagagcggcagcagtcggcagcgccgggttctgcagcgctcctcgccgcagcttctgacgaagctgactttccaagagggggacacagcctcctgagcaaggatgagatggcggaggctcgtgcggaggcggagcaggatttcgagagggaggcgaagaaggggaagggaaaaaggaagaggagtggcggcgagtcgtctggttttggcgtggatgacgacttggggatactcttcggtggggccaccactgggaagctcccacgctttgctaatcgcatcacagtaaagaatatttcaccaaatatgaagctctggggtgttgtaattgaggttaaccagaaagatattgtgttaagtctacctggtggaattagaggctttgttcgctcagaggatgtttgcgacattgctttgcaggaaaatcgtaaggatagtgggaacaatttatgcgcagaagttgttcatgttggtcagcttgttccttgtatagtcctacgagtcgacgatgatagtagagaaggaaaagtaaacaaacgggtttggctatcattgcgattaagcctattgtacaagggacttgccctggatggcttgcaggaaggaatggtacttactgcccaagtcaaaagcatcgaggatcatggttacattcttcattttggagtatcttcctttagcggatttatgcagaaggatgacaaagaagatgtgaagactgagcgccgacaactgatgcaatgtgttgtgaaggcgattgacaaaactcgggccattgttcacttgagttctgatgaagacttgctttctaaatctactattaaggatctgaaaggcctttctattgatcatttgattcctgggatgatggttaatgcacgtgtccattcatttcttgaaaatggactcatgttatcatttcttacttatttcagtggaacagttgatatttttaatttgttgaattccttcccctctggtaattggaaagatgattacagtaagaataagaaggtaaatgctcgcatcctgttcgttgatccatcaacaagagcagttgggcttacattgaacaaacatttacttcatcttgaagtaccccctattaatctaaaagctggagatatctacgataaatcaaaggtgctgagggtagataaaaaggccggtctctttcttgaaataccttctccaactccatcacctggatttattagtatacgtgatgtgtcagacaaggatgcaaaaaacttggagaagttcaaggaaggcagtagcttacgtgtccgtatacttggagtgcggaatcttgaaggagttgcaataggcaccataaaagacagtgcttttgaagggtctgttttcactcatgatgatgttaaacctggaatgttagtgagagctaaggttgctactgttgagccattcggtgctattgtacagttttcaagtggcgtgaaagcactttgtccgcttcctcacatgtcagagttggaacatgttgttaaaccaccaaagaaatttaaggttggagctgagcttcttttccgtgtgttgggctgcaaatccaagagagttacagtgacatacaagaagtctctggtgaaatcaaaacttgatgtgctttcatcatatgctgatgcaaaaattggtttagtgactcatggatggattactcatattgaaaagcacggttgctttgtaaaattctacaatggagttcaaggttttgttagcagatctgaccttggattagaggctggaactgaagcagaaaatgtttatcatgttggccaagtggtcaaatgtagaattatcaatgtgatccctgcttcaaggaaactaaatgttagttttgtcatatcccataataggattgctccaatagacactccaaagttgggcagtattgtctctggtgttgtggaacggcttactcctgcagctgttgttgttagtgtaaatggcttctccaaggggacaatactgaatgaacatttggcagaccatcatggtcaagctgctcagttgaagaatgtgttgaaacctgggcacgagttcaaccaactcttagttctcgatactgaaggtcaaaatttagttctttcggcaaagcactcacttataaattgtgcaaatgacattccttcagagatatcacagatgcatcctggtgttgtagttcatggttacatctgcaacattattgaagctggttgttttgtccgtttcctcggacatttgactggtttctctcccaaggacaaattgataggtggatagaaaagctttctgatgcgttctatgttggccagtcagttcggagtcatatactcagcgtaaatgcagaaactgctagagtaaaactcgcacttcaacagtcaatgtgctcctcaatggattcttcatttattcagggatactttcttctggatcagaagattgcagcattgaagtactcaagcaatgactgggctcgccattttggcattggtagcttagttgaggcggaggtgggagctatagaagaatatggtattatccttaacttcaaagaccatctggatactgttggtttaatcgagcaccatcaacttggtggcagtagtgtggaagtgggatcttctgtgaagggtcttgttttggatttatctgatggagttgttaacttgtccgtcaaaccagagctaattgacagtgtcagaattgttggaaaaaagaagaaacgccaaagggccgtagttgcagacttggagcttcatgaggaagtgaatgcagtcgtggaaataatcaaagacagctatatggtcctttccatccctgagtacaattatgcaattgggttttcaccactgatggattataactcacaactgcttccccaccaccactatgataatggacaacgcattactgtggttgttggaaatatcccaagttctgactcttctggaagacttatcttactaccaaaagcttcagcacagtattcttccctctctgattctaaaagggctaagaagaaatcaggctacaaaattgggtcacttgttgaagcagagattattgatatcaaaccgcttgagcttctactgaaatttggtggcaatcttcatggaagaatccatattactgagattcttgaagaggattctgctgagcatccctttagtgaactcagaatagggcaaaagcttactgccagaattgtttcagaggctgaaccttctggaaagagtggcaaaaaattcaaatgggaattgtctattaggccatgtatagtcaatggagagtttgctcaaaaagaacaaaatcacaccacaaatgggattgtacgtgcttatgttgtcaaggtggataaggaatgggtctggttaactgtatcaagaaatgttatggctcatttatttttacttgatagttcttccgagcccagcgaactgaaagaattccagcagcgctttagtgttggccaagcagtgaaaggtcgtgttatcagtgtgaaccaggagaaaaggttacttcggttgaaggcacttgataaccaatgcacacaaccgaatatagatgaaacacaagaaccaaagtcctctgtgtttggacaaacaaaacaaggagatatcattggtggacgtgttcaaaaaattctacctggtgttggtgggctcgtcgttcagattggacctcatctccatgggagggttcattatactgaaattgttgactcttgggtgtctgaacccttgtctggattccatgagggccagtttgtgaagtgcaaggtcctgtctgtgagccgctcatcagaaggatcacttcgagttgatctatcactccgttcatcaaacctgatcagagactctaacaactcaagactagatgatctggaaacctgtacctcccggattgagaagatcaaggatctgctccctggaactgagattaagggctatgtgaagaacgtgaattccaaaggatgttttattatgctttctcgaatggttgatgctaggattactctatcaaatttatcagatgaatatgttgaaaatccacagaaggatttccccgttggaatgcttgtacacggaaggatcctgtctacagacccatcatcagggagagttgaggcatcacttaggaagaccactggttcaaaattggaaaagctggatgatattagttatagtgacttgcatgttggggatatcgttgatggccaagttaagcgggtggaatcctttggattattcgttacaattcggagaagtgaattggttggtctgtgccatgtatcagaactttctgatgaacctgtcgttgatattaactcttgctataaagctggtgatatggttaaagccaaaattctgaagattgatgagacgcggcatcgagtatcacttggaatgaagaagtcatactttgattctgatctgactgctgacacaaatgatgatgaaagtgctcttatggacatcagcgttgcccctcagatggttgaatatcataacagaaatttagttcaccgcaaagcagaaccaagggcttctgttctgcctcttcaggtttccttggatgaatcggaaggttccgacctagaggataatattagtaatacatgtcttgaaattgctaatggaactgaagcaaatgctaaaaagagtgataaacagttaaagaaggaagcaagaaaacaaagggaactagaaatcagtgctatggaggaaagggctttgcaggaagatataccacaaactccagatgattttgagaagttagttaggagctccccaaatagtagttttatctggataaagtatatggcaactttgttagatcttgcagatgttgagaaagcacgtgcagtagctgagagggctttaaaaacaataatccccagagaagaagaagagaaactaaatgtttgggtagcatatttcaatctggaaaatgaatacggtagtccaagggaggatgctgtgaaaaaggtattccaaagagccttgcaatattgtgatcccaaaaagctgcacttggctcttcttgcgatgtacgagaggaccgaacagtatgagcttgcagatgaacttctagacagaatgaccaaaaggttcaaaacttcctgcaagatatggttatgccgcattcagtttgctctcaagcaaggcaaggatgttgagtacatcaaagccattgtaaaccgtgcacttctaagtttgccacacagaaagcgcataaaattcctctcacaaactgctattctagaattcaaatgtggggtgcctgaagaaggaagatccagatttgaactaatattgcgggagtacccaaaaagaacagacctttggagtgtttatctagaccaagaaatccgccttggtgacgtagaagttatacgggcattgtttgagagggtgacttgtctgaccctacctccaaaaaagatgcagttcttgttcaagaagtatcttaatttcgagaagtcactgggtaaagacaacgaaagaattcagcttgtgcaacagaaggcaatcgaatatgttcagagttcactgccgtcacaagacaactcttgaactacatggagacttaataagcccacaaacaatcattaggaaataccagtcgtactgtagatgtgatctctttgatgactccttgaacattattgtgaaaaggtcaatgtaaaatgtgggctgttcaaaattttgtttgaaacctttatataagttatgagtctagtatgtcatgtttcacccaattttttggaaggaactattctaagccggatctggttcgaatattgaccttttctatctgtggtattgactgatgaggcacaattgaatgggtaactgtctgtgctactctgtcacacccgggtttcggacaccaagacacgggcgcgaacataatcacctggtgttgctgggatcaggtcttacacatatgatgaatcatg

SEQ ID NO: 31800 - DNA, 1832 bp, Zea Mays
cccgaagcgagtccgagtcacacgggagtacgggacacggctgcttgcctgcgccccttggtcctttccccgcttgcctttgcctttttcgggtgggctcctcccctccacccccctctctctctctctctctctcatggcccgccccaggaaggcgaaaccgccgccgccgccgcctagggcggcggcgccgtccatcgccgaggcgctgctgatggccacgatctgcatggtgggtctgcccgtggaggtgcgggtccgcgacggatccacctactccggcgtcctccacaccgcctgcgtcgatgccggttacggtgtcgtgctaaagaaagcaaagaagattgcaaacggaaagggagatgcgaatctgtcgctgggatcgtttgtggacactcttgttgttcatccagatgaccttgttcaagtgattgctaagggcctttcactccccgttaaaggtgtttgtaaacctcttgactccaacgtggtggcttccaatgggtccttgaagcgtcaaaattcacatgcaaatgaccccaaaatgtctaaacctgaaaatatatctccacttatgcaaactgagaaatgcacctctgtgggccaggggaaaaatacttctgttaagaaaaatggtcaaaatagtggtagcgctacaagtttaagttcttctaccggacttatggggccatgtttctccatgaatggggtttctggatcagcaactatggtgcctaaagttgatgctgctacaagttcagctatagctgcgcccttggtagcttcagatgttaaaccctctcagccggtcagtaattcagctaccaagatgattatgtcaagcaaatccactgctaaggaatttaaactcaatccttgtgcaagggttttctctccatcttttgcaagttctaggcaagtacttgcagctatggcccctgttgacacatactacatttcacactctgcccctgaagtaccaatgggcgtacctgtatatgagtcaaagtctgtgcctggcgtttcacctctaaccaacaaggttcattgtagtaacctgtctcctgcaaactatgccatttcacctcaatatgttcagtcagatccattgcatggaacaccctctggttttcaaggatggcctcgccctgtgcttttgaattcatatcaagctagcatgcagaagttccaaggcaacaccccggtgtatttggcccctccaatcatggcaactgggaacctgccattggtggtaccaagccctgcaccacttgtgcagccgttccaggccattcatcccatcatggttcctgctgcaagcagcgtggtcccaggaaaatacatgtgaacttgtcataccaatgacaatctccttctgttggaagagtcctggctttccagttacccctttggtttggggtatacgtctgaaaggactccgcgattttgcctggtctgttgattcacttgtcagttgctggtctgtgtccgtattttagttggaagggctttgcaacttcgtcattcttcatgctctgtgtgggttttcgaaatattctttttagaggggggaggcatggtgcagtaaaatgaaatagagagaaattgcagcaattctttgttatcttagcaacaccttttcttcttccgagagcactatgtacaaggtgacattataaaagattaagatagtgaaggccttattttcgcgaggctaatgtacattcatcttgcaagtgttgcaacttttttgaagtttgtttaagtaaaaaaagacatgaagtttgtttcgacagtattatttctcttatagatcgaaattgttttatggc

SEQ ID NO: 31801 - DNA, 3150 bp, Zea Mays
tgctctctcccaatttcagtcagttcgctccgctcccacatgcctcctccgcctccctctcgccgtcccggcatacccaatccctaggcaccccgccgaaaccctagattctcctctcctgctccgatggctggggcagcggcgtcccccgtggcggcccacgtggtggaacggttccgctcgcggctgcgcgaggaagcgggcagcggggagccgggcgcctccgcggtcgtgcgcttgtacgcggaggcgctccgcgagcttaccttcaactgcaagccggtcatcaccgagctcaccatcgtcgcaggccagcacgccgcgctcgccgccgggggaatcgccggcgccgtctgcgcccgcgtcgccgaggtgccacctgatcagatattaccatctttgtatctgctagatagtattgtgaagaacataggtggggaatatgtagagcattttgcaattaggttgcaaagtgtatttgttgatgcatactacagagttcatccaaaccagtatgcttcaatgaggcgcctctttcgtacctggtggccagtgtttccttcttctgtgcttcacagcattgaggatgaccttcaattttcgccctcagagaataaccgtcccaccacatcgacaaatgtgcatcaaacagagtcgttatctcctagaccatctcatggcatacatgtaaatcctaaatacctagaagcacaacataagttcaagcgggtcaatgtggcgcaccagtcagcagctcaggacactaggcaaatgtctgatgtgcaggaggatctgataaatggactaacatcgaatagttcacaaggacggccttcagtgtttcagaaatcttctttacagtatgctgatgatcctggtcaacaagagatgtttcgacctcttgctggagcaataagggcaacatcgccacatctcttgagaacacatgcatctgatgtgaatctagatgggccattagccaattcaaggagaaacttgtccagatcaccacctcttgatgtgttccctaggaatgtttccccaaagagaccactagagaggctaccaccatctcattctgtattgggacctgatcccagaaaattgcctgatcgaaatggcaggttaaggtgggctttggacgatggtgcacagtggcctacaataagtatgcttgatgaagagtacaggaagcaaagtgcaagggaacttattgatgcatatggaaattgtcaaggacgagatgctgatgaacgacttcctaaagtacagcgcctggattcaaatggtatgactagcaaatctggtgcacgaaattggttaacttcagaggaagagtattcatgggaggatatgagtccaactttgactgatcgagtcagaagcagcatgccatcttttcctcctggaaccatgagaattggatttcctggggcaaatgcagggctactggaatctgatgttgggaggcacaatttcctaagccaagctactagatcatcagttgatgtttcaccatttaatattgaagataggatttcagctgcaagtcatgttgacatttccacaaggagatatccaagcaattttggtgttcagaatggagctcttttggagtaccagaattctgaacatactctaaatcatgggagaattgctaccatgccagctccaccttggcaacagcctattggtcttccattgcgaatacaaggacctgaacatccttcagtacttggtagaataccacagcctgtcgacggtgaaatgccagtcaagaggttggacattagtggcacgtacaatggtttgaatgtagataaacccttggtgaagcataggtcatcacctgctcctgccccgacagaatggctcccccttcaccatgcccaatcacaaactttaccactaattccacctgataccaaacatgttagaagtgcatcagatagtttagaaattagttcttttgttagccatggaggtagttcatcagtatttgttccacggcatcagtatgatgccgtggatcggaaaacaggtaccagtaacttagctcaaccaccatcaccatatcagaaccaagatttgttgccatcaagtcaacaaaatcaaggtacaattttgggaaaccaagctcatcctcatcgtcccctaaagttacatccccatgctcatcctcaccatcaggagacctttagaagctttgcacctggcatgtctgtatctccattccaaggacaaggaggtaatgcaaccatgacaccagtttctgttctgccaacgtctttttctgtacctcctgctgtgccaccctatggcgtgctgtctgcacctgggtttcctatgccaccattaccgcctggaccaccagcacctgtctcactgcagatgggttcatcatcatcacaagttggtggcccccaaccatttgtctctggactgttgagtaaccttatgcggcacggtgtaatttcactggaaccacctagtcaatcccaggattctgttggagttgacttcaatgtagacctcaaggtacggaatgaatctgtcaccaatgctttgtatcaggatcttccaaggcagtgcaaaacttgtggtcttcgatttaaatgccaagaggagcatcgtgctcacatggactggcatgttacaaagaacaggaattcaaagaatcgtaagaaatcttcacgtaaatattttgtcaccgctgttgaatggttaagagcagcagaaacagtaggaaacgatggagttcctgcttttgtgctctcagacccagtcccagacagacaggaagagaaagaaattgctgttcctgcggatgaggagcaaacatcctgtgcattatgtcaagagccatttgaagatttctacagtgatgagactgacgagtggatgtacagaggtgcagtttatatgaatgcaccagatggtaatatcgatggtttggaatggtcacagttgggacctattgtccatgctaaatgtcgatctgggcccggcaatacttcttagggtgggcatagctgggatgatttgatagtttttttttcccgttgcggctgtaggcatgacctgtaaactaatggagactcagattttgaatacatagcagttctctacgttggttggtagctttggaag

SEQ ID NO: 31802 - DNA, 4875 bp, Zea Mays
tgggattgagaccactcgaggttccgagctcccgcaatcaccagtgagatgcggtgtgtggggccttgctcagcggcggggctgggaggtccgagcggaatagatgtcgatggcatggcggttgctccgcacaatccatttccggcatctgagcccaggtgtcaggcgagcatccaagattgtagaccaaggctttaccaataatgccccagagctgagtaccaacaaagggagtttgctgaggtgtagcagcatccgcttcggggagaagcggaactcaatttttgcttgcgctccagacaatttggagcagaaatctggacaaacgttcgaagctgatgcccattctgcgctaaaattgtgctctggtatcgggagtgtagttatagccaagtgttctcacatatttgagagaaatggggacacctttgatgggaactgcagtttgcaagatatcctcaagcctggtttatggctctcaccggagaccctccgccggttttggcgtgtctctgagctgaagcctaaggattttcttgacattttgaatggttttggactcagtgccgtaaaagtgagaaatgcaagatttctatggaatttgtacaggtggacatcgcggcagagcaaagagttccaacatctgccaaggtcaaatgagacaatggtatccatacttgcagatgctcatatgctcagtcaagcagaatcactactgctttcattgattgatcatatgactccagctgtttctagtgaactattcagtcagattatccaggtgtattcagaagcaggcaaccttgggaaatcagttgcactttatgattatgcaaggggcaagcatttgattccttcagcttcatgctatcaagtacttcttcattttctaaccagaaacagaaaggatgaattgattttgagagtatatctggacatgcttgaagttggatttggttcttgcaccgaaggaaatattcttgattctgttgtcatggctttaatcaggaaaggtaaacttttggaagctcttggtattcttcggcaattaaagagtttgggtcttaaattaagcaagggagccttgtcaaatatagttgaagaatttaacaagaaaaaggatattggggatctgatgaatttcttggaagattggaggtgtatacctgagttgcgtctttgcaacagaatccttgcgtctttgtgcacaaatcttggtacttgtcaggcatggttggtcttccaaagtttggaggccttagggtttgctccagatgctacgacttttggaattttcatttttcacagctgtagagaaatgaaactaaaatctgcacttgtatatttatcagagtgctttgctaggcatgttaaacctggagtgtgtgcctataatgctattttaggtggtgttttcagggaggggctatatagacatgcaaagtatatatttgaagacatgattgaaagagaagtaacacccaatctttcaacatataagataattcttgcagggtattgcaggtataggcggtttgatgatattgaacaagtcttgaggcacatgaaaaccaatggtgtaaatgttcttctctctggaaactgtgtgctctccaaggccttatcattcttggggctagatcacctaggggtgaaaatcaagagagataatgtcactggtttcccaaaagctgagttttttgattcagttggcaatggattgtatttggacactgattccaaaatgtttgaggtttcattgtcacaagttttggatagcgcacttctcccagatattaactcagagctaatcagggcatctcagcaaggcgatgttgcaagtgctcttcttgtgaaagacaaagcttttcaatggggatatgacatttcaccagatagctgctctgagctattcaaggccttatgtgtgagccctgcttatgttatagatgtcattgaccttatggaggagatgccagatatactttacaaacttgatgctcaaaatctagatttggttgcccaaacattgagtaggaatggaatgtctgctcatgcaaaactggttttagaaaaaatgttgagagaagacttgtcaatcagtcacaatacatatacttatttaatgataggtttatgcgaagaaaggaacatagcagggttttgggaatgttggaatcttgcaacaaagtgcagatggtcacctgatagcaaggatatgatgggcctcatcagttacttgtgcaaatggggagtgattgaggaagccctgaaacttatgaactctttatttgactgctaccatgatctgttttttagtgcatattgtgcacttctcaaagagttgtgcaggacaggtcataccagcattggatgcgcaatgttggaggctctcaaagaaaagggtgtggctgtggatcgatcattattcttttatgtgatggagggcttcctaaaggagcaaagaactgctgaatcaattggaatgcatgacatgtggcttagcaaaagcaaagaacttgatgtttttacttaccgatctgtgttgccttcattaccatggctggacacagatcgagccaagaacttggtagaatctatgctgaccgtgaaacttactgaattctcatatcgcggttgcattgtgaatgaattaatgcaaacaaggaatataaaatgggccattccagtcttgcaagaatcagctcctgggaagctcagtgccactttgttaaattccttacttcaagcctatggttggctaaaaaattggagaaagttagatgcagttctttgcaagatgctaaagatgcatgccaccctttctatatctagctaccgctttcttgtgtgcagaatgtgtgagcaaagtcgtttttctagcgcttcaagccttagagcacttttccaacatactgacaagtcaagagaactgattgcatgcaacattctaatattttatctttttcaaagaagaaacagctcacagattcatgatttattgaaggacattgaaggtaatggtatttctcttgacaaaaccacatatgatttccttgtctatggatttcacaaatctggggatatcaatgattcagttaatgcgcttgatgcctgcattgctcagggaataaaaccaagcaaccgcagtctcagaatagtgttaagtcattactgcaggctaggaaaccatgagaaatcactagcattatttcacttgattgagcgcaatggatggaagcatggtttaatcattaagaccaccctagcttcatgtctcctttcatttgggagacaattggaagcaaaatcatgtctgaacaacctgagcaaaggtgagtttatcggatgttcaagcaattttgatgatctcatcaaggaattctgcattctaggagatttgaaaatgactctttatctgctaaatacaatgttaaagaaaggcacactgcctaatgaagccagttacagttctgttatatataaactttgtacattgaaggagttcgatcaggcacttgattttcttgctgaaatgcagctggcaagtctaaaatcaagtgaaatctcctgtgatgcacttgtacatggcctttgtgccatgggaagaccttctgatgctagaaaggttttggaaatgctaaccaccttgggatctgcaccatcctatggcatgtttagagttgtttttgataactattgcagaagtagcaatctacagaaagctgcggcacttctgcatgacatgcaacaagcaggacaagtgcccaactttgagatgcattggtctgttataagcaatttaagcagtaccaatgagaaaactgaaggacatggagagtgcattttgccaaacctttttctttctgcaaattccccttaaaggtcataaggcgatatatggcttccagaaaatggtgaactgatgattgttctcaagttgaaccctagtggaactgataaaactcgtgaaaccaaggttatgcaactctggaactcaaacgttctactcgaggattgatggttcacataaatgtgggaacacgtaggaaaaactatgcatcttcgatttaggttgcaaaagagggagcttgaactcattacctgagccatcacaactttcttctctgcaacttggttacaggttatgcccttgctaaagggataatgcaaagagtacgcaaatgccaggtttttcctgtttgggcacaaatggaaacaaaaaagttggactcagcctatcgtgaagctacgaaggaagagcactgtcccattattctgttttttcggacgtggtaccatcctcatcatgtagcctaggatgagttatcactgttaaatatttcaagtggttaaatcatgcatctgcagaatatattattgttgcactctcaaatggtgggttgctaacttgctatgtcatgggagtttgggtgaaggccagaaggatgtgatagacgtcgattcgatgcaggggtgggaatatcctagcgttcgccttggtttcggtcttctctggcagcaagtgtgctcccagttttcaagctgtcaaagctgtccaactcagttccttggggaaggcctcgattcgctcatctcctcggacccggaggactacaacaatatgaagcagtatgagaagctgaccgtcgcgtcaatttactttcttgtgatgagtgttgagcatcatcatatgattcatacaattgatatgcaactagaacccagattttaatgtgtacggttatgatttatcttttctcgttaaataatgtgagatattgaggtgtatgataaattatatgttcatctctatgtaatcattatacactaacattttaataacgagagcatagaacgataaatagtgcttct

SEQ ID NO: 31803 - DNA, 3877 bp, Zea Mays
atgtggcagcgtgatgcgccgcaagaagcttccacgaagcttcatggccgctaccgcctcgagaacaagtccccattcccgaccgcaaaagcgggccgagccgaggaagaagagaacaaaacgaaacccgaagctttttcccccattcttcgctggatatacaggaggattttcagagtcagggaggggagttcgccgccgccgccggagatccgctcgccggacgagcgggccgcggcggaggaccccgccgaggcggaggcgggggaggtggtcttcgacgacgcgttcgacataccccataagaacgctccgcacgaccggttgcgccggtggaggcaagctgctcttgttcttaatgcttcacgacgttttagatatactcttgaccttaaaaaggaggaagagaaagagattataaggaggaagatccggtcccatgcgcaagttatacggcatttcttttcaaagaagctgggcaaaaagatatcagagaagcttatactggtataaatcttgcaacggcctctcgcagttttccaattgaactggaaaagcttaacacattaaacagggaccatgacagtgttcttcttcaagaaattggaggagttaagggattgtcagatttgttgaagagtaatttagagaagggagttagtccaaatgaggatgaattattacaaaggaagaatgtatatggatcaaatacatatccacgcaagaagagaaaaaacatactgcgttttgtatttgaagcttgccaagatttaactcttgtcattctgatgatagctgctgccatatcactaacattgggtatgactacagagggtgttgatgaaggatggtatgatggcggaagtatctttttagccgtttttcttgtgatacttgttactgcaacaagtgattataggcaatctctacagtttcgacatctgaatgaggagaaacagaacatacaagtggaggttgttagaggtggtaaaagatttggagcttcaatctttgaccttgttgttggtgatgtagttcctctcaaaattggtgatcaagttcctgctgatggtgtcctgatatctggccattctcttgcaatagatgaatcaagtatgactggagagtcaaaagttgtccacaaggatcaaaaggcaccattcttgatgtctggttgcaaggttgcagatggctatggttctatgttggtaacaggggtgggtacaaatactgaatggggtcagttgatggctaacctttcagaagataatggtgaagaaacaccattacaggttcgcttgaatggtgttgcaacttttattggtttggtgggcttgtctgttgctggtgcagtacttgttgtgctttggataaggtattttactggacataccgaaaatcctgatgggacacctcaatttgttgctggaactactggtgtgaagcaaggatttatgggggcaattagaattttgactatcgctgtgaccattgtagttgttgctgtgcctgagggactcccattggcagtaacactgacgcttgcatattccatgaaaaagatgatgcgagacaaagctctggtgaggcggctctcgtcatgtgaaacaatgggatcagctactacaatatgcagtgataagacaggaacccttacattgaataagatgacagtcgtggaagcatattttgctggaacaaagttggatccatgtgatgatgttagccagatgtcagacagtgcagcgtcacttattattgaaggaattgcgcagaacacaacaggaactgtatttctgccagaggatgggggagcagctgaacttactggttcgcctactgaaaaggccattctttcttggggccttaagatagggatggatttcgacgatgtgaggacaaaatcttcagttattcatgtttttccatttaactcggagaagaaacgtggcgctgttgcagtacagttagatgatggtgttcacatccactggaaaggtgcagctgaaatagtgttatcatcttgcaaaagctggctttccgtcgatggctctgttcagtcaatgagtgctgagaagcacgatgaattcaagagatcaatcgaagacatgggagcgaattcattacgctgtgttgcttttgcatactgttcctttgacattgaaaagatcccaatggaagacataacaagctgggagttgcctgaggatgacctgactctgcttggcatcataggaataaaggacccctgtcgcccaggtgtaagggatgctgtacgcctgtgcactactgctggtgttaaggtgcgcatggttacaggagataatattgaaacagctaaagctatagctctggagtgtggaatactagatgcaaatagtgttatttcagagccagttgtaatcgagggaaaagtgttccgtgagatgtctgaaagtgcaagaggagaggccgccgacaagataattgtgatggggagatcctcgccaaatgataaacttttgcttgtccaagctttaaaacgaaaaggccatgttgtagctgttactggtgatggcacaaatgatgcccctgcattgcacgaggccgatataggtctttcaatgggcatttccgggacagaagttgctaaagaaagctctgacattataatcttggatgatgacttcacgtcagttgtcaaggttgttcgttggggacgatctgtctacgctaatatccagaaattcattcagttccagctcaccgtcaatgttgctgcacttgtcattaatgtggttgctgctgtgtcctctggtgatgtgcccctaaatgctgttgagcttctgtgggtgaacctcataatggacacacttggagctcttgcattagcaaccgagcctccaacagacaaccttatgaagagaaatcctgttggtcgaagggaacctcttgttacaaatatcatgtggagaaacttgtttgttcaggccctttaccaagtagcaattcttctgattttcgattttgatggagtaaggattctgcgtctgcagaatgaaagccgatctgatgctgagaagataacaaatactttcatcttcaacacatttgtattttgccagatcttcaatgagttcaatgcacgaaaacccgaggaaaagaatgtcttcaaaggggtcacgaagaatcacctgttcatgggaataatcggtataacgacagtatttcagatactgataattcagttcctggggaagttcttcaaaatagtgaggcttggttggagactatggttggtttcagttgctatcggccttgtgagttggcccctggcttatgtgggtaaatttattcctgtgcccgtaagacctcttccggactatttcaaaccccgctgttgttggaaaccgccgcgccgagacgaggaggaaggtgggcagagctaaagcgcaacgagtgggcagtgtaaataggcacgtgataaaaaaatggagataaattgcactggttgattccatggtagcagcatcctggggatgtacgcataagatggcaggtagtcggcctcgtcgttttcttctaggagaagcagtcggaagaaaagaagtactatacagaagccaaacttgtctacccctatccagctggtgtgtctgctatgcggcagcgaaacttgagtcattagattgtagcctgaatgaaagcagcgctagcttgcgatgtagcagtacctttttttccctggcgatatcatctgactgtaaatttgtaaatgctttcggactacgagttgttcttatttttcatccacctcttctctacggaacgtttttttctatataagaaaataaagtcaacagagcagttctaaaacgactgttttttttttcctgaa

SEQ ID NO: 31804 - DNA, 3049 bp, Zea Mays
ctattattcttttcggattccttccacaccccatgcccgtgcccacctcaggctgcatcacatcatcgcccacgcccagcaccaccaccggcggcgcaccaccggcggcgccagcaccagtgccagcgcaggcggaggcccgggcgacgcggactggcctgctcttcctcagcggcgtcccttcctgtcttccggcgaggaggtcacgtgcaggttaccgatgggtctggataatacttatggcgagctatctggcatgttctatggaggcctgtcttatgatggctacgcagaccacagcagcgcaagtgattatttcaggtttgccgatccacttcctgcagttgtgccccagatggcagcagaagcctgttcaaatccttcctccactgtgtcgagggccaacactgaagctgacaacccggaggattgggaattcatctcagatgagtccctcaactatattagccggatgctcatggaggaggatattgatgagaaagttagcatgtaccaggcggagtcagcggcactgcgtgctgctgcaaagccattctacgacattcttgggcacaagtttccaccgtctcctgaccggcaggtgatgccttggcccatggacagccccagtgagagcagcggtagcatttgcacacaatctgtggcaagtgctgtcactagcagcagtgttggtggcacagtggatagcaaccggtgctacgatgttggacacagtgagcagctggaagcttttcgaggcttgtgtggtcagtcttctcatccacttgttggtgcatcaagtgatgcttccaatgcagtgggtgagctagaagacattttgatcacgaatggtgggatccctgagtatttgtttgagagccttccaacttgggatttcaggagaggtattgaggaagcccagaagagtcttcctgttagcgataaactagtaattgatttagaaactggtggtattgcaagaccccaagaagcaaggaaagatgttcctatgaatgccaaaaaggacgatgtattgaaggccaagaaaaatagacagagtgaagaccttgacctgatggaaggccggaacattaaacagtctgcattttgttccgatgaacctggttggattgagatgttcgatgatctgcttcgccaaactgagaagaaggctacagttctgcgagagctgatgcgtagtgaagcatccaagaattctcaggtcactcagatgaaaggaccaagtggtccacggccacggggaaggaaaccaacaaagaatgatgtggtggaccttaggaccatcctcatccactgtgcacaggctgtggcagcagatgaccgcagaactgctaatgaattgttaaagcaaataaggcaccattccaagccaaacggcgatggaacccagaggttagcacattgttttgcagatggtctcgaggctcgcttggcaggcacagggagtcagctttaccgcaagcttatagcgaaacgtacaactgcctcagacatgcttaaagcctaccaccttttccttgcagcaagcccgtttaagagactttcacattttctttccaatcaaacaatcttgagtttgactaaaaatgcatcaaaggtgcatatcattgactttggcatttattttggattccaatggccatgcctaatcaggcgtctctccaagagggaaggtggtccacctgttctgcgcatcactggaatcgacgtacctcagccaggtttccgccctaccgagagaattgaagagactggacaaaggcttgcagagtatgctgagaagttcaaggtgccttttgagtatcagggaatagcgtcaaagtgggaaagcatccgagttgaggatctcaaagttggcaaggacgaagttgtgattgttaattgcctatacagattcagaaacctgattgatgaaacagttgctgtagacagtcctaggaatagagtgctcaacaccataaggcaagtaaacccagcgattttcatccatggaattgtgaatgggtcatacagcgttcccttcttcatcactcgtttccgtgaggcgctgttccatttctctgcactgtttgacatgctagagacaactgtcccacgggatgatgcacagcgtgcgctcatagagagggaaatgtttggccgagaggcactcaacgttattgcatgtgagggctcagacagagttgagagacccgagacatataaacagtggcaggtgaggaacctcagggctggatttgtccagtctccgttaaaccaagaaattgtgatgaaagccatggacaaagtaaaagacatttatcacaaggacttcgtcatagatgaagacaacggatggctcctacaaggctggaaaggaaggatactctatgcaatttctacatggaagcctaagaataactaggttcttggtctcacgcgtaatctctcctattccatcgatggtggcagctaattaatcagtcctgctatcttataacatttgggccttgacctgtgaacctgtctgatcaaggcaatggcttgaagccggacaatgatcaacatggaggtttgctagatttacatctgtccagccagtactctgataaactggaaaagagcagctgtagacgtctctaacttggtgttggtaccatcacctttatttaattcgtagttttcttctttccatttacttctatgaccggcctggcgtcctattaccaacaaccagatcaccgcttctagttcaaaatggctaggcaaactacctactatcttgagcttaatatttttgacttgtatccatccatgtcaaacatcagttcggttttcagcacctgcagatcagaaattccccaacgagtaagcctaaagcatcaaaatttgttatacgagaacggacgctgctgtttgtgtggaatgtagcatctcatggagtgctttatctttgaattcttcgtttatttatttcatctgttttgtagcaagtgacgctgctgtcacaaaaacgagtccttaaacttgagtggagcactagtttgag

SEQ ID NO: 31805 - DNA, 1402 bp, Zea Mays
gctacgcccgtcgccaggctcccgtctccatgggtctcctctcaaacagttcaaccctcagattcgttccttctctggttgtggatgctaaagttattcatctggactataataatatccgcatatttttgtcacttaaagatgtaaaggtgatggtggagacaacacttggcaaagaagagttgaaagaggcagttttgatgtgcactaataggaaagctgccataaagaaaatagatacaaaggcatctcaagaattccttaatgaacataagcggctgtgcgttgagcagaggtccctcgccacactccgcgtcctgacccaattccgcgagggcgcgagggcgcccaatccccccgggcccatggcgtcgtcagagatcgaggtggtcgaggacgccacccccgccgcaaccagtggtggagctggacgggccgtcgcagaggtggcgaggcaggagggggagggggaggcgctcaaggacgatgtgtacacgggcgcggcgtatggggacctcgagaagctgcaccgcctggtcgagcgggagggccgctccgttacggtgcaagacgcgctcgggtaccacgcgctgcagtgggccgctctcaacaaccgcgtcgccactgcccagtacattctcgagcatggtgccaatgtaaatgctatagaccacacaggccaaacagcacttcactggagtgctgtgcgtggccatgttcaagttgcagaattacttttgaaggaaggagctaaagtggatgccactgatttatatggatatcagaccacacatgttgctgcacagtatggccagacaacatttctttgtcacattgttgccaaatggaatgctgatcatgatgttcctgataacgatggaagaagccctctccactgggctgcatacaagggatttgcagataccatgcgtcttctcttgtttttaggtgcttatagcacgcggcaagataaagaaggctgtacccctttacattgggctgctattcgggggaatttggagtcatgcactgtgctagttcaggctggcaaaaaggaggatcttatggttcaagacaatactggcttgactccagcccaacttgctgctgataagaatcatcgacaagttgcattttttctagggaatgctagaagtatacatgaaaggggatgcgtcgggaacagttattttgtgaaactatcaaaaatcgggcttgctcctcttctttggtgtatcattatagccttaatggttgtatatatacattcaattatcttagaagactataacacaaagatgaccgtaatttttgggttatttgcatggttgggagttttccttgcaagtgtcggactggttatgttttatagatgcagcagtccaactggtagaattacccc

SEQ ID NO: 31806 - DNA, 2659 bp, Zea Mays
cgcgttctgcggcgcagcggctgggctgaggacggcgatgctcacacacatgcttgaaacaggtacacattgggaattcaccaacctatagacttgaaaggaagcttggaaagggaggatttggacaagtatacgttggtcgacgtatttcagctcctcgtctcagtgaccgtaaccctggttcaaatgctttagaggttgcactgaaatttgaacaccaatccagcaaaggttgcaactttggagctccttatgagtggcaagtttacaacactcttagtgggaaccatggtgtcccacgggtacactacaaaggaaagcagggagagttttacatcatggttatggatattttgggaccaagcctatgggatgtttggaataataattcccactcgatgtctgttgagatggttgcttgcataggtatgtccatggtgatgtgaagcctgagaacttcttgcttggtcctcctggtaccccagaggagaagaagctttttcttgttgaccttggattggcaactaaatggaaggatgctggtacggggcaccatgttgaatatgatcagagacctgatatttttaggggaactgttcgctatgctagcgtgcatgcccacttgggaagaactgggagtaggagagatgatcttgaatccctcgcatacactcttatttttcttctccgtggccgcctcccttggcaaggataccaaggagagaacaaaggttttcttgtctgcaagaaaaagatggcgacatctccggagtctctgtgtggaatctgtccacaacctttccggaattttgttgagtatgtcgtgaacttgaaatttgatgaagaaccaaattatgctaggtgcatctctctttttgatggtattgttggcccaaatccagacataagaccgataaacactgatggtgcccaaaagctagtatatcaggttgggcagaagagaggtcgcttaatagtggacgaaaatgatgatgagcaacctaagaaaaagatcagaatggggatgccggcaactcagtggattagtgtctacaatgcccgtcgacctatgaaacagaggtcagcatgatgcacatatctgcataatggcagtaacatgaattttccattgtcttgccacatttgtttatcaggtaccactacaacgtagccgataatagattggtgcagcatattcaaaaggggaacgaagatggcttgtttattagttcagttgcctccagctcaaacctgtgggctttaattatggatgctggcactggttttacatctcaagtatacgaactttctagttactttcttcacaaggaatggataatggaacagtgggagagaaatttctatatcactgcactggctggtgcgaataatggaagctctttggtgattatgtcaagaggaacacaatatgcccagcagtcctacaaagtaagtgatacatttcctttcaaatggataaacaaaaagtggaaggagggcttctatgtcactgctatggcaacagctggaagccgatgggcagttgtcatgtcccgcaatgctggtttcacttctcaggtagtggagcttgatttcttatatccaagtgagggcatccacatgcgttgggacaatggctatcgcattacggcaacggctgccacatgggaccaggcggcctttatcttgagcataccaaggagaaagcctactgatgaaacacaggagaccctgagaacatctgcttttcctagccagcatgtgaaggacaaatggtccaacaacctatacctagcttccatctgttatggaagatcggtgtcctgaagcccgttttcacgatttggtctggttgctgagaggtatattgatatcaaatacaggtggttttatgatatcaatggggcattttgaagctgaaaactctgctaacctacttacctgcaactaacaaaaggtaacctatatatgaggaaaaaagaaagcaaagtctgttgtgtttcgctaatctctaccatggagcaaaagaacattgcggtatgcctttttttttaattgggctgtgtataaattatccaaagtattaggttgtgctgtaaagaatgtagaagtgtacctgctggacggttgccatgtatataaagtcgaattttttacaatgttgtttcgaattacaaagatggaatttgtagctttttcttcattcatctattcaagttacagatcaatagctactcccctccccccaaattataaaaggttcttgtcttttgaagatcattgcttttgtaatgtatctagatatatgctatgttgagatatatagcaaaaaactatctaaaaaaagtagaacgtcttacatttttaaaaaaaagatgtggtatgatgtagttcgtttgggtacatcacccaggatacaaaaaaatgcttgtatgtatgtcgttgatggtccgacaagttcgctttctctcttcgatcccagaactagagttggactgctatagcaatacctaaaagcagtatgatagcaacacacacaaaaggaagtcttgtttttcactatgaatcaattgtcctgttgttccattggacatctacagtgttgctgcatttgctgcaaaacacagaacagtcagaaagaaaaaaacgaagaaacaag

SEQ ID NO: 31807 - DNA, 1569 bp, Zea Mays
atgtgtaaagtcagcaaggactttgtaattgatgcagcttttacagaacacgcttctcgcttttttaaccacagttgtcaacctaactgtcggctggagaaatggaatcagagggtctgctttgggccctcaatttgttgctaaaccacttgcacctgataaccctccactgaaggtaagatttattgacaacatcgatcctggtgggattgatcatcaaattgctcaactaggatctcaactggcaactagctactcttgtaattgtcatttctaagattttggaggcccaagtgagcaggccttcctgttatctagaacacaaaggccatttactccattgcagtggatggagttggagcaccaggctctcatgtacaatctcaatgcaatggccccgtttatgatggtaacagaacacttgagggagggggaactgctgaagcgtgtttcatcaagatccaagcagcacatgagctattgattcatgatgaaaggagaagggcatatgatagagaggatcatgtgaacccaatgaaggtcttataattttcttagccactcagattaccaccgtatcatgattcatcaactctaacatgcgtgagccaacactatgcttctccacttcaggacatggatatgactcttctatgtttaagccactacaacttggtgtatttatgccaaagattttttgagcactaacacaccaaaccagcgcctatgaagtgcttttgtatgatcaccttcttcttgcaccatccatggataatctacgtagctgcaaacagtcttagttacatattactgtactgaacatcctttcatagactacttgtacactgcctttttagaaccgttgtaaaacctcatgcgatacgtctgcgcctttgaaacagagatcaactgaacaacctgttcaatgtttccttctattgcatatgtattctgttgtcatactatgtccaacaatgcatttatattgctacaatatgtttatacttgatgcatgtgatacaaatccgttatttatacatacaaagacaagctcttctgacaccatagggcgccgcggagcgcaccccttttttctagtaagtttaacgttgcagttgctgaaggtgattgaatagaactcctgatttttttgtgttctatctaggaacttcagacatgatgtaaagatgaaccggagcatcaagcagcagctgggtgcctcttcactgatagtagatctctaatatagtgatgtatgttctatactttgaggttagcttttcccctctggtcccctttgttggagaaactgttgtacttcagttaagagataagttttcagagtaatttctcctaatcagtttagtagaggtttcaggttcactaacctgagcagtgatcaggcttttagcttatttatttatgttgtgcaacgctggaatggtttcgaatgcaaaattgtcgctgctgttgccgcattgccgtcttaactcgcaggggctgcatgctgatatcggtgtttgaacggaaagaggactcacaacaagaaatgaatgaacgatgttccat

SEQ ID NO: 31808 - DNA, 1227 bp, Zea Mays
gagacaaataaagagtcgagtcaaaaataaagtctgtgagtgatgttctaagtgcggccaatgactacaaatgttatttatagagtttaatatttacattttctagtttcttctgtgtgtcacccttgaccacctgcgccgtgtctcttctgtgtgccactgctgccctcacccctggatgagaaatgaaggcaccagatttaaagtgctcatatgagcacaagagctccatgagcacataatacgttccctttgctaaaagcaaccacaagcgaaaaaaaaacaaatttccctgctctttccgtcgcctccgccgtcgccgtaagactgtcgatggccgcagccaccgccaccgtcaccttctcgccatctcccccatccttcctcaactcccatatccctcgtggccaccgacctgcctccaccacgacgatagcttttgcacgccgttttcgcggtgtaaaacctagtcccgatcgctcccgaggcaaggtcgaccaggtcgcccaccccgacgatggattcggcgcactcgaagcggagctctggcgcctgcgccgcctcgtggagctaaagatccaccgcctcggcaccgaggccgacgccgcctaccgcgacctacgctcggcggtgcgcgaggtcagcggagaccgcgtcgtcctaaccttccgccgctcgtcgctgcgctacctcaccggagcactcctcttcttgctcgcctgcgccatcgcggcgcgattgctgctggggatggtcttacgggcgtggcagcggcggggtttgaggaggggattgtggggtgaaggcggcagggcggttgtgcgaaggagggaccgcagcttgggagggaaggaggtggtggttgctgtgtcgtcgccgcctaaggaggcagctcggaccagtcgtgtcgcagagccagcaaaggaggtctggagggggtactcacaagctaagttgccagactggtggcccaatgttggagcgacggtgatggaacctgggccagagatggagaagtgggcaagaatggcaaacagattggtccgagtgcgggatgttactattgttctccatatatgttaatatactcaatcggcgaaccaaaattataggtacatataacatatttacccttttcctttgggaagtaaagtagattgtcctttatcattgcgtagaattacatgttgctattactgaaatttgtaaaccttttttttgtgtcag

SEQ ID NO: 31809 - DNA, 4600 bp, Zea Mays
gatccaaccaagaacgcgcatttcagccgtaaaatactcgtaccggtttccaggtccggtcgcgtcttgctctcttccgtccctcatttgccttcccgtccctgctattcgcgtgtgggcctttgcttacccattcttgcttccgctgtctttgctgcgtgtaaatctgatccagtacttgtgtgtccgcgtcactggggattctttactttaagttggatttggcaatgtcaatggaaggagcgatatctgatctgaattggtgacatttcttgctgctgctttggtcctggggtgggcggattggagagcgaccactgtcttgccggttgcttttggggtagctactgttcttgtgaatttctgatgcggagtttcgctcaggatagggaaaggagtgatctatagatttctaggcttctgtagggaaagaagtgatctttgatagatttctacgcttctgttggcgattcctcttcatctcaacttggggatttctgccgaggagactttcctgactggtttgggttcagctgaggagcagagatgaggttgtctgttcgtgtgatcgaggcccgcaacctgcgggccatggactccaacggcttcagcgacccgtacgtgaagctgcagctcgggaagcagcgattcaagaccaaggtgatcaagatgaacctcaacccgacttgggatcaggagttcagcttccttgtcggtgatatcaaagatgtgctcaagcttgatgtctatgacgaggacatcctccagatggatgacttcctgggccatttgagggtgccattagaggatgtgctgtctgccgatgacttgtcgcttggtacccggtggtaccagcttcttcccaaaggcaaaaccaacaagaccgtcgactgtggggagatttgtgtctcaatatcgttagaatcatctggagcatcacgatcatggtctgaggaccttggagatgaaattactgatatacagagagactattcactgtcaagccaaaacacggctccatctatttcatttgcttatcgagaaactgaaatttgtgaagaagacgatgagtattctgttacatctgaaattcatgcagaggatagaagtagtgaagttactgatagaaatcaagctgctgcagaggacaagccaaatgggaattctagtgcagatttgaatggaactgaaacttctagtggtgaaacagataagtctgataagctatcatttgttgatcgtgtctaccaaatatttgctaagaaaaatggcgatacaatgccaacctcctctggaagctctgaggctttagaagaagttcaagaggaagcaagtggatgtgagcttctggtcagtcaaattgataatgtgtgcccagagactccattcagtgaactactgagatctcttgaattgcgacatgaaggagtcgatatgcctgtaaatctacaaggaattcttgttaatcagtcgtatcttgcctcacctagtgatctgaataaccttctcttctcaccagattcagattttaaacaaacaatggttgagcttcaaggctgtactgatttcaaaactgaaccctggaggcttgataatggtggggagtccttaaagagagttgtaacatacacaaccgcaccatcaaaattggttaaagctgttcacgcaacagaggagcagtcttatttgaaggctgatggaaaagagtatgcagttttactgagtgtgagcactcctgatgttccatgtggtacttattttcggacagaaattcttttccgtatcatgccaggtcctgaacttgattcacagcaacagacatcacatctggtaatatcttggcgcatgaattttcttcagagtactatgataaaaagtatgatagaaaatggagcaaggcagggcttggagcaaaactatgcacagttttcggatttactatcacaaaagatcaagcctattgatgtagaaggttctgggtctgacaaggaacaggtcttggcctctttgcaaggaggcgaggaatctgattggaagatagcatttctgtacttctgcaactttggagtcttatcctccttttttgtgtctctttacattattctgcatgttctacgagtgaatccaagtgctgttcaaggccttgagtttccaggattagatctgccagattcgctcagtgaaattatcatgggtgggctgttgtttcttcaagtacagcgcatacttaagaatattacatgttttcttcaagcaagagaacaaaaagaaatctttgaatttgacgcaatggatgatccaccgtcggtgatgagtgtacatgtatatgattttgatggaccattcgatgaagttacatcccttggacatgcggaaattaactttgtaaaatcaaacttgtcagagttagctgatgtatggattcctcttaaaggtaacctcgctcagtcttggcagtccaagttgcatctgaggattttcttgaacaactcaaaagggaccggcatggtcactgagtatctgagcaaaatggagaaagaggttggtaagaagatgacactgaggtctcctcggaccaatactgcattccaggaactcttctctttgccagcagaagaatttctcatcagcagttttacctgctacttgaagaggaaattgcctacacagggtcaagttttcttatctccaagaacaattgggttttattcaagcatgtttgggaggaaaacaaaattttactttctatgggaggatattgaagacatacagggaatacctcaatcaatatcatcatggagtccatccattataataactcttcacaaaggtagaggcatggatacaaagcatggtgcaaagagcatggacaatggaaagcttaagttctgcttgcagtcttttgcatcatttagtgtggccaataggacaataatggcattatggaaggcaagatctctgagcacagagcttaaagtacagcttgctgaagaacaatcccaaattaacacccttcagagtgaggacagtggggtctttgttggtattgaggatgccaagagccttcagatgactgaagttttctcctcgaccatttcgaccaatatggcctcgcttatggaggtgtttgcaggaggatccttggaaatgaaggtaatggataaagttggatgccagaagtactcggctacacagtgggaatcagataaacccaatgagtatcaacgacaaatccattacaagttcagcaagaagctgtctcccgttggcggagaagtgacaggaacccagcagaaatctcttatgcctaataagaaaggatgggttatcgaagaggtgatggagctccaaggagtccttcttggcgacttctttacgctccacatcaagtaccaggtcgaggacctcgctcccaagcaaagagcaagcaatgtgcaggtctccctgggaatcgagtggtcgaagagtaccaggcaccagaagcggatcgagaagaacgtcctttccagttcgtccgcccgcctaaaggagatgttcaaccttgcgtcgagggagctctcgcacgccagataggcggcggagcgtaatggcctttcgacgtctcacccaccgtccctgtgcataacaacaacaggaccgatcattgagtgaacatttaacacccactaactgtatatggaaagcttggctgaagactgacagacagcaacgccaagaagaagaggaggaggtactgtaggatagctcgatagacaacgatatagctgtatgttctgcttgcaagttgttctctctgcttgtagcagtatgggttgccctcaggtaggctctgaatgattctttggtcacaacacacaacacatgttggaattatacacagtacacgtccgaggctcaagagatggaacaaagctatgaagtttacaacattcattatagtcactattccaggcaggggacaggcttgcgtctgttgcccgttcattcatggcggcggttcagttgaacgccgactcgccgagcaggaagaagatcactgttttccggcggaaggagacgtgacagtgtgacaccgaaccgaaaccaccgttcccgcctccggaagccttgctgctgctgctgaagcatgaaccatgaagaaaggaaggatccagaccggcggcagcaaagcccaggtcgtcttgttgtcacgcccatgcccggagacgtcgctggcgcggtgcctgccaatgctgccagtgatccggagtacgtacttggctggcctccgatccaagaaaagaaaccgacttgctgtgacgggcgccgcgcgacgtgctccccatccatccatccaatcatctctcgatgagatcatgggaaggaacgtcgcgatcgttggcgtggattccgctggccccgtgcctgcctgtttcgtccctgcaccgccgccagccgcttctaccgccggtgaggtcgccttgaccgatcacccaggatgcgggccggtgcagtcgagcaggcgcgcgcgcacgccatgatgtgacctgcgataggctaggggatggcttccagcggcggcttgtatgctgtccgccaggaagatgatacagcaacttca

SEQ ID NO: 31810 - DNA, 1578 bp, Zea Mays
cgtaaataaatttcatttttctccctgtcgtcctcctctgcttaactcccttcacctccacctccacctccacctcggcgtcgtcgtgcgcttcgatctctccccccatttccacgcggaggggaggcgtcggcgcaataaaaggcggcgcttttgcatcgcccctccccggcatgcgtagctagcctcgcggctggcccccacgccatgcagaccaccgggcccgcatcgccggataagccgccagttgttgacccggaggccgacgacaaggtggaggaaggggcgcgggcgaaggaggacgatgcggcgaaagtgagcggcgaggatgaggatgaggaagagcaggaggggaggagaggcaggcggcagcggcgccggcgaggcggtgcggcgggggacagctccgtggccatggtgaagcgggagctgctcgcgcgctgcttgacgtgcccgctctgcgaccgcctgctccggaaggccaccaccatctccgagtgcctccatacattttgtagaaattgtatctataataagatcaatgatgaggatctggaccactgtccagtatgtaaaattgatctgggctgcactccagtcgataagcttagagctgatcacaatatacaggatgtgagatcaaaagtttttcccttcaaaaggaagaaggttaatgctgaagaggcagaatctcccattatgctacctgttaaagttaaagagaggtctatctcatcattggtggtcaatacacctagagtaaccccagcagcttcaacagggaggcgaacaagggtggttaccaggaaggctgccgcattacgtggccttggccctatcattgtggatcctttaaagaaggataatgataactcaaataagcaaactgataattcaagcttgctagatagcttgagcaaaatacctcaaacaagaagacagttattgtcgaatggggacacatcaagtcacccctctgtcaaagataaagcagatgataataaggacttcgataagtccgagctctggaaacctctgaactgtcttgtagaggctgcaagcaaaacaaagcccctgacaagtgcacaaagtccagctttgaagggagaattcagagaatctcccagtagcgaacattttagcagaacaaaggtcaaagttgaagataacaaaagtgacgatcctgagccaatagtgctgcttagaaagagagggcggcctggccggaagaggaaaaatcccctacctgaaacaaatgcagcttccacggctacagctatccaggccagaaaggcatttagcccgatatggttttcattgattgcctcatttgaccagaaaggcaaccctcctttgcctcagatacctgcccactacttgagaataaaggatgggagcatacccgcatcatccatccaaaagtacattatgcagaagctcagtcttgtaagtgaatccgaggttggcaatctggatcctgttaatttacaccatctcctccggcatgtccaaatggtacttgtggcatctttgttcagtcatgcacatggaaagtttgtgtgtccttttcctccctct

SEQ ID NO: 31811 - DNA, 788 bp, Zea Mays
gccatgcactgtccctgcgccgcagttgactccgtttgtctcgcggtctcgcccccgtctcgctctccgacgactggtgtgccgccgccgtcctgtgccaggtgctaaggccttcgtcagtatcttcgccggcgacgagcacccaccagctccttgatttctagaaagaaaggaggggttgttttcctacatcttgatcatttggagatttttctgtcattctaatggaggtaaaggaagtatgtgtccaagatatgttggttgacctggagaaaggcaagtgcttgctacccatagaggacaatagtgggatgaaggttaattcaatagctgggcatgcaagtacaatgcggcccagctcatgggatgatcttgtagcactgaaggatgataagagtcaccacatatgttgtttctcttcacaccgtcaagattcatctgttaaaagtggagagcctatgaaagctgaaggggagatcaaggttgggattttggataagtcaactgctgataaggaaaataaaaaatggtataagaagccgccacgacctccaagatcacagactacttcaccattagaccctgctgatcagaagctcatcagtgcactatcggagcttgcggtgttaaagaaggctaggattgagcgtatgaaggcattgaagaagatgaagaattccaaaccagcatcttccattgggaacttggtggctttgatcattaccgtcatcttatgtttcttcatactttggcaaggtggaagtggaggatatgaagcgttgagtttg

SEQ ID NO: 31812 - DNA, 3644 bp, Zea Mays
gggcctgtacccctcctcggtttcttgccgtgccgaacgaccccaagtccccaacacggaacggaaccgtcaatccgctacgccacagcaacgaccaaccggagccgccgccgccgccgccgacggggacggggacagggaaaccaccaccaccaccaccggccatattaacagctgcgcgtgcacggtggagttctacttccgcccgcgattcgactcgactcgactgctcgttccgtctcgaccttcaggtaagcaggttgaccgtccgcgaattcaccgtatcccgggatacgtatgggttccaaagcgtccttccgcgtcacgctcctcttgctgctcctcgccgccgcctggggacctgctgcacaggccgacgacgctgctgagctcccggatcatattgctattaccttgaaggagcaggtttcttcgaccaagattcctgtccgtctcaagagtggcagcccgctgtgctcagcctgtgaaaacttcacgggcaaagctgtcagttatatcagtgagaaacagacgcaagataaggtcatgggattccttcatgacgcttgctctcagtcattctcgtttgaacagaagtgtgatgaattgatggactcttacgcaaccctcctgtttgccaagatcacggagatcaaaccagaagcgttctgcaaacagtatggcctgtgcaggggcacggctcttttctctggtgtgacaagtgacagcacatgtgtgttctgccaccacctgcttgatgaagttatgtccaaactgaaagatccggacgcggagtttgagataattcagattcttatcaaggagtgcaataagattgaaggccacgtccagcagtgcaagcgactggtcctgcaatacattcccctcatcctggtgaacggcgagaagttcctcgagaagaacgatgtttgcgcgctcgtacaggcttgtccagccacccataagaagactttcagctcagtcttgaagggagccttgttgctgagtgacgcttgaaggttggagaagaacacgcaaagcgtttagcagtggttggaaatagtgtgtccaagtgccgtgtttgtacatataattgtcatatgaatgcatgaagacgtgtcttgtgccctgcattgttttcatcttgtatcataattcataaacacgttgtatttatggacatccacagggggtgaaggttaaaatatatttgtatcataattcatataagcacattgtcttgagctacggtgcagtcagtcaatttatatccagaaaatttcagcgctggtgactagaaaccgcagatgctgcggtattttatttgcagcaaaattttaaggtttcagagcacgaaagggtaatgttttttttttcagaaacaagagaaacttccattgcatcaaagcaacacgactcatttcgttcagtggttgcttcgatcaacgaaagcattgctcctaaaatgatgtcctgatcatgcacttgcactttgaccagagaatgaattttgctcaaggtgggcacgggattcgctggatctcgcctaaacaatgactcttccaggcacatcacatggctggccgatgcaggaggcataggactgcggatgcggaagagtagagtcaacccaagccgtcaggagaggagcgggggaatggcgacgcctcgccggctcatccgggagcgcgccgaggcggcggtggctactctcgtggcagtccgcccccacgagatccccccgttgatgagcgcggccgccaccttcttcttcatcctgagcgcctacttcgtggtgctgccgctgcgggacgagggcgccatctccctggggctcgacactctcccgggcctcttcgccggctccctcctcctcaccgtcgtcgctgcccccatcgcctccctcgccttctccctcccctccatccccaagcccaaggctttgatgatgatacacaggtttttcagcatatctcttcttgcattttttgtgctttggtatacctctacaccagggcagtccggacctacctcccagtcaagtgaaggaggttcagataaacctgcaggatggagaaaccagagctggttctacatagttgtgagaataagtttgttcctttgggttgctttgctaaatctcattaccatatcgtcaacttgggcaagggtaattgatgtcatggacagtgagtcaggttcaaggttatttggttttattggagctggtgctacgctagggcaactttttggttcattgttcgctgcgagtatggcatggctgggaccatttctgctcctattttcttcactcttgatggaacttgctgccctgtcatcaaaaggaatttgtcttgatggaaatcatgcttcggctgaattacatcaaacaggggcaggacaagctcctaataccatggctgatgatgaaatttcttcactagtcacttcacctagacaacctgtccaatctcaagaatccaaacctgaacttttcataatgtttgaaggtttctggctgatcttgcgatcaccctacctgatatacatatctctgtttctttggttaagtgcagttgtctcgtctgtattttactttcagaaagtgacgatagttgctactacaatatcaagcccaacagccagaaggagaacgtttgctctgataaacagctttatagcagtttttattcttgcgggacagctcactttgacgggtcatattcttacagtagctggtgtcacagttgctatctgtgcatctccctttgttgctgcctcaaatttggttgcccttgctgtatggccaacttgggttgccgtggctgtcactgaaacaattagaaaggtaacaacttatgttttgacaagacctggaagggagttattattcactgttgtctcacaggatgaaaaatacaaagcaaaggtctgtatagatgtgattgtccagaggcttggtgacgcaacagctgctggaatttacaggtggttgttcagtagccttgagaagaaaacatccaaggtcaccctgtttgcattgccgctctgcttcctgtggcttgtcattgcatttcacttgggccggctgcagactaatcttgccaggcttcaggctgcttctgctccgtcctactcctgaacaggaagctgctgcgagtgtctttggagatgtgcttccagaatgtttgaacaggcatggcgagaagtggttgtcatcaatagttagttacttagtttacacgtcttgcaggaatttcaggttttattgatggagaaaccttcagaatacagtagcaaccattactacactacagaagagtttagcatacacaaggggggagaaatagtacaccatagacatagactagcacactatatacaaattcaatatcccatttcgatgtgcactgcaggaaactgtagcatgcaatctgtgagtttattataaatgatgtagtagtagggccggatttgttgggcactgctctgcctttggaactactgctgtcctgacagacactgcatcattctgcatttcacctaccccagttcccagactaaatggctgtaaagacagattcataaaaatgtctgctttatggaacatgaacatttctttatagacaggaggagtaaagaga

SEQ ID NO: 31813 - DNA, 859 bp, Zea Mays
ggcattggtcggacccgcgtggttctcccgtgtcctctctctctagtgtcgacgagtgggcgaacgccgccaccgccttacgccagtcgccaggcgctcaggttttcatcttcgggcccttcaccggcgaccagcacccaacagttacatgtgcatcaggctttgatgattgctgtacaaggatgatatggcctcccgcccaaagctgtctggtattcagaagcaggttttggcgctgtacaggggattccttcggacagcacgccttaaggcccctgaagaacgccgcaggatcgagtctgttgtctttgcagagttccgtgacaacgcaaggagtgttgaccgtaggaactttgtacacatagagtacttgttgaggagagggaagaagcagcttgagcagctcaagaatcctgatattactggactcgctacccttgtagtaaagaaatgaggtccattcattgccagaacaaagtatcatcatgataccggtgtttctaatgtgaagatttggaacctgccactgatggtgtccaaataaaataaatatgaccacagattacagatttgatatccagggactttctaatcagcctattagaatctgaagataaatcttgtagcacctgtccggtgacccatagtaatattattttactcttgctgtaagcagaggttaacactaaaaaaagtattgtgattggtctgaactttttgtgcggtataaagcatgtgattcagctcaacttgacttttccaactttaccgagcatatacaattgtgattaatatagaggctcttaaggtgtttaaatgtgctatttacaaaaaaaaatcgtagagtcgtctatgaatt

SEQ ID NO: 31814 - DNA, 1744 bp, Zea Mays
gtatggttacctcttctgtgtgcacctctggttccttgttttcttctgtgttattaccaatcaggttacatcgccattgttattgtttgctctgaagttgcgtgagtgaaaaaaatgtcttgtggaatagaactaagttagtactaaatcaattctgagcttctctattatgccacggcaaagaaaaggtaacacatgcgcaggcaatataaaatgcaatgctgccacagcgatgtggagaagtttcaattttgatcccatccaaatggtcatcagtctaatacttcagtgtatgcttcaggttaggttggcagatcctgacattgtctcggatccaagcgaataccaaaaaatcgcgcagtctgtttctgaactggatcaggtcgtgaccacatacaggcaattcaaggattgtgagaggcaacttgaagcgacaaaagctctggaaaaagagaacgaaggtgaccccgatatgttagagatgatagcttctgagttggaggctctatctaaccagctcgcagagcttgaagaaaaaatgaagtttctactgcttcccagcgatcctctagattcacgcaacatcttacttgaagtaagagcaggtgctggtggtgatgaagctgggatttgggctggtgaccttgttcgcatgtaccagagatactgtgagcgcaacaattggaagtttaagccagtttcttgctcagaagcagaaatgggtgggtacaagacatacgtgatggaggtcaaggggaaacaagtctatagtaaactgaagtttgagtcaggtgtacaccgtgttcagcgtgttcccttgacagaggctatgggtcgtgttcatacgtcaacagcaactgtagctattatgccagaggctgatgaagttgatgtggttattgatccgaaagatattgagcttaaaacagcaagatctggtggagctggagggcagaatgttaacaaggtggagacggctgttgatcttattcacaagccgacaggaatacggatattctgtacggaagagagatcacagctacagaacagagagcgggcatttcaattgttgagagcaaaactttacgagataaaattaagggagcaacaagaatcattaagaaaccagaggaaattgcaggttggtactggtgcccgatccgagaagataaggacgtacaactacaaggataacagagtgacagaccatcgcttaaagatgaactttgagctgacaagcttccttttaggagacatcgaatcggctattcagtcttgtgctacgatggagcagcaggagctgttggaggaaatggccagttccgtgggcgcagtaaacgtatgattcaggcaaattcggcgttgaggccaggccatcaaactgaaccgcgaaactcatgacgtgctcggactcggtgaagatgattgatagctgtacatgaagaaaactgacaagatgaactccccccataggaactttttccccccctgtagtccgcagggtacaacacacacccacccatgcatctcagcttccttgacggcagcagagttactagtagaaaatatacatggtttgtgcagttcaacgcttcaactgctccagtattcacagtttaatgcattttaggtatgttgctccagtttctcaacaattcactgcttgcaattaaatctacagagcaaagttctcagctagctacatttgaaccaatcaatcaaccacttttctttttgaaacgag

SEQ ID NO: 31815 - DNA, 1067 bp, Zea Mays
ctgcaatgtcagagccctttctacaggagtctcagtagaattcatttcagcaaacagcaagcacgaactagttattagtatttacacttgctattgggttgatatactacatatccctgtgttttcttaccactataggtatgggccattttggacatgcaccaccctgattttcgttgctgcatctattgctacttttgtcacctacctatcccacaaatggcacaagaaggaatggaactatgatatcaacttggttacctggtctgctgggttattctatggctacgtgacatttgttcctcttcttttatatgttattctcaagtacttgtcagcacctgctggtttggtgcaattgtggtgcctatatggatattctctgttcatattcattccagcatcgcttctgtctattgtgccaatagaaatattcagatgggtgattgctggtgttgctggtttcatgtctgctactttcgttgctgtaaatctccgcgcacacattgtaaattccggcgagcgatggttcctgatcgttgcagggatattcttgttgcagttggggcttgctgttttgctgaaactatatttcttcacgataactgtatagggttatttacatctaatgatcgtactagtcaagaatacacacaattttccatgtggaatcacttccatgttcattgaacattgatgtaatttttccatgtatacatctttcttacacgtagaattgagaagcccctgaaattgaattacagcagccaaacaagtacacatgtgattgatatgggtgaagagtctgatctgtagtctattctgtgttccactgcttgaggtgaattttgaatgagaaatcgctgtgttctccactcgtcttagcagagatggcaacagtcacgaacctgctgggtattgttaacccaacttcatatctgcgaacataaaatctgttgactaaaaaaatccatgacctgtcgtgtgttttgtttttaggactatgggttgtttggttctgcttttagaacctgtttttcttaaaaaaagtagaaatctgaatcaaa

SEQ ID NO: 31816 - DNA, 2339 bp, Zea Mays
cgggcccatcaccataggcaatcacaattccctttcccctcgccgccgcctcgctctctgccttttccacctcccccattcccacccgccgattcactcaccttggggcctcacgcggtcgcgcctccagcctcccctacccctactcccctcgcgcccagggaggagcccgagtcgcggcgagcgaagattccctccgattgctctcctcctagaacttccgatcggctcgtgatggccatgcagcagcacgcggcgtcggcgtcgagctccagcttggggctgcaccttctcgcctcgccctcgtccatcagggaggccacccacaccaaggttttcgtgggcgggctcgcctgggagaccagcagcgacaggctccggcgcttctacgagcgcttcggggacattctcgaggccgtcgtcatcaccgaccgccactctggccgctccaagggatacggattcgtgacattccgtgaagccgagtccgcgagcaaggcctgcgaggaccccacgccggtgatcgatggcaggcgcgccaattgtaacctggcatctttgggtcgagcccagcatcccgtgccccctgggcggccaagatcagctgggtcctatttgggtgtcccagttccaaaggccttctatttagggggttacagccaccaccgaccgtttccacttgggtactaccaaggatttcctgttccccagtacaggtaagataatttatggcatcatttgttagttttccaatgtaacattctttgtgacaaaacgttaaaaatgtcctgcacttacttttggagagtatatctgataatacggtgtttgctacttaaattagcttgtacatatggtatctcccctttcgcatgatgaaataatctgatccgaccatgctcatggaacacgatatgactgtttgaaagccaatagaaatacattcagttggttttttgcttttgcagttacccttcatatgggaccgaatacatctatccacagggtacattaaactcatattccggtcagcaatatcttcctatttatggagtctcagctgcagcgaacacatccaaccaagcatttagccagctgagtccatccgtttccggtggtggcaatggttatttgtcggttcatagttacaacgtgcctggaaatcaatatgtgcagctcactggatccaacttcagcggtgcatcaccaaccgctcgaccttccattcagacttcttttttagtagcaacacccgttcctgcacatccacacctaataattccagccccctcaccccagtttacacaagctagtggttcagaccaaagtgcaagttgaactgtgcatccaaacatttgtaccttgaggtacccttagattgcagcaggactaaaaagagcagtgttgctgtattcacagcatttgttcttgcctggcaagcaatcatccttgcattcataaggttgtcgttatcatggtcaacagatgtacctggaaaccatgaagttgcccctatggatggggcaagtgatccaagagtaacagttgctcttgcagtttcgctcagtttaaatcgcaagcgtgatggaaatgtagcttatgctggaatggagtccagcatatgtaagatggattaatccaatggagatcagccttcaggtgattgtgcatctgaaaattcgtgttggtgtgtggtccctagtcccagtcaccgtgcacagggtctgatgatcaagaagtgtgtcctgtcctgtacaagtctgcagtcatcaactcatcaccccgttgtctgcatgactagggcctgtttggtttggtgtctaacttgccacactttgcctaacttttctgtctaaggttagtttttcaattcgaaggactaaccttaggcaaagtgtggcagatttagccaccaaccaaacagcccctacattcatcagcggtcagcctttggaccaaactctggaagacctagctactctcttttcctgagagttaccagtaagtgtatccagttctgtatgcagtcatcatcgtgttgtttacaccactgggttgtagccagtgatgatatgatcattcgtctgtaccaaatttttattgttgcaactaaggtgtgatctagcgtgtagtgctctgtgtttggtggtttcaagtatagagcgcttctcttgtacttcaaaataaacccgtttacccatgatgatgctatatttagtagatttctcttctgattatgcttgtctctttaccaaagcatctctcggatagctatggcataaaaggcttgtacatgtttgaatgagcacacttatcaaacaatagaggttgtcttcttt

SEQ ID NO: 31817 - DNA, 1329 bp, Zea Mays
ccccaccccaccccacccgcgccgagacggattggaggaggaaccctaccatatcaatctcgcttctcgcctcgtttcgtctcagctgcattccaattccacctgtaagcggagagccttcgtggtccctgctcggttcatcagaatacaggaggctccggaggtagtccaccaaaacaaaacaccactccatctctcctcttcccagcgatttcctcttcccctcctcgcccgccgaggccgcccgtcctccgtccgccgtcccagcgagagggtgttgcgggtacgagagctttcgggattaaggtgccatgtccctcttcggggaacctcatgtggttggggaattccctcccgcgttccatctgatgctttaagattgtgcagacacataatttggatgctcctgcctatgcaagatgtcaaccaccagagatattgtttagtgctgggaaagttatgcagttttggatcataaattctaaatagacaagataattatggaccgtgcagacacatcagggtttgtcagtggtggttgctttggtactacactcctgctgatattctttcatttcgtctattctacagtccgtgtctgaaaaatcgtcagtaacgctgcagctgcctgggcagaaatatcatcagccccccccccccccccccccccccctgttctttgagatctctggtttttatctcattttcttttccaccatcgttatattgtcttaactgtgatggataacggcttcatggacatcccccatccgcccctgatgaatgacccctttgtgttagtgggatgctcagcgccaagctctacggtggagaacatgggccaaagcacactctgtatggatggcctgaacccagcaattgttagttgcagccatgttaatggaaatacacagataatgaatgacataacagcgagagatgatggcagcaggttagtccttggtttgggtccaacaccgaatttttattctgcagtgtccactggctcaaaacaagctcagagattgtcaggccagagttcaactttcactgattcagggatgctgaggcttggccttcacaccgatggtgggggagcaattcaatgtctgcaaggaccgaatggagcactccattctttaggtattgtcgacgaggcttcgacatctactactgtaaggagcatgggtggttacatgccatccctactctttgctccccgctccaatcctactgtcaacgagacacaagtagaaatcccagattctctaaacctcacgcacagcaccagcaacagtcagcatattcaacgtcacctccagttcacgc

SEQ ID NO: 31818 - DNA, 2749 bp, Zea Mays
ggagaggttcccacgccgatttcggggccgctttggtctggatctgaggagcaaaggccattacttatcgtaagcaagatttctaattggcggaagcttttatgtgtagctgactgttgaatttactggtctcaagtatagagtaggcaggcaatctgcagtttagtggaacccaatgggttcttctccttccaaagccactggagaggatgccctggttctgtgcaaggatcggatgcgccacatcagacaagctattgactcgagagatgcactgtcagcagcgcacttatcttacacacaatctctccgtagtgtgggtactgcactgcggcagtatgctgagtctgagatctcaccggaatcatcgctctccatttcagaagtggataagtcaccatcacattcctctatggcatctccttcgccttcgcgtgcagtagagagtgttgcctctctggggcatcgagcaagtccatctattactccaccctcaacacgaatccattgcatgaaagcagcagcaaccactcctttgacctttgtgatagatcaatctactgctgaatttgtggggcgcgaatccccagtatcagcttttgtcccacccccaccaccattgcctccagaattatgtaccacgtgggacttctttgatcccattgatgctgctggtacctcttcctccaacaatgagaatgaggtaaccctgaacttcagtagattgagggatctaagagagtcaagggtagctgaagtagttccattgaaagaagttgaagaggaaatcatgtccagaaggcatacagaaatttctgatgataatacaccacctgagcaggaaagagagccaaagcaaggtgggaccggaaaaccaagtcagttggtggatacttcaaccaaagctacatctgagcaggttgctgcaaagttggaggaaagtgaaatggaaaaagaattatgtgcagaggcagaggacccttcagagttcatcactcatcgagccaaagattttgtgtcgagcatgaaggacattgaaacccggtttatgcgtgcagctgaagcaggaaatgaggtttccagaatgcttgaaaccaagaagatccgacttgacatatgtgctaaaataccaggttctccagtcaagctaccttctgcccgatttgtgtcagcacttcgagtgtgctgcaatcgtgatgttattctcaaccaggaaactgcgcagcatgtttcaaaggttgtcacatggaagcgttctgtctcatctctttcatcatcatctaagagtgcacttatgacatcgataatgaaagatgatgtggatgacagtaatagtgattttgttgaggaattcgccatggtatccggaagccattcttctacgttggacaggctacacgcatgggagagaaaactatatgatgaaatcaaggcaagtgaaaatgttaggaaggcctatgatgagaaatgtaacctactccgacgccaatttgcacgaggcctaaatgcgcaggtgattgataagactagagctgttgtgaaggatctccattccagggtatctgttgtgattcaagctgttgatgcaatctccaaaagaattgagaagataagggatgaagaactgcagccacagcttgtcgagctaattcaagggctaatcagaatgtggaaactgatgctggaatgtcaccacaaacagttcatcacgatcacattagcataccacgtgaaagactcgacctcggcgcgtcaagcttcagaaactgggtcaccgctcacaaatcgtacgtcgaggccctcaacgcgtggctccagaagtgcgtcctgcagccgccccaggaccggcgcaggcgcaaacgcaaggtctccttccctcctcggcaggctgtctcccctcccatattcatcctctgcggggactggctcgccaggacagaacctctccctgctgacgagctatgcagatccctcaaagacgtgatgcagctcctccgcggctcgttcgagcaccgcgacgagcagaacaggcccagaagcggcgagtcgcaggagtgcgggatgctggagaacagtagcgagcaggaggcggcggctaagagtgggagttgtgcagcatcagctgaagggctgcagtcgagactgacggcggttcttgaccgcctgacaaagttctcggaggcatcactgaagtgctacgaggagctcaagcagaactacgagatggcctgtgctgattataggagagttggaccaaatgctcagcttgcttaggattgatgttggctgtggtgtgtgactttttgctatctctgttctggatgacaaattctctagtgttttggtatatattttgtgaacaatcaggtgatagcacaatctttggccgaatattactgatgatttagtgctatcagttatgtaagcttcatcacttgccctgccctgatgcttcgaaaggcctatgagaaccgttttcacaacgatataacaggcaaaatataccatgattcctgtgcgctagtaatctgctactcattttgcagctacgggaattcggcgaccattaatctcctactcacctttcagcaatggggtatgtactggcactattttttacaatggagaataagcagcttcatacgaaatttgtcgaaccaagtgaaaagaaagtctgtatagccatttttagcttactgataaaaatcttaattgaaaacaattcagacaaaaaaataatctgacaatt

SEQ ID NO: 31819 - DNA, 886 bp, Zea Mays
atcaaatccacgatgcgagtggcagcgcgcgagcgcccattcccgttcctcctcgcccatcggcttctcgcggtctcgccccggcacctcgcactcccaccgcagtccaaaatcctcggcctcacaccctatgcctccgcctgttcttcgcctgttcgcggcagctccgccccgcgctctcggtggccgcgccagggcgcatcgtggcgatggcgggttcgcgcgcctgcgcctgcgcgtcagagcagcggctggggaggccgcgccggcgccttccagaacccagatgataatggataagatctctgctggcgaaggagtcggaggcgctggaggggcttactcatatagtgcgttgaaaagattggatcaaatatggtctagtatttgtgaagctcaagcagattccaaagtccctgaagttgttactcgggttgaagggctgttggctgattctgatcttggttctggttcagagatatttgatgtaattgtatgtggcggcacattaggtatatttgtagctactgctctcagttctaaaggccttcggattggaattatcgaaagaaacataatcaaagggagggaacaggagtggaatatttcaagaaaggagcttatggaaattgtagagattggtattctttcagaagcagaacttgaacaaataatttcaagtgatttcaatcctaatagatgtggatttgaagataaaggtgaaatttgggtggagaacattcttaatcttggtgtttcgcctgctaaacttgttgagaacatgaaagaacgcttcatttcttcgggaggagcaatatttgaggagaaaagtctatcaagcatttatgtctatgatgatctcgctgagagctgcgcatcattatat

SEQ ID NO: 31820 - DNA, 4145 bp, Zea Mays
cacgtccccgcaacttcacaacgaacagcagaggtaggagagtaaggagaggaggaagagcactgccagtgctaggggcagtcggcaggcgcggcgcgttcccctcagtccccttccccggctggtcttgccgggagtaaggggaacgaagccaccggcgcggcatggagcccaagccgtcttcggcggcgcatgctgacgcgccagcggtcgaggccccccgccgccgtggcggcggcggcaagcgcaagtcggccgggtcctcgttcacgccgtcgaagcgtcaggccaaggagcggaacgcttccttccacgtgcccccgcatcttctgcacagcgggccgctcacccgcgccgcgcgccagtcgccgcacaagctctcgggcacgccgtcggagtcggtgccagcgtcgtcggcggccgcaactggggacggggtgagcggcgggcaggcggtggttgatgcgatccggcccgagacagaggaaacgccggccccggagctgccgctggtagacgagatgttcgaggccgtccgatcccgtggcgctggcgtccatgtggtccctacctttgctggatggttttcgtggaaagaaatccacccagttgagaagcagaccttgccttctttttttaatggaaaatctgagaagcggacacctgaggtatatttggcggttagaaattcgatcatgatgaaatttcatgccaatcctcaattgcagctggagtccaaagacctggctgagttgtcaatcggggagaccgatgctcggcaggaaatcttggaattcttggatcactggggcttgataaatttccaccctttcccaccagatggacatgaggagagtaagccagaggagacccaagacaattctaatgacgagaaagcttctttgatcgagcaactgtttaagtttgaatcagttcaatcatatatgacgcctttaccaatgaaagaagatgtgagagctccgcctcctctgcctagcttgattcctgaatctgtactcattcaagatgtggttgcagcagctgagccttctgttgagtaccactgcaattcctgttcagttgattgctcacggaagcgctatcattgtcggacccaggcagattttgacctctgttgtgattgctataatgaagggaaatttgatccaggcatggccaaaaccgatttcatcctcatggattctgcaggagtttcaggtgctagtggtactagttggacagatgaggaaacattacttctattagaaggtttggaaatttttggtggaaaatgggctgagattgctgaacatgttgctactaagacaaaagcacaatgcatgttgcactttcttcaaatgcaaattgaagaccgcttccatgatggcaaagatattaatcaaaacatcccagtaagtacagatcaagccacaactgagaaagccattgctgaaacatctgagaaaatggaagttgaagataaagtggaaggaagaggtactgtggatgaaaaggcctcagagaaaacagagggaaactgtgaagaaacaaaaactgaaaatgccagtgttgttgtaaataaagatactcagaattcagatggcagagattcaggtgcatctccaagcactgaagagccaaagcaatcttctgatgagcaacctgtagtaaaggaaaattctgcagatgtagatacttctggtgaaaaactatcaaatgttgctattgatatcttaaaatctgcatttgaggctactggtcacagcccagaatatgaaggttcatttgcggatgcaggaaatccagttatggcactagcagcgtatttagctggtcttgtggaagatgataacaccaccacttcattccgtagttcactaaaatctgtatctgatgtgtctcctgcactccaattatcaagtaggcactgttttattcttgaggatccgccagatgaactcaaagacatttgtgctagtgtaagtaagaaaaatagagatggtgatcaaaaacaagatgaggatatgattcaaaattcaattgataccgagaaaaaagagatcaatgagaaagaaggtaagtctttatctgtggaaaagaaaaacaattcatccatgtcacaaaatgaccaccaagaatcaggcattaagagcgtctcaagtgatgattgctccttagtggagccaaaaaccaataatgctaaggagtcaggtgattcaactgctattggggacaagagtgcaaccgaaactacaaaaggtaatactgaacaagtgaatgacttgccaagtgttgaggtggaggctcctgatgattcatcttcaaaaggtaaggatgagctcaataagactaaagatgcagtggcgacaccagctaccgtacaggaacagaaacacagccaaacattgggaaatggggatagggaaggtacttcatctgcttttttctctcataaaactctctatatgaattatgaaaccaataaagggtaaccacacattttcactcggtttcaattagagcttctttatgtttgctgccttttctatagctcttggcttttattgaaagggcggagttattaattcctaacctggaggtgactatttgcttactcaattacatttacagctgtgactgattcacaaattaggcatattgctgacatttactggctagggttccttattttacaatatatctattgcaatttgctagcatgacatttgattgagtttcatccaagcggaagtagatatattcagaataagggggtgtttgaaagtaattttagaggtttgagataaaaccatggtattggagaatactatagtattttttccaagagatgtttggatatcttgtaaaaaaaaactctgttttgaataccatagtttagtagttacaattataattttttggagtatttaaaactccactacaacctgaagtttttgtctatgagactgactagcttcttgcacatgtatactaaataccatgatttgagatactttgtctccaaacaagtattatttggttatttggtgtgatgtaaaaaatactatggttgtgctataatattttaaaaccatagtattctaaaaccgtggtttgaaatactctgcttccaaacatgtcctaagccttgctagttgctacactagtaccgcgtgtgtgttttttttcctgattgaccagctcaccagcatgagagtaaatatttttgatgttctgtgttacgtattccctcaatcctgctaaaggtgtttgtgataaattgcattgccccttatccattttcagttgactctctttttctatatattgtctatcttgcagaacctaacaacattgaaagtgtagttgtcggtgaagagaagggctctgtagtgactgccaaccgacctgattccatagctaggctcaaaagagcagcagctactgctgtttcagcagctgctgtgaaagctaggtttctcggtgatcaggaggaatatcaaattcgaaggctgacagcacttgtaatcgaaaagctgttccaaaaaatagaagtgaagatgtcattgttttcagagattgagcaggtggtctttcgaacgagagagtacaccgagaagaccagaaagaagctcctgaaggaacgaaatgcgattattgcagctcggatgggcgcattgccgtctaggccaaaccagacaggtgtagccggaaacaggttaccacctggactgtcggactcatgagcattagtccgacgaacctattcacaggttatgatgatcatgctttccctggcattctacatggagctggcagatcatttgcatgggtctgctgaccctttctaaggaatgtcagctccatggtgttcaccgccaagaccgacgagcgtcgactactcatcgacttctactacatcctcgtgctaaagaactctatcattagtttgggacaactcgatagatcgactatggtgtcttgcacgtctagattaggggtaaaaacgattagaatatatctcgttctgttttgctctggtttctacattgacctattcaaattcgtatttatggacactatgaccattcttgtttatttgaaaatgtaaaaataggacggaaacagtatgagtgtttttccta

SEQ ID NO: 31821 - DNA, 2003 bp, Zea Mays
tacgcctagcaacggcgtcaatcgcttcctcccaacccgcaggttatcaaatacggtgaaccttgtgttcctgtgaaattttgcagctcattatacattgaaggcagaaagtcattctccaatctgaaggcgaaacaaggtgtgcacatatatgttctagaggataaagttcactgagctgctgttgggcattggagagcccagttgtggttctatgcctgaaaggaattctttgtaattttctcctgtatctggttctgttatcatcattattttcctggtgtggggcaatcatgtcagagagcgagttagcagtaataaaaccagaggcattgaaaacttatatctggcttcagtgctttgatggctccatacaacaagtggaggaagaagttgccatgttctgccctatgatatgtcgggaaataatgaaaaatgggacagggtcatctaagaatcatgctatagttctaccggaaagagttaatccggcaagtttgagtttgattcttgattattgtcggtttcatcaggtccctgggcgctcaaacaaggagcggaagtcattcgatgaaaagtttgtcaggatagacacagaaaaactgtgtaagttggcttctgcagcccttggtctgcagttaaggccactagttgatcttacttgtggagcacttgctcgaatcattggaggaaaaacacctgatgaagttagagatattttccatttaccagatgacttaacagaggaagagaaactggagccactaaaaaatttaaatgatgatcctacaattcgtttattgaaccgattgtatgcaaagaagcggaaagaactgcaggaacgccagaaactaaaggatgttcaaacacaagaagaacaaaaagacgagagatctttggatgagttactttgttttataaatggagatggagattccagaggtgggaaagcttctaagagtaagaaaaagaataaaagaaggaaagatcaagctaagaatcccacaaaagcgaactccgaacctgtaaataaggagggagcttcctgtgtggttccgtgcaaagcagataatggtaacatttctaggcatccttgccaaagtcaaaatttgcaagataccgagtaccccttcgacaatgctgaccttgacgatggacttgatcctgcaatgagggaggagattgatagagaagtggccgacttcgagatgaagttgaagctagcttggaccgaaagaatgagtttggagcaggaccaacaaatggagtcacatgttgatacgcggtggtaatggttctgtggtgggaatctctgttagggctagtttggaaacactaatttcccatgggattttcattttcccaagggaaattagttcattttcccttgggaaaatgaaaatcccatgggaaattagtgttcccaaactagcccttagtttttttccgaatagaattttcttgatgaggttttcttttgctgttagagtcggcagaaaaccttaggcaggaaggagttttggtcgagaggtacaggatgacattgcgaggtgctattgtcatatgctgtgatttgtatgtaccctgctcttcaagaaagtagtgcccaaccatgttactgttaccccccaaagaaaggtgggtgactttgttagtgtaaaaaccagaagttttgaatctatgtatgttcattaattttgacaggaactcttatcattatgaaatgaataaaagggaaaatgatgtgttgttggaagttggcggaaacaataggtcgcttagctctataccgttggttcaatagtgctccagttttttctatccacgtttgggactggcttgttgagttgtttttaccgtgtaaactcggtcaaaatgtttgcaattatggtatttgtggactgctggataattctcagtcaaaaagtttgtgaaaatgtattatttgtggactatttgatacttctcagtcaaaaagtttcaccaaatatggtatttgggca

SEQ ID NO: 31822 - DNA, 953 bp, Zea Mays
tagggaacaagcaagcactgatctaattttgttgtcttagtacaattttcttgcagctatgggctggtatgtgttataacaagataaactccagtgctccacatgttggctaaatctagcagaacagaaggcgatattatttttgcaggctgatgtatttgtacgatgaatatatcactatcatgagacacttgtacattcaactcttgaacactgtgaggatgctgatttcacatttccagttcattttaacttcagagagcacacaatatatgttcgatgccgcccctatctcaaggaattcttggatagggttgccagcgtgtttgagacaattattttcactgctagtcaaagcatttatgcggagcaacttctcaatgttcttgatcccaaaagaaagttgttccgtcatcgtgtttatcgtgaatcttgtgtctatgtggagggaaactacatgaaggatctgacagtacttggacgtgacttaactcgcgtaatgattgttgacaattctccgcaggcctttgggttccagttggacaatggcattcctatagaaagctggtttgatgatcccaatgacatggagctgctgaaattgctcccgttcttagaaagcttggtcggcgttgaagatgtcaggccttatatagcaaggaagttcaacctaagggagaaggtgccaaaggtcgccgtgatgataaatgtaggaccggagctgatatagtggttcttgttgaatgtagcatgtcaggatctcctggctccttgcattattgtatgctctaccgaccgcaatgtacaattttcgctgcagttggcagttgtagacttcacttgcattttgttggcccagttgacatgggaagggcctacttgaacattttgtcgatcagttaatatcgtgttgattcatatattgtctgcgacatgtgtgaaagtcgaccgag

SEQ ID NO: 31823 - DNA, 3819 bp, Zea Mays
  misc_feature (1)..(2): n is a, c, g, or t
nnagcgttccagcggtatgacatgatcccacagaacgctttgagagtagcagaggaaggaggaacgaggaagggtttatagtttggattatatgattggatgatcggatggttagtagtttggattggaagattggatcacatcgcgtagtccacctctcctctccagtttccacgagaaaaaaagtggatcctctttcccaccaagtcaaggtttgtgaattcgggagtgctagaatcttgatcttccacaagagaatgtctccagaagcaatggataggcttctagaaaaagataaagtgccaaacccatgctatagagtatagactgaggtactgattttccttatctgatgaaccatctgcttggtgctgtgacgatctctaggatatgcgacttgttaaaatgattttgattgcttcgttggttacattagttctactattaccatgcattaatggccttcctgactatcatttggttatctcatgtttctgagaataaaagataaccattgctgtaaagtactaacgttgttgtgcgcttaatctgcatttgtatttgtttgccttattacacttgcttgcctttatcttgtgttttctatgtataagtgtgcaattttggcatttttgtttatctgttactgttgttctctacctacccacgttagataaatgattcacacggcactgtacaggattcaacactggcatgattctaattgaactttacctattactagcatcctaagtgatcccttcatttgtttgtttcagtttcaacattggaaggctcaactaaatataccagttccggatacacactacaggacaaaggtgcacagcacccgatagcgcgctgccttttttagtgtagaactagaaaaccaacgcacaacacaaaccagagagttctccatggacgtcggtggcggcgccaccggcacacgctgccgagaccccaccgctgacccctcgtcccagttcttcgttgacgctggccatccatacgcagtcgctgcagccactgcgctcacctcccaccgcaccaagtccaagtggtcccacctctcttcggtccccgtcccctcccccttcctggcctccgccgccgccggcgtgctcctcctcctccgccaccgaccgcacaccgcgctccgcttccatgccttcgccatccgccgcctccttccctcccgctcccctccccctctcgtcttctctgccgccgcagcccacgtcgcggcggcctcccgccttcggggccctgccctctccatccttgcctctgcctcccgccactgctcaccggcccagatcttcaatgccctcgctgccacctaccgctgctttgcctccgccccattcatcttcgacctcctcctcctcgcctaccttcgctcccgccgcgacgtcctcgctgcggcctccgtcgcccgccgcatcctcgctgccggcgcacggccgctcccctccactgcggcagctcttcttcgttcactcccttccgccaccgcggccctcgacatgtatcatcaaatctacacgcatccaagtccacggagcaatcacctcctcctgccgactgttcacaccttcaattccctcctccttgctttccaccgcgaaggcaagtgtgatgaattcaagattgtgctccaggaaatggacaaatattcctgcaagcacaacgtgtgcacctacagcatcaggatgtctgggtactgcaatggcgggcatgtggataaggcgcgaacactatgggatgagatgattcaggaagggatccagcctgatataactgcgtacaacacaatgattagtgggtattgccattctggggaggtaggggtggcagaggagatgtttaaaaatatgttgatgggtgggattgattcaagtgccacgacgttcgaatggttggtcagagggcattgtatggcacgggatgtcgaggcagcaatgcttgtgcgtgcagacatgaaaaggaaggggtttgggttggcgccagaggttgttgaggaattgctggatggattatgtcaaaatgggagggttgaggatggcttgagtgttttgcgagaggagatgaagagggaagaatttgtgccaacccggaggagttacgaggtgttgattatggggttttgtgatggagggaaggtggaggtggcaatcagactccaagcagagatggctggaaaaggattcactgctggcagcgaggtgtactatgcatttattagtgcttatgagaagtctgaaaattatgagatggtcgagaagttgaggaaggaaatgtcggcgatgggcacttagagcatgtctagcagctcaccaataattcatccctaataaaatggtattggtggtcaccaatagtgctttttttggaatattggggagactctatagtagattaccaataatctttcccaatacatgggacccacatgtcagaatagaggatgtgggaggaagaagatgacgacagttgttgtggtcccaacacctatagagggagatgcaactccccttttatttgaggggagatgggagatttgttttggtgaccaccaaaaaaagggagagctattggggagctgttggagcaatggaattgcctcatctcccccaatatgacagttttatggggatgagggatggtattggagagctactggatgctctatcggatctgatatttggcttggatattgcacagtgatgcatggatatcaacctcacctaattgcagttgagaactatggtaaatcacttatctttacatcactcctcttcctttgattaagttgcttagttttaaaaccagccatttgttctctcttgaatctgtttcttcttgtagtttgttatttgttctgcatggcatgttataaccatttatttcagaaaattttgatgtctagtattgaaacttgaaacttcaaataatccaaaattggtgctaacttgttctctaggtgagaggtgtgtaaagcttgtttgcttcaaaccgatggtaacaactggtatggaaacatcatgttagagcaggcattagttccatattccactcagtcacattcatctaaatgtaagcgtctattgtagttatgtagttggcatgaatatttatacctgtaaattatgattcatagatgatgaacaatcacttaaacaatataagtctggtgccaaatgctatttcagatgatacctaaatgttacagcacatagttttgatacatgcagggtatccttagaaaagcaagtaaattatgtaatagttgaaagataattctcaatatcatatgtcagatgttctttctggttcacttctctatctggttcacaattcattccagagtggtgcaacaaattctgaattggttgaaggagttctctcctagcactatcctggagacggatgttggagaaatatgactgctggatctgcaataggataatgtcttttagtcgatcccttttgtgcttgtttggtgaacttgtgtccccaatctgttgaactctgtaaacatttgctttccataaaagcagagatattctccttaaaaactcagtccagaatggtgatatatgaatgatccctgagagtttataaggtacaaccgtacaagtccaggtgctagagacttctcaatttgctggaaaatgctgtagtattttgtgttgacttgctgtttgatatatgctcagtacctcactgtaaaatgtggttctcttgtttgcctcttaacaaaatcctgagaaatgacatgagaacaaattgagaattagtagatcagtacttaac

SEQ ID NO: 31824 - DNA, 2839 bp, Zea Mays
ctttccgcgccgcgaaggcgtttaaatccgcccccaaaccctactgcccccctcccatccctgcccctccccccgccccacctcaatacaatcctctgctcgcgttctctcgtcccggcggcggcgtaggcgcgcgcaccaggtgttcgacgggagttttcgccaccgcggaagatgtacgtggtcaagcgggacggccgccaggagacagtgcacttcgacaagatcacggcgcgcctcaagaagctcagctacggccttagccaggaccactgcgacccggtgctcgtcgcgcagaaggtctgcgcgggggtctacaagggcgtcaccaccagccagctcgacgagctcgccgccgagaccgcggcggccatgactgcgtcccaccccgactacgcctcgttggcggcgaggattgctgtgtctaacctgcacaagaacacaaagaagtccttctcggagacggtgaaggctggattagttggattgggttgtgagttggaatgtggccgttgtggatgcaggattaaggacatgtacaggcactttaacgagaggtctgggctgatggcccctctggtcgctgaagatgtttatgaaatcatcatgaataatgctgctcgcttggacagtgaaataatttatgatagggatttcgactatgactactttggcttcaaaactctggagaggtcttacctcttgaagcttggtgggaaggtcgttgaaaggcctcagcacatgctgatgagggtttcagtgggaatacacaaggaagacattgagtctgccattaggacgtaccatctgatgtcccagcgctggtttacacatgcatcaccaacacttttcaacgctggcacaccgaggccccaattaagcagctgttttcttatatgcatgaaagatgacagcattgagggaatctatgaaaccctgaaggagtgtgctgtaataagcaaatcagctggaggaattggtgtctcagttcataatattcgtgctactgggagttacatacgaggaacaaatggaacatcaaatggaattgtgcctatgttacgagtctttaatgatactgctcgttatgttgatcagggtggtgggaaaagaaagggtgcatttgctgtatacttggagccttggcatgctgatattttcgagttccttgatctaagaaagaaccatgggaaggaggaaaatcgtgcaagggatcttttctatgcgctatgggttcctgatctattcatgcaaagagtccagagtaatggagaatggtcattgttttgccctaatgaagctccagggttggctgattgctggggtgaggagtttgataatttgtacaagaaatatgagagccaaggcaaggcaaagaaagttgttcctgcacagaccctctggtttgacattttgaaggcacaaatagagactggtacaccttatatgctttacaaggatacttgcaataggaaaagtaaccagcagaatctgggcacaattaaatcgtcaaacttgtgcactgagataattgagtttacaagccctactgaaactgctgtctgcaacctagcatctattgctttacctcgttttgttcgggaaaagggtgttccattagagtcccatccatctaagcttgtgggtagcagtgattcgaaaaatagatattttgattttgagaagctggctgaggttacctcaactgttacttacaatcttaacaaaattatcgatattaattactatcctgttgagacagcaaagagatcaaatatgcgtcacaggccaattggcataggtgttcaaggcctggccgatactttcatattattgggcatgccatttgattcactagaggctcatcagttgaataaggatatatttgaaactatctactatcatgctctgaaatcttctgctgaacttgctgttaaagaaggtccctatgaaacatatgaagggagccctgttagcaagggcattcttcaacctgacatgtggaatgtagtgccatctaccaggtggaattggccatctctaagggagaccatttctaaagctgggataagaaattctcttcttgttgctccaatgcccactgcttccactagtcagattcttggcaacaatgagtgctttgaaccctacacatctaatatttacagtcgacgggttctaagtggggaatttgttgtggttaacaagcatcttcttcatgatttgactgaaatgggcatttggactcctactctgaaaaaccagataatatatgatgatggttctgtccaaaagatagcagaaatcccagatgatctgaaagcaatctacaagactgtttgggagatcaagcagaaaactttagttgatatggcggttgaccgtggatgctatattgaccagagccagagcctcaacgtccacatggagcaagcaaactttgggaagctaacatcacttcacttccatgcttggtccaagggcctgaaaactggaatgtactatctacgcacacgagctgctgctgatgcaatcaagtttaccgtcgataccacacttctaaaggagaatgggaatgggatgaatgatggaaagcccacagaggaagacgtagaagctaaaatggcacaaatggtctgttcttttaacaaccgggaagagtgcctggcgtgtggaagctagattggagctccatctggacactgcaattatttgtgacctcaggccacagcattatatgccgccggctgatgactggagcccaataatcagaacgaaatctgatgtaggatgagacgagcaagccatagaggatccagggcttcagctggttgagact

SEQ ID NO: 31825 - DNA, 763 bp, Zea Mays
cattccttccccaactctctgcaccagcaccttcccatggcgcagggttcccaggcgtccatcctctctcccttcttcccttgtgcaggcgcccccatctcctccccttttctgcagcaagcagcgcccaactgagccccctccactcgcccagccctatctccctcacggcgccctcgctggtgctcgccccccctgctggacgccgctcctcaccctggtggccgagctcttccatggatgtcagccctcatcctcaggttgcccctcccatggcgtttgttcctgcccaaccatggacgtgcccctcccttttgctgctcgccgtggacaggcttggcgccctcatcctcaggttgcccctcccatgacggtcatggtgtcatctgttctcgaaggaaaaatccctaggaatccgaaggtgatgaagtgatgccccagtgcagcgcctggtaggtgtccggtggaacgcctaagccaggactgttgtcgttcttatgaacctggtatcgattgaggtacgctagttgatcacgtgatgcggaattcaagaattgagttgatctcaagatgatgaaatgatgaactactccgacaaacgatgtctgtgaatcaatcctactactatacaggttcttagagaaaacgtttattgtgcaataaatgatggaattatcaaccttattgacaaggtacgctagctgaaaaatcgtgcgaagcgaagggtgtggatcaaaacaacccacaagacaatgtgaggttg

SEQ ID NO: 31826 - DNA, 3582 bp, Zea Mays
ccgccagcggccgaatgtcgcgcaggccaacctcgcgccccatccgcatccgccacatgccacacatgtccaacatcgccagcctcgtccgggagccatgagcaacctcccactccccaccaacacgccttcgcctcacctcgtgatgcccgggacctgcagcagtcgccgcctcccctgagcgtctgagatgcagctccacgctcatctgcgtcccccgccgcaggagccacgttgtgcctgccgccagccccgacacctccagatgttgcctccatccatcctccgagcttaccgcctcgcccccgcccccaaaccctagaccccctacaatcacgaggaaggggagaacggccgaggaggatgctccgcaaggaaggggaggacggtcgaggatgacgttgttgctcgtcgctgagcatcttcgcgccctcagtgctgccaaggagccctctctatccctgatggcgtcccaaccgttggccgatcgtcggcgatgatgacccagcctccctctccacgtccctgctccccaactcatacaggaattcacaagagcaatatggtacaccaatgccacacattggacaaacaacagttgaagttgatcttttgaattatggtgtgatagaaggtgatgaatcatgtaaacatttctctgaactaaaagtcttacatccatggatgatcaaagatggcatgaatcttacaaaggaacagagattagagaaaattgagtcacaaaaacttgaaaaatatgaagccaaaggtgacaagagacatgacttgaaagatgatcaaagtgtacaggaagaatacataaatgcatattatgaggccttgaggaaaagttggaagaggaagaagcaaaaagcagaatgcagcatgaaggcaagatttttgtccctgatgctcaaagggaacgccaagttgacaataaatacaagcaggatgatgatgaagaaggcattgaataagtattccagctttcttatatggacagtaggaacccaaggtttgctgtgtaatccattatcaacagttgcactcacattagccttgtggcgattcttttcaaaacaggatgatttaaacccatatgttgttccaatggctatgggcatttaacgtcaactagagagtcccttggatatgactacaagtactatcatcaggaggattgttgctaaccatgaagcttacctgtgtattgtcagctttcaaactcgatgaaccaactgagaaagtactgcttatgaagctagagaagcatggaaggagtgttgctgaatcaaaggcaaaagaagaagctggaagagttttgatttgcatgaaggatagctgttgaagacgcttctaaagcactagagtattgtagcactgatggaaggccttcgatgaaatgtttccctgaaagttgcatactacatcgctgaagcactacaatattgtaacactgagggaaggcctttgtatcatgacctaaattcatatagggccctctttgatgaggtaattgttgctttggttttcacttttccttacaaccttcgaattatgtggctatgtctgaaaacttaatacttctacagttctcgggtcttcataccattccaatttgtgttagctaataaacaagtcaggctatgtctgaaaccagtatctaatagttctccgcccaacaaggaactgtgcaacataaaaacaaatcttaaacaagttacatgttctgaattttagaaactcaaactccactctaagggctaaccggctaaccgaacatgttatagaacaaactcagtcctaaattgtagacatattggaattctgcgtatgttttttccaacctatcttcaaactatacaagaattattatctaatataaacaatacattgacaataatgtacacaaaaatccatgtatttaatgtgtggacatggtatcatcatgtctgactaacccttttttactttcattgaatgaagttcgtacatgtatttgaggtattttttattttcttcctactataagccttgcttagatactgatctaagatcatctccaagggacagacaaaaaatcctagaggttctcacataagtacggtttagagaagggataaaccgaggaaagcctcccccacaaatacagaaaggctgcctcgaacctatgatttggtgactcagtgaaacaaacaactctcactactgcactaggcctgccattgtttacgagcatccccaagggccttacttaaattcactctctaaattttaatttggtgagccattttaataaaaatatgtttgataggttttttatcttctaacaatttttatgtatcttgtacgcactctagagaaccaacccactcactgctctttatttactgcatgctatttaggtctgctaagcaaaaaatgatattctttctcaatcttttgtcatgtttagataaatttggtggttttaggataaagtttgtgaagggcttcactttttttttctataattagaatttaactcaaaagttttcccttgaaattcaagttgattttgagaagtatgaagggatgattaaggtcatggagaaggtggtaatacagttaattctatggagctcactggaggagcactaccttttgccagttgcttgcaagaatgtaattggaatccgatgtgcttcatggcgcatcgtatcctccattgagtatagggaataaggttgtgtcaacatggaccgtgccactctcatcgagggctaccataacaagattgaagttgaactcaacaagatctgcgttggaatcctcaagctctttgcttcccaccttcccccctcattaatagttccaaagtccaaggtcttctacctcaagatgaagggtgattactacaggatattgctttggaggagttggcccccttatcctattaggctttggctgatgcttaacctctcaactctcctgatcttgctcgtggtctccccaaacagattgacacggtgggaggaaaaagacaatggtcagcaacttactcggagcagaaattttttaattgtggtacccgtggtgctgtaagtttcatctcatcctcttgtagttcacacttgaacaaagtactctttagattctatacaggcagcgattgcttgtgcaattatattccacttcattcctaattaacaatttgggtcttatgattgacgactttgactttatcaccataaataaacctgacacacgaattatatctggattctggaacaggttcaataagagagcatcatagtgttgcataaataagtgtgcttatgattcatatttgctcattgcaaattggagttatttgtgttgtttctttgtatactcaacaaagagatgttaaccacttgtgtttatctcattgccacactcagttatgtcacgtaacttcattttcatgttttattttgttccagcaatgtagtttatctttgttttaatagctctttctttgtaaaacaacattttgttgtggttattatgcggataagagaacctaaaactacaacactgatgtttgtgtgacataagaga

SEQ ID NO: 31827 - DNA, 2251 bp, Zea Mays
caggcttggctgcttcagtgcgcctgcggccacggagcacgcgcgacactagcctacctagagaagcagcagggacggagaaaactgcagctgcagcaggccacgaggagcactacggcctcaacgtttccagccttttgacccttgcgagagaggcggctgcgcgtcgaggcgaagtggactgcgcgcggcctgcagccatcaggaccaggagcacgcacagagagagagagagtgacagcatacagcgggccgcagaaacatgccatgccgcgaccgcgacggcagccaggtagaagatgccaatcttgaggcttctgctttcccatcatgcatcatcgatttcaatccctgcttcccgtcatgcatcatcgactcaatccgaattccaggggatccattttgaatagtaaggaggggatgcgtggtcaaaatcttcgtgaacgctaaatcttgaagatcatctgttccaagttcggagaagcgacccatttcggcgacgccatggacggggatgattgtcgcaggcaggctgttgccgcggtcagccgtccccgacgctgcctttgactacaccgttgcttgctccaggctgcatgccgacgcctcccctctcagattttgattcgacggaacgagacacatggcgaaaagcggcagagcagccacgggattggacgtcgtcccagcaggcttcgagagccgtgagcacgggcaaaccaacggtggagatcattctctcactgcgactgcgagtcctctgctctctctctctctctccctcccttggatctctctacaaataccactccacctcgctttcgcaatacacaaacacaacacaagtgtgtttcgtttccgtccagcaggaagctagcctcggcgtccgacatggccggcgagaagacggcgtcgtccggcgccaccgatctggtggatcccgcgacggcgacggctacggcgcagaagaagccgcgggggcggccgctggggtccaagaacaagccgaagccgccggtggtggtgacgcgggagagcgaggcggcgatgcggcccgtggtgctggagctggcggcggggtgcgacgtggtgggcgcggtggcggcgttcgcgcgccgccgccgcgtgggcgtgtccgtgctctgcgggcgcggcgccgtcgccgccgtcacgctgcgcctggccgcgtcctccgccgcggtcacgctgcacgggcggttcgaggtgctggcgctgtccgggaccgtggtgccgtcgtcgtcgtcggcgtcggcgtccgcgccggcgttctcggtgtcgctggccggggagggcgggcaggtgatcggcgggaccctggcgggggagatgactgccgcggatggggtggtcgtggtggccgccgtgttcgggagcgcccaggtgcaccggctgcccgccgctggcgcggaggacgaggacagcggcggtggaagggaggagggaatgcgcgcgcaggtggccgtgggactgggtggcactggcaccggcggcggcctcgtggtcgtggggcggcagcacgcgcagcagctgccagaggtgggtctgtggggccagcagccgacgcccgctcacgttcgcggaccggtccacgctctgccccgtttctagaggcagttggcagctgcatggcgtccttgtgcttggcgcgtgacgctcttttgcccggacacggagacggctccctccgtttttggtggcggtgccttcagactgtcttcagcggttccccctaaatttgtccccctatttcccactcacgtgccacgtcagcaatctctctccccctatatctccacgctctacagcggttccccctataacaatcctctataccccaccacaccaatattatatactttcctcatcaactaactcaactaccatgaaatcttaaaattatttttattaattatttgcatagtacacggggcattttcggtctacatgtaattagcgaacttaataattgctattaatacgttagttttaatacgttacgattttatggtttttagaaatacaaattctcattcttccagtacacgacaccagtggcttccacgacacgactggcttataccggaagccacgaccgtctggcttccttcacacacatagggcacctataaataaggttttcggatgcatcgtccgttgttcctacgtatccttcgtgccgttcagcgagaagacgaatacttcactattcgttgtgatgcaacaggtttag

SEQ ID NO: 31828 - DNA, 562 bp, Zea Mays
ttccgctgttactcgcgctttgtcgttctgtcgtacgggcacagctgcccgctgtccaatcgccgcttcgtattgtgtatagacggcggggcgctgggctggcgcctggccgacacgggagcaggtgtcaacggcttgatgcaggggctccatccagagcccgcttggaccacaaaggttatttgatggccctcggtacaaaagaacgatatggaggcagactttcaggttgctcttaccattacatttgcgccactgacatcttcagttaaaacaagtatctgaactgcattttccatggtggaggtatgagcctataaggcattgttgaggtctcaagtgtccgtgccggagggcaaagggtgataaaaagatggaacggtgtccagcatcacagcatggcagcatccttctcaactccatgacagccggtgagagaatcctgtcctcatcggtctgggcagacattcgacggtgagctgatgatgtaggttgaacaaccaaggttccttcaattcggagtcaaacagcactgaaagaactcccctagccaagcatgaag

SEQ ID NO: 31829 - DNA, 3558 bp, Zea Mays
gtgaaaattgtgttttcggtatttgaaacctaggggatatcatgactatcgcaaccggccaacaggaaatttcagccgggcatccccaattcatcttccccacgccgcgtccgcgtccggaccggacaccggcggcacctcctcctgcctccacttcaccagttcatcgggcgccggaagtgggagccatccgccgccgccacatatctgtcctcttcggcgctgactggggctcagccgctcgaagctccatcccgcctcccgtcttcgccgccgctcgtcagatccctcgacgcgacggtcgtgtcttgactctccaccacgcgactccacccagctcttctccacgcgactgcagagcgacgatcggaggcgccgccatcgcacaatccaccgtcgctgcctgctcctgtgatactctcacaagatccgctgctacatccatttcttcttcttccacgttgctgggaggagacgggcgcaaggatttgtgcgagggagaaagaaagggaaggaaaggggataggacgggaggaggagcacgactgcttaccacttattcttcccagcccgctcttcaatatgaaaaccaaaaattggtgcaacaactggaggtacagaagtccgaaatgcatgcattggagcgcaagttcaaggagcttagtgatgatcaatgttcttatgacaagactctgatttctttgaataaactgtggaatcagctgattgatgatttggttctgcttggagtacgggctggtggggatttggataatttgcaagcacttgaccatgaagagttatcagaagaatctttggagtcgtgtccttccgaggagatatttctcttaaggctcttgaagacaaacaacatcagagataatagtgacactagcttgttgaaatttgttgaagaagctcttgcttttcggtcttcagcaactgttactttgatgaagtccctgcaagagactatttcttcgcagcaagctagaagtgagtctttgtctttagctttgaatggacaaaagtcaaatgaagatgttattgttgcccttcgaaatcataatgattgcttgaaagaggtggcagagaatgcgagtcaagccatctctattatcaacgagaagcacaaaaggtatcttgatgagattgaggcttttaaaagcaaccattcaagggagctacaggaaatcaagcgtatttcaggtgagctagaggaaagcattgcagagcttgaggaaagtcaaaggaagttggttgtgctccagttgcagaggcatggttctgtaatggatgcatctggggcaaatgctgtgaatggtggtatttctactcataaatcttcagataaaagtatgagctggcaagacctcaaagatgctgttgacgcagctaagaccctcgcaggaaaccgtctattagaactccatcagactcaagaggataatctgatactatccaaggagctgggagatcttgaggggcaattgaaagatgagaagtatgtcttggtatccaaaccgtacatgattcttaatgataaactacaacatttgaatgctgagatagagcgttatagagggttggttgaagttttacagaatgacaaggaccagctcatgcaaagggagaaagaaatttctgcaaaagcagaatcgctcgacagtgttaaacaaaccattatcacatatgagaaaaaaattgaagaactggaaactcaaattcagatactcttttctgaaaagaatgatctcgaaaccaaggttgaggagactttgcaagattcaggtaagaaagacttcaagaatgagattcatgttatggctgcagcactctccaatgaactgggtatgatggagaatcagttgagtcgatcaaaggatgcagcttctgaagcacttgcattgcgtgagcaagctgaatcattaagatcattggtagctaaaaagattgaggaacacaagaagatttcggataaatacaactcacaagtaattgagatcaagtccctcaaggcattggttgaggagttggagcaggaaaagcaggagctggagtttattgcagatatgtacgtgaaagaaagttctgagtctaggacaattgctgatattgaagaatcagaaacccgagctcgcaatcaggctgaatatttgaggagcaatctagaggagcatagtcttgagcttcgggttaaagcagcaaatgaagctgaagctgcatgccagcaaaggctttcctttgctgaagtggaactagaagagttaaggaccaaagtagatgcatctgaaagagatgttgtggaacttaaggaggcaataagaattaaagaggctgaaggagacgcctatatttctgatatcgagacagttggtcaagcatatgaagacatgcaaacgcaaaatcagcatcttcttcaacagcttactgatagagatgactttaacataaagctagtatcagatagtgtgaagatgaaacaagcttgtagttcccttctctctgacaagcttatgctagagaagcaactccagcaagttaacacttcactggagtcatctaaactgaaaattgcccgtggcgaagagcagatgaagacttgtgtagcgcaagctataaaaacttcagctgaaaacagacatcttactattagcctggaaaggattgcgctggagttatccaacacagataaggaactcaagtggcttcggtcctccgttggatcctctgagaaagaatacgagcaaactcagcaaaagatatctgagctgagagcgttactggagcacgagaggagtgagaggcggcggcttgaagaacaatatgaagaggtgaaaaatgaagttatggagctgacctctgagactgaagagactactgtccggaaacttgaggatgaaataaaagaatgcaagggtattctcaagtgtggtgtatgctttgaccggcctaaagaggttgtgatcaccaaatgtttccacctattctgctcgctatgcatccagagaaacctcgagattcgccaccgaaaatgtcctggctgtggaaccccattcggacaaaacgacgttagggaggtgaagatatgaacctcaccaaagtgacagtgacaaaaccgacttgcgtgtgaacagcagcaacaaactcccttgtgaatatcgtctgttatgttggcgaacatctagatctaacttgctttattactgggattaaaattaggataagaactggaagaagtgaagttcctaatttatttgctatcgtgtgtgctatgtatgattacccttggcagcgagtggtgtatctgctgggtgtcaatatgctcgaattctagctcctccctgctagcgggtgcatgccagttttattaaggctattccatgtacatggtgtcacactctttaatacataccacataggatgaaaatctgatgtgacatgtgattgaaacatagggagacaccactcatgcaccagattatagacattgaaatctgaaccatctaaatgaactgtaactcatactcttatatatatctaacattttgtcttgtg

SEQ ID NO: 31830 - DNA, 2582 bp, Zea Mays
gcgttgtccagccgttcacattgtggggaaacgtacggccattcccgttccccgccgcccctcgcctccgctgcacgcgatcgacgatccacagccaccacctctgcgttccccaccggagcatcttcaccaatcaccactgggctggctcccgcgttccccactggatttctgcacccagcgcttcttctgaaatttagaaggcggtggaaccgtcaaatcaaatggagggatcctcttacgcgtcaaggagctacagcgaactagctgccgcagcttccggaggtggaaggacgctgagggtaataccgctgcggcatccgctgggttctctgtcgacgtcttccacgtcgccgtggtggcgggcggtggtgggaagggctcggggcatggggccgcttgattgggcggaggcggccttgccgtgtgtggcgtggacacggaactacagatggaagcaggacctccaggccgacctcgcctcgggcatcaccgttggagtcatgcttgtgccccaggcaatgtcatatgcaaagctggctgggctgcacccaatttatgggctctacacaggctttgtcccgttatttatatatgcaatatttggctcgtcacgacaactagcaaattagccatattactggcattcatggttgggatattggagtgcttgatgggactgctaaggcttggttggctcattcgtttcattagccattctgtaatatctgggttcactacagcttcagccattgttattggtttatcccagataaagtatttcttaggttacaacgtcacaagaagcagcaaaattataccactaattgagagcataattgcaggagctgatgagttctcctggcctccgtttgtgatgggatcaatttttcttgcgattcttctaattatgaaaaatacaggaaaatccaataaaagattgcattttctaagagtttctggtcctcttacggctgttgtgcttggaacaatttttgtgaaaatctttcatccaccagccatatcagtggttggtgaaataccacagggtcttcccaggttctccattcctcaaggatttgagcatctaatgtcacttgtgccaactgctgtactaatcactggtgttgctattttggaatctgttggtattgctaaagctttggcagcgaagaatgggtatgagttggactctaacaaagagttatttggtctgggaatagcaaatatctgtggttcattcttctctgcatatcctgccacaggctccttttctaggtcagcagtgaatcatgaaagtggggcaaaaactgggttatctggaatcataatgggcataatcattggtggtgctctcttatttatgaccccattatttactgatataccccagtgtgcattggctgcaattgtgatttctgctgttactggcctggtagattatgaagaggccatcttcttgtgggctattgataagaaagatttctttttatgggcaatcacatttatcacaacattagtttttggcattgagattggcgtccttgttggggttgcattctcattggcctttgtgattcatgagtcagcaaatccacatatagctgtcttgggccgtttacctggcactactgtgtacaggaatacattgcagtaccctgaggcttatacgtataatgggatagtagtggttcgaattgatgcaccgatctactttgccaacattagctacatcaaagacaggttgcgtgagtatgagctcaatcttccaagttcaaacaagggacttgatgttggaagggtgtattttgtgatcctcgagatgtcccctgttacatatattgattcgagtgctgttcaagctcttaaagacttgcaccaagaatacaaagcacgccatattcagattgccatagctaacccgaaccggcaagtgtaccttctgttgtcaagatcgggcatcattgacttggtaggagctgggtggtgctttgtgcgagtgcatgacgccgtgcaagtgtgcctacagcacgtgcagaattcatcttcaaatgcgttgaagctacccgtgcaggcatcaggcgtgttgaccgattctgtttcgactcctaaaccagagcagcagcatcaaaagcagcacggcctcttcaaggacctatggaaggcacaggacagtaacgcggatgctggtggtgaggtgcagccactgctccggcaaaaccttgtgtaatactcctacaaaatacggagtacttcctgggatggactcacgccctcgctggcctatacatatacgtgtttatttatttgtctatgttgttgttaacatggtatcgtggtgaacaaaagaaactgaacatgccattgttactgtggtgtggcgttttttgtacacttttgatacctaaatggaactcctatgatttgggtctggaaagggtgtgtgaagatgttttgttccaggttttggagttccgctcccagattggcttgacaagcatgttaattccatgaactctcttccacaaaaacagtacagctgattatcagttttatgtttagaatgagaaaatagccctggc

SEQ ID NO: 31831 - DNA, 749 bp, Zea Mays
atgtggctgaattcacaagattgcaatagagaacagtgttcatgcagtgtcctgccaaaaaaaaagcgtttggttctgtacaactttgcaagatgcgtccatgagaataattactcagtactcactaaggttagcatgcatgaggcggtggaagtggtgcatggccatctccacagacggagcgtatcttccaacactgtaggccggcgattccaggccacgctgaaccccctcacacagtgcaatgtcttctatctgtacttgctcactgtcttcgaggcttttcttgataaagcactggtcatcctgcaagttcaatatgggaaaattaactgaataattttttaggtggattctttgacagtccatgcggatacactggcaaagtacgtaagtttgtgcagacaaataattgaccaaaacattaagattttctaacactgacttttactagttcacaacttgaaactaccctaccaaatcacagagtcaaaggatgctgctagtttcatcaaggacaagcaagatctgtttgtaataaaaaagatgcttgtcttggcaatttaagctactatcatgacacaccacccaagattcataaaatacagcatatggttgcattgatattatatgcagtgcacatgatatgcattgcaggatcagaaattggtaaagaaggttaagaaaatggactctaccagcagagacttgtcaagaaaataatcaaataccaccttgcatctggttga

SEQ ID NO: 31832 - DNA, 241 bp, Zea Mays
caacgttctcacaagtattgagtcacatttgatgctggtacgtgaattaactacgtgatgcggagaaccagaactaagttgacctcaagatggtgcaaggagtggtcttgtttgtacaacgatgtcgtcagtcggaccaaccgaaagggcagacggaacaagtgtcagaacaaaggctgatcgccaagtggtcgccacctaacaaacactaacctagtgttacccaggcaagccccggtgc

SEQ ID NO: 31833 - DNA, 626 bp, Zea Mays
ggcagtacacctgagcgtgctaaagggagtgctgcttgcagtaggccattgccaatttgacatagggcagcattacagtgaatgtatggaggttacatacagtacatttaggcacgtggtcatcaccgtgcaaacgcacttacccgcagctgagagatggagcatcccatggacaccgaagagactaaaaatgaagcacggggtcatcacctccagcctaagccagaggttcccctgccaggagtggccgagtcagtggggcacgctccagcctcgtacaaccattgcccacagaggccaacaacgcctcaggcgagaccctggggcgccgaattgggcctaaaaaaggcgtgtgaaggaggatgacacgtacctcaccggcgcgcggacctagggttagggtttgggtagaggagggcgagcagccgcggaggtgtgcagacgggtcgcaggggcactggggaagtcttccggaggattgtgcagcggagaaccgcgaggtggacgccggaggtgggcgtggcaacggtggggttgggctgggcgcggaggcgggaaggtgcgcgtggagagggaagcaattcacaggcctgcgcgctgttgtccggggcgggtgcgggggccgg

SEQ ID NO: 31834 - DNA, 2507 bp, Zea Mays
acgaaacgagatctatccaggagagagacaactaggacacacacaaactgcaataggagagagaagctgtagagagagaaacaacaaggagagagggggaacataaccacggccggagatgccaaaaatagatcttcccggcctaggcaagaaatcaaaatcctcagccaacaatccgtcgcatttgcgccccctgtacggcgaatccgccatgaggagggcgaggattctcctcctccccctcctgctcctcctcgccgtcgccggccccgccgccgcggcgacggccatgaccgcggacgcgggcatcatcttggacctcgccaagtcgctgactaacccgccgccgtcctggaccggcaccgacgtctgcggcggcgtctccttcagcggcatcacctgcgacggcgccggccgcgtcaccggcatcaacctcgtcaagctgcatttatccggcaccctttcctcgtccctcgccaacctcacctccctccagtcgctgcagctccaaggtaatgtgctggagggcgacgtgccctcactggcccgaatgggttccctcgagaccctcgttctcgacggcaacgccttctccgccctgccgccggacttcctcgagggtctcccctcgctgctcaaactcagcatggacaacctccctctcaatccatggagtatccccgacgccatcgcggggtgcgccatgctgcagaccttctcggcttccaacgcctctgtctctggttccttaccggcggttcttgccaacctgacatcgctacagacgctgcggctgtcgtacaataacctcaccggggtcctgccggtggggttagaggcgttgggtgcgctggagacactgcagctaaacaaccagaagtcggatggcaagctgtcagggccaattgacgtcgtggcgaagttgccgagcttgaagacactgtggcttcagtccaacttgttcaccggcccgatcccagagtttgacccaaactcacagctggagatcttcaatgtcagggacaacaagctcaccggaccggtgccaccctctctttcagggatcgcaagccttcaggatgtgtcgctgtccaataattttcttcaagggcccaaaccaaactttacagctaagactgtggatttgaaatcagggaacgggttctgtcgagaagactctgggccatgcgatccgctggtgaccactctgcttgaggtggctttaggttttggatacccattgcagcttgcgaagtgggcaggaaacaacccgtgcgatccatggcctggtatttcctgcatcaaaatggatgtgactcaaatcaaattgcctcgccagaacttgtcgggaattatttcaccggcttttgcaagcctgaataggcttcaacggttggatctgtctaacaatcaactcaccggggtgataccagatgctttgacgacactggaaaccctcaaatatcttgatgtctcaaataatcgccttactggacaagtgcctgagtttaagcagccgaatataaagttgatgactgcaggcaaccggtttggggaatcaggtggtgatagtggagggggtggctccaatgatgggtcctcatcttcaaatcctacaggttcacataactcaaagtcaaatgtgggaatgatcattggaattcttctatctgtcattcttcttgtcatttgcattgggcttttcctacatcatcgaaggaaaaagaatgtggacaagttcagtcctgtcccaacaaagagcccttctggtgaatcggagatgatgaagattcagatagttgggacaaatgggcatagcagcataagtggttctgtcccaaccgagctttacagtcattcaagtgttgacagcacaaacattgctgacctcttcgagtcccatgggatgcagttaccgatgagtgtgctactaaaggccacaaacaactttgatgaggactacatcttaggtagagggggctttggggtggtttataaggggacactcaatggcaagctcgttgctgtgaagaggtgcgacagtggcactatgggaactaaagggctgcaagaattcatggctgagattgacgttcttaggaaggtgagacatcgacacttggttgcattgcttgggtactgcacccatggcaatgagaggctcttggtctatgaatatatgtcgggaggaacactgcgcgagcacttgtgtgatcttcagcagagtggttatactcctcttacatggacacaaaggatgacaatagctttggatgttgcccgggggatagaatatttgcatggtttggcgcaggagactttcatccatagggatctgaagccttccaacatattgttggatcaagacttaagagccaaggtttcggactttggattggtcaagcttgcgaaagatacagataagtccatgatgacaagagtagcaggaacatttgggtaccttgcacctgaatatgccagttgtatatgaaaagcagaaacgagaa

SEQ ID NO: 31835 - DNA, 878 bp, Zea Mays
cccggttagtcaacgccaacaactgctccgaccaggcgaccaccaccactcgcatacggtcctcgactcctcgttcttggtaccgaaacccctttttgtctgctctgaattattggtcggaaaagtcagcaaaacgccagagagagactagccccagtcgctttctttcgaaaaacaaaatacgtggccgatgaaagagaaactcatcccgtcatccagctcgaaattccgcggggcgatagagcgaatttgcaaaggccgggaatggaccggggtttttttttttgtagatataaaaaaaagagggtgaaatttcgcggggactgcaagtgcaactgcaagaacatgggacgcacggccctttttccagatgtacttaataaagcatttaagatgactcgtcctcgatcgacacggcacgtgcagttgcttttctctccgtcttgaaacgaaaacgcatctgtggccgtaaaaccatcgaattctccgtgctctcccgtggggagcgcgcaaaaccccaaccccggaggagaagcagacaggaggagcgagccgtacctgggggttggccgggcagcacgaatttgcgggtgtccgccatggcgcctccccgatcaagacagagaagcaaacactcctcctcctccccgtttgccgaagcggtcgctcgcgtggcggccggtcggtcggaggcgggcgcgcttaaaacggggcggagggagcgagggggcgccgaagcttcggggaagggaggaggaacggagcgggagagcggggcgccgtcgcgctgggaaaatttattggcgggacggagggagagagagggtgggggtgggggtgatgtctgagtctgacgtgacgacgaggcgagagggcgg

SEQ ID NO: 31836 - DNA, 2784 bp, Zea Mays
agacaaccaaacgaacccgcccggagcagcaaagcataggcgctcgagcgctccctcctgagctcctccgcctcacggtcacgcctcgtgtccccccaccccctcctcgtcctccaccggccgcctcacgccgtcacctccgctcggcgagtctcggctccgaccccagccgccacgtgcgacctcccctactcctgactcctgagagatctgcggggctcggcatggggtgaccagatcgggccgctgctcggtgctttccagctgaattctgcccgcagctcgtgtcggaggcagcggagatggcggaggccggcgtggcacgcggctcagggagtgctggcgatgctttgttcagggaactctggcatgcttgtgctgggccgttggtcacagtgcctcgccaaggcgagctggtttattacttcccgcagggtcatatggaacagcttgaagcgtctacagatcaacaacttgatcagcacttgcctttgtttaatctaccgcacaagatcctctgcaaggtggtcaatgtagaacttagagctgaaactgattctgatgaagtttatgctcaaattatgctgcaaccacaaacagagcaaagtgagcccaccagcccagatcctgaaccacctgagcctgaaagatgcaacattcattccttctgcaagaccttgactgcttcagatacaagtacccatggtggattctctgtcctcaggaggcatgctgaagaatgtttgccccaactggacatgactcagaatccaccgtggcaagaactagtggctaaagatctccatggaaatgaatggcatttccgtcacatctttcgagggcaaccaaggaggcatctacttacaacaggctggagtgtttttgttagctcaaaaagattggttgcgggtgacgcgtttatcttcttgagaggtgagaacggagagctgcgagtcggggtaaggaggctcatgagacaactaaataacatgccgtcttcggttatctcaagccacagcatgcatcttggagtcctagcaactgcatctcatgccatctccactggaactctcttttctgttttctacaaacccagaacaagtagatctgaatttgtcgttagtgtaaacaagtacctcgaagctaagaatcacaagatgtctgttggtatgaggtttaaaatgagatttgagggtgatgaatcccctgaaagaagattcagtgggacaattattggtatgggatgcatgccagctaactcaacatctccatgggctaactctgaatggagatcattgaaggtccaatgggacgagccttccgctattctgcgtccagatagagtttcaccatgggaagtagaaccccttgatcgaacaaatccacagccacctcaacctcctttacggaataagcgagcacggcctcctgcttcaccttcgattgctccagaacttgctccagtttttggactgcagcgaactcaggagctataccattcaagccccagttcaatgttctcatcgtcgttgaatgtgggattcaatccaaagtacgagggtcccactccaaacaccaaccatttgtactggacaatgagagagacaagaactgaatcctactccgctagtatcaacaaagctccaactgaaaagaagcaagaatccactacttctggctgcagattgttcggtatcgagataggttcttctgcagtgtcacccgtggttactgttgctagcgtcgggcatgatcctccgccacctgctctctcagtagacgctgaatctgaccagctgtcacagccgtcccatgccaacaaagcaacggatgccccagcggcaagcagcgatcgctctcctaacgagacagagagccggcaagccaggagctgcaccaaggtaatcatgcaaggggtggcggttggccgggcggtggacttgacgaggctagatgggtacgatgacctccgccgcaagttggaggagatgttcgatatcccgggagagctttccgccagcctcaagaaatggaaggtgatctacacagatgacgaggacgatatgatgctggtcggggacgatccatggagtgaattttgcaggatggtaaaaaggatatacatttattcctacgaggaggccaagtctttgactcccaaggcgaagctgccggccatcggtggtgacaccggcgtcaagccggacccaagcaaactgccaccagaatccgacgtgccacagagcgactccgacaacagtgctcccgttgctgctgataaggactgatggacgctagctcggccgtaccttccctttggatgttggccatgggaggcaagtgcagtgcccatgctccttgagactgctaagagttgatcatctgttccatctgcctcggcttggaccagcgaggatggccgggagggagtgcatgacgttctgtgcgtgtttcgtttgccgtgtttggtaggagccatggcttgttgccggctacttcggttctgtagactgttacactgactgctgccgtctcacctggccgtcggcgcgggccgccccctctcacctctctagtaatatatactagggcttatgtacacagctgttttggtagtggcatatgtatatcgtcggtcatgttgcttgcgacatttagcatcctccgtagctgctatttcctctcctgcattttaatcctgtcttggtatcagatgctctggcgcaatatgtgttccagcgacatgcccttttcggcgcgtgcttcccttttcggttgtggaac

SEQ ID NO: 31837 - DNA, 3197 bp, Zea Mays
cgggtcacatcaaacgtttgacttttaaataggagtatgaaatatagacccaaccaactgaactagattcgtctcgtcttttaattttcggctgacaaattagttttataatccgactacatttaatacccggaacggaggttcaaacattcgatgggacatggctaaattttagcgggttgtgcgatacggcccaagtgtggttcagcaacgccgaagaaaaatcagacaagaagcccctccggccctcgccctccctagtccctattcgccgcgcccgcgcccgcgccgtctcgaggtccgccggtctccttccgccgcaagctttgctccattccaccgccgcctcttccgcctccgtcggcaaaatgccggtctacagcatccgcggcgtcaacgtcgacttccccttcgacgcctacgactgccagatcacctacatggaccgcgtcatcgagtccctgcaacaggggaagaacgcgctgctggagagtcctacgggtacggggaagacactgtgcctgctgtgtgcgtcgctcgcgtggcgccgcactttcggcgagttcctgcgggtcgggcgtgggggcggtgggactaagcagttgccctacgggagtcagccgtccgctagccagcagtcagaggactctacgtctcagaagcagcagcagtcgcggtacccagtcatcatctacgcctcacggacccacagccagcttcggcaggttatcaaggagctcaaggctaccagctacaggccgaagatggcagtgctaggttcccgtgagcagatgtgcatccacgacgaagtgagcaaactccatggaagagcacagaacaatgcctgtcacttcctctgcaagaaacgacggtgccctcataataaccatgttgctgagttcataaaaaacaaacctgagcttgggaatgagccttttgatatagaagatttgataaatattgggaggcataagggcccgtgcccatattacatctcccgggaactttcaaagtcggttgatattttgtttgccccttacaactatcttattgatccgggaaaccgtcgttccctaaatggcataccatgggacaatgcagtacttatatttgacgaagcacacaacttggagagtatatgtgcagatgcagcctcttttgatttatttccgaataacctcacagcttgcatagcggaagctcatgaatgcatcaaactgtgttcagcaaagaggtccattgaaaattctgctgataaacaatttgatcctgaaaactatgcaatcctcaaagctcttttaatggcacttgagaaaaaaattgctgagctgttaattggatccgagttgggctacacaaaagctgggagttacatatacgattttctctctgaactgaacattacatcagacacatccaaaaaactgattgagacaattgattgtgcttctttgctactagaggaaggaaattctgctcaaactgggccaggggtccaggcaaaggctgcagtgtctagattggagtcaattagggacatgttagacataatttttaggggtggtggtcaaaaccatgcaaaatattatcgatttcatgtgaacgaatctcaacaaacacatggagatgcattgaaatttttgggtaagtcttcaaggacccttagttggtggtgtttcaacccggggctggcgatggaagaatttctcaagttgggtgtgcgctctatcatattaacctcaggcaccttgtctccgttggattcactagccatggaactaaacctgttagtgagggtcttgattttgctgatcgtgctgggagggcagtaatagttactggaatgccctttgctactccaactgatgccaaggttcggctcaagcgcgagtatttggataagcaggggacaccatctaataaaaacacaaagatgttgacaggagaagaatggtatgtgcaacaagcagcacgggctgtcaatcaggctgttggacgtgttatcagacatcgccatgactatggagctattatttattgtgatgaaaggtttgtgtggccaaattatcaatctcagatgtcatattggctccgacctcatataaagtgctactcaaagtatggggaagtagtccaaggattgacccgattttttcgagataaagcttcttcagatcctttgacactagagccaacagattgtaataattgtatagcaccaccagcaaacaaacacatgcttaaagagaagctatcagatttggctgccagtgcacaagatgagtgcccacaaatcacattatcaggaaattcaaccatgagaagaagtaacttcatgaagttggctcagatcactcctgctaatcgttcaacccttactacaaaacacaactttgtgtctacatctacgaagcacaacctcccagaagaccagctgtcacaggataccaatgttgatattactgttgacttggcaatacaagggcatttgaaggaacataccttcaagtctttagggcttaagaaagctaaaacaatggacagatccaaagatgctgttgttttagatgacgtctcttcaaaattgcctcaaaatatagggtcaagagctttggccagataccaatgtggtggacctacacctgaatcaaagaaaagcactatagcaacagcatgcggaaagaatgatggggcctgtgaaaaaactgaaggccaggaatctaactcagggccagccttcttgaagctggttcaagaaaagcttagtcctgcagagtacacagagtttgttgaatacatgaaggccttaaaattgaaaactatgcataccaaggactcacttgaagcaataactaagcttttttcgtccccaggaagacttccacttcttgaagggttcagggtttttgttgcaaagaaccatcttccattatatgagcagcttgttcgaagacacaataatgtttctagtacatgacaaccacttctgctatgttcgcaggcatattcagtttttttgtttgtgccatgtatttcattaagtgataagtacagttttggttgttttcaacacttaactgtttatcaacggaacattagcagattcttgggtgcatgcaattacttttggaatgtgttatggtgcttctgtaatctaaggaaaagaaatggacctgaaaaaaaaaactctatttaag

SEQ ID NO: 31838 - DNA, 1178 bp, Zea Mays
gttcgcacgatgaatagtaaccagatgaacaatagccgcgatgaacagtgtgcgatgggggaagcacgagcaagataattgcctgcttgatttcttccttaaccaaaggggtacaatatataggttgccaaatctcagagcaagcaaaacttcattgaaggtacaggtttctctgaaaacagaaaaaatacttagcgtctttccatgccatttcatgcctgtgttgtattcatgttgacatgcttccacatatggggagtttattgcacagggtacattagccatttcatgtgtgacatattttattattgtttacattgtgtgtctgttaaactagtgattctgctttctcccctcctaccgaggtctattgaaatctacataatcttgccttttcagatgtatggatacaagattatgcaaaacatagatgagtagctagtcaaatcatcaaaactgaataatttgtaatttcgactggacttggatgtggtgtttacatgcaggggagaaacatgtcatatttaactcagaagggagcctggataagtttaacaagcccgggaaactctacacacaactggtgtcagctcagctcaagatccaagacatcaaatcacaaagatcagcgcttcttttagaaatcagcagaatcaagcagattctggagcaagagaaaaacataattcctggttttcccgctgcactacagcagatggatatgaagtcattggaggaggaatacaaagctctgcaaggtgataaatcgggggaagttgagtacttccagtctcttgatgaaacaattaatgggatgaaggggattttggatcctgtcaaatgccaatgtggactggagtacaacttaaaacttgatggtgaagccatggatataagctaagcaagaacgaccacatacgcagatgcccatctccaccagatttcgtgcattttagatctgtacagtgtgagagatggattattctttggaaggtacagaatcttctcgcatgtatacgggtggatgctttgggcagagcttgacagcgtcatcgcgaataatatagaattctgatgttagaactatctggagcttgaacggactatacggccatagttttgttcaataattgtttttccttacgctcaaccgcttgtccagattgcagacataaaag

SEQ ID NO: 31839 - DNA, 2852 bp, Zea Mays
tctgtcccgagacattgatttgggaatatgtgaagggcatatcgtcgacagggatgcaatctaattgtggttttgaagggcaaatcaatgcatgttggactcacaacatgactactaaggagctagatacaatacgatctgccggctttctagtttcagttattcatggaaggttagttttgttaacagtggataatcttgttcagagaatggtgcacatgcatttcatgtggcttacattacaaaattcaggtacgatatcattgcgcaattgtgccatgcaaaacgtctagcagaaagccttcttcctgttgcaagaatggtagaacttcatggtgcacatctagtgagccatgaaagaccagacgaggtgaacaatgcacttatggatctgataaaggccaccggatctgcgatgaaacctgaagagtggtcagcccagcctgagaacacatcggagaccggggcactcatttccgcgaggcccattaccgtcacgatgcgaacagatgaaggggtgatagtcatggggtttgagcacatcaggaacattgtaaggataatgaagccagcaagggttgcaccaattgactcgtgaggaccaaaatacgtgtaaattattctttgagaccttgttgtgggagtcgagatgatactttttcacttctcccccatacctggagatgatgattttagagtagcatctccaacacatgtgaaactcttcggaggaaaggcctgctcatagtggcagaataatccgacacggataacactgaacaaacagtgcccgcctggacagaagtgtctgggccacggttggtgtatgcacatgtacctgtataaagagtatctgtaacttgctgcttctatttcacggccacatgctgtgctggtgctgtccaccatgcttctgtaccatactgaaatttcaaaaccattctttgttgctcatttccgtgtggcttgctccgctgtctgttttctgcagtagcagatgtaggtgctctgagtgggttattgcagcagcagttaatctgttccgatcgagctgacatcatcatctttcttgcaaagacatacactgcgcttaagcggccgaaacgctgcaaacgtgaagatgctgcaatacatttcagcaaatagtagcatagggtaaaactgaaaagcgaacgagagcggcagccacagatctgggtttcacgacgtacaacacgataatatccagggcctagacgatctggctgggacggcgtgccaaccttaagccttgttcggttaatcccgttacccatggattggatgagataaagccttgttcggttaatcccgttacccatggattgggtgaaaccttaagccttgttcggttaatcccgttacccatggattggatgagataaagccttgttcggttaatcccgttacccatggattgggtgagattgaaaaaaattaagaaaggatttgacttagttgggatttaaactcatccaatctcactcaatccatgtggattgggagctaaccgaacaagcccttagtgtgtctgtaggacacgttagctttagggggtgtttggttagagggactaaagattagtctctagctttttgtctcatttagtcccttttttaccaaacactagaactaaaatttggactaaaataatttagtctttagtccttcgcatatgtgctaaaagagactaaaccatattaattccatatttacccttcatttagttcaattgtactaatagcaggagaatgttaaaagtcattttagtcttcttataagtcatttagtatattcttactatttttagccctataactaaatatgttagggactaaactttaatcccctaactaaactttagtccctagactaaagaaatcaaacatagtcttagttcactaaagagcatacgggtaaaacacctgaaatgacgtgcgttatctattatctctgctagctcgcggaccatccagatccagtgccacctctgatgttcttatctgacggctcagtgctcacgtagatggtgcgggctgaagaggactccatggcccggttgagcttcctaaacagagggctgacggcgtcctccttccttgtcctcctgttgttctttcattcaggtctctctcatctttcatctgcatgaacggccgctgtgcttccatgcctgcgctgcgctgcgctggttaaatagaaaatacgcggtcgtgtggaaataagctgatgcctctgcgccctgcttcttccattttgtcaaggtccgtccgacactgaatgaattctatagtttttggagaaagaatgaatatatcctgattcctgaaccccgatccacaaccgggaaagggcaccttagctgatgtattgacgtcaggcgacataagcaaacggatcaaagaagcacgccgccagttacgagacgtgctggtgaccacccttacacacacacaaactaaaaacaccacgcgagcagcggatccagaaagatacggaggatggacttattccttttattttctgtatttaaaatcgcatttttaaatttcaagtataaaattatagcagaaacttaagaggggcttccggcttccggcctccggggaccgtagcgggggctcgatcgagcccggacagcggccgccccggtgctggatgcgcccctctcatctcatgagaagtaagctagaatgaattggtgttacagagatagtgcggaggagggagggctaataaccttggcaaaatcagggactcagggtggacggctgcgctgccgcttgccgatgcctggcgtccggcgacgatccacgggccacggtgtagggtaa

SEQ ID NO: 31840 - DNA, 2268 bp, Zea Mays
cagcgctgtccagcaaaaacgagcggacggatccgcccccgcccctctcgcgaccgcgcaggcgagcggccgtccagtcgcgcgggcagcagggggcggccgtccgtccaggcgcaggcgagcggccgtccgtccagcgcaggctagcggccatccgtccaggcgaactgcgagcaggcgtccgtccaaacgaactgcgagcgtccgtccaggcttccgtccagcgagcggcacaacttttctacgcacaacacattccaagaaccagggggaaaatgtcgttctagctactacactatcatcgtcaggcactcaggccacacgatgcttgctttagcgtctggttctggttcatcgtcttcatcatcccgcaacatttaccacgcactgctgcatttgcactgcaccacagcccgagaactgaacgtactggttctggttctgcctttgcccaacaccagcgacgacagccactgtctgttcgagatctgccgagtcctgtctctggtggtgagtaatcttatgagaggtcaactatattcgtgtgttgtactatgggaaatctattcgtgtgttgtattgaaaaaaaattatttaaaacaaaaatccgccaagaatacaattcttttatacacaatttgcttcttatgagaggtcagccttattgcactatgggaaatttggaaaactatatgatctttgctgtcagtttataattgccttgcttggtttcggtatttttataccatagatttagggtggtctggcagctttggtgggtctgtctctggtggtgagtaatctttcatctcttcttccttgttatttcattgtagatggacaaggcgaccaagcttttgatttatggtgcttcagcacacatgttgttgtccatgatggctatggttattgagtctagaaaaagaaaaagatatagtagaagagtcggtattacttatgggccaatggaggaaagggataggatgagacttgattatcttaacactaaaatatggatgagtgatacaacatatgtgaacatgcttagacttagtaggtctagtttctttcgcttttgtaggggctttagagaccggggtttacttgaagatacaatacacatgtgtgttgaggaacaagtggccatgtttttgaacacagtgggacataaccttaggaataggttggtgggaacaaattatggtagatctggtgagactgttagtcgctacttcaacaaagtgcttcgtgctattggagagctacgagctgaacttattaggccaccatcattagagactccatccaaaatagcaggaaatccaagatgggatccctactttaagaaaatggagagtgaaggagctggtgagcactttgtggaacaagctgatggtagtggccatgttgtgtggacttctgcaatgtccgcttacatgctcagtaacctagcaagccttgtggttgaagggatcaggacatcaacaggcttcaagaaagttcaccttaacatgtgtgctaaggctctaaatgactatttcaagatgaagctcactggagaacaagatcacaaatctgatgctgagtttttaaacaagcctttggagaactataaggaaatgttcattgtctttggaaacaatatggctataggaaagtatgcaaaaggatcaagtgaagctctaggtactgaagatagaaaatgtatggctgaaacagagattgatgagggagatggtaatgctgttcctagtcctatagatgatattggggcttcatcctcagctcctagacctaggaagaaggcaagggttactggtaaagaagaggcagggctgtttggagcattcaaagatggtgctgaaaggcttgcaatggctattgagaaggctggttcagatgacctaccacctgacttgcttcaaacattgcaaagtattccaggttttgatgacacacacaaggccttttactttgcatatctagtgaaaaatcctagattggcaaggcagttccctactctcccattgacatatcagataagtttgcttgctcgcttcgttagtgagaactttccttagattatgaggaccgggaattaggactatgttggaggttaagtggaaattagaactatgttgttcttttgttatgtaataatggctttgctatgtcgaaatactgggtttgttatgaaatattgggtttgttatgaccaacacggatgctcggtttgtttgttttgaaatactgggtttgagattcatt

SEQ ID NO: 31841 - DNA, 1845 bp, Zea Mays
tgtgttttttttttctttccgattttcgtttctctctcttttcctttccccccgtccctctctttctttctctcttggaattgtaattggactcaaaagtttcggcggccttctccatgaacacggtggcttcgctgcctttggcgccgcgcctgctcattaagccctccctcgcctgcttctccagaaaggacgtcggccgctatggcgggatcaaggtgtacgccgtgctcagggaagacggggccgagttcgcccggaacaacaacctggaggccctgttccaggtggacgaccccgggccgcgggcccccgtcaagaagttcctggacgtgaacgaggctctggaggtggtccgcttcgacatccagtactgcgactggagggcgcgccaggatctcctcaccatcatgcttctccacagcaaggtggtggaggtcctcaaccctctggcgagggagttcaagtccatcgggaccttgaggaaagagctcgccgagctacagcaggagctggaaaaagctcacaatcaggtccatctctcggaagccagagtctcatcggcgctcgacaagctagcgcatatggagaccctggtgagcgcaccatccacagccgagccgcccacttcttcctccctgtctgcaactgcaagcagcaccgcccgtgtccgagccaagaacaaacagccacgtcggaggcttgacgtgtccggcccagtgaagccttacaaccccagcctcaagaacttctggtacccagtcgccttctctgctgcctccttcaggatttacggtccacgcagagtgttctctctatcttgcagatagtgatggagctaccagttgaacatggactcctcctggacaatctcctggaccttgctcacgctcctttcacacacacgtccacctttgccaagggctggagtgtgccaagtttggtcaagttcctgacacccgcgtctgggctccaagggtactgggacccgtacccgatcgacatggagttccggccaccgtgcatggtcctatcgaccatcggcatctccaagcccgggaagctacaagggaagagcacgaggcagtgctccacgcacctccaccagctccacgtctgcctgccctcctcccggaacaagaccaggctgctgtaccggatgtcgctggacttcgcgccgtggctcaagcacgtgccgctcatgcacctgctgtggtcgcatttcgcagagaaggtgttgaacgaggacctacggctcgttcttggccagcaagaggggatgatcgacggcgccaacgtctggaactggccggtgtcgtacgacaaactcgggatccggtaccggctgtggagggacgccgtcgagaggggcgccgacgaccggttgccgttcagcagcacccaagctgagagtttgtcgtagcgaccggaacgggacgggacctcttcctcgtcgcatttctccgcaagacgacggacggacagccagagttaatgtgacctaggcgtacgtgcgtctctctctctctctctgcgcggttcatcgttcacctcgggctgctgcgcactgaaggattctggaagggtgaaggttgacggccggagacgatgatgggcagcatcatggtctatggtgtccacatgcatgtacactactagcgacgacggcatcatgggatgcaattgtaatctgagattgatctcttttttttttcaccctttctgtgtaaagattcagcaaattgttgcgttactcttccaaagcatgtataatcaactacggagaagtgttcatatatataaatatgagaaattgcagctattgctacagttcatctgccccgt

SEQ ID NO: 31842 - DNA, 760 bp, Zea Mays
cttatctagtatttttaccaccaacgtgtgactattaaatctacgtcatatttatctaaaccaacatcaacgcgtcgattaacatgaaataacacggtgcactactaatcgcatatttctaacaaattccatagcgcacacaaatacacaaatcggaatcacatgtgttcatattacgacaaacaaactatacaacacatgaatcgaatcaaaagcactttataaaatacataaaataaatttgggtcgtcatcaacctcgggttcgtgcgtgtgacggggatggatcgacgggtttcggccggacggagagcggggctcgactacggacagcgagtacgtggctccggcgacgaacgacacactccggcgacgaacggcacactaacgatggcgtcgaacagtgcactggcgatgagcgaggagtgctagagagaaaggcaaactcgagtaggcaggaatggggaggctctgctgttcccttttatagagagcaagagggagaagaaaggtctgatagagggagtaacgtggtcttcaatggccaccactgtgtcagtttccagagaataacgagggagagaataatggagaagaataaaacggtcgcagtgattttcaattaatcgcaggcaacgaacggacgacgggagtcgtggtcgggctcggtcggcgcgtgcggcatcgcggcgtcgcgtggctcgggcgtcggcgtgcgcgggaggcagcgcggctggacctacaggcgcggcgctccagac

SEQ ID NO: 31843 - DNA, 2110 bp, Zea Mays
aggcggtggagtatgccaccaacttcaactggaaactcgtaagaggaaaaaaaaacacacccgccccgccgtccacctctccgcctcctccggtgccggcgctggagcggccgacccacgcaatctatgggcaacatgacccgctcaaactcgcccgtctcccgccgcatcgtcctctccttcctcgacttccttaactccgtcgaattagctcctggtgttgatcctgaagctctggaagttgctaaggattgtctggagtccatttttagtgttaactcaacagccactggtgacgcaatacaaccaggactgttgtttgagctatttgcttctctcgaagcaaatgaaagagaccagagcgacagccaggtggaggatacatttgaactaggagatgaactatttgcaaaattttatgctgcacttgatgaaatcaatttctttaagacatcacctgctggagctgaagatcctggtctactttcaaaagcaacacaatactttgatgatgcattactggcgatgcagaagttgggaaagaaaagggcaagcttagtagacattgcagagtcctttaaatcaagagggaatgaattcatgagatcaaaccaacaccttaaagcggtagagctgtacacctgtgccattgcattgaaccaacaaaatgccatttactattgcaacagggctgctgcatatacccttcttaatatgaacaacaaagctattgaggactgcctgaagtcaattgaaattgaccctcactacagcaaagcatatagccgactcggatctgcttattttgctatggggaattatcacgatgctctgtacaagggatacttgaaagccgccgagcttgatcccagtaatgaaaatgtcaggcagaatattgaggtcacaaaaaagaaactggctgaacaacgagtcccaccagaagagcagaacacacatgcaggccaagctcaaggaccacatccaatatttacaagtggtggtgttcctttcaatctgtttccaccaggtagttctccagttcaagaattcttcgctggctggtcgtccgatgttggtgcaccaccaccaggacattcgataagtataaatttgaatgatatttttggccaagcaaatgtcaatgctagcggtcaaggatcaagtcaaacagggaattcaaataaccatactccatctgcttctttctcaactggtgctgctgttcctcctccctttgccttctcgggctcaggaaatgaaggaacgcaggcacgccaagcttctaatggacttgaaggggaacatggtgaaccaggcatacacagggatgatgacgtccatataaatttggctggacccgagcaggctgcggaggctttgagagctgtgatgcagatgcttgggccacagatgggtcaacatgagggtgcacctagaggaccaggttaagcgtgggaggtaggaaaatgtgttacgtggcgtattgtggtctgcaggagtcttatacgggacattattttgtcttctccatcctgacgaagaatggagattctcgtgcgccttattattatagcagcttatctgtgtgctacaacaattccaccgtaatggttaccggcgttcaacttatctgccctgttcatattggcgtaggtgtgtcattagctgtgctggggcctgggtcttgttttgttgagacttgtctcgtaatggctgtcggtccatcatgtgatcttaaattaaagcctttttgcccccctcccctgcttttccgctgcttgtcggttcccagttgatacttggaaaatatttgcaaggttggtgaaaaaaaactgtcactggaatgaagttcatcatcgttattggctggctggcttgctggataaatcataaatgttggaattggtaaatcatatcctcttggactggagggaagttattattacgttactaagctgggtatatctaagatgtttggttcacatgtttataatgtgatgtttataatgtgatgggtaactgataacggtaaatcatgtttgtttaaatccaacgtaatgagataccatgctaagaaatgatgttggtttattcaaatttgttaccgctg

SEQ ID NO: 31844 - DNA, 284 bp, Zea Mays
accggccatagagcattcatagactcggaccacgacacgaagcggctccgcggcgacgacgtacattggcgacgaattccgaactgaacgatgaccctcgagccctcccagattccaatatgcgatccatgagcctcggcggacctccacgacccaacaaagaggccggagcaatggtggggattcaattcaacagcggcggcggaggtgtgctaaccacgattcggagctacctcaaatggaggggagaaggggtgccaggcacaacgcaatgaacgaggaag

SEQ ID NO: 31845 - DNA, 1910 bp, Zea Mays
tttgtttaatataattaaatcagatgtgactaattcgtaataagagcaaagcacacctaggttcttaaaacttttcaggattctcacctaagttcacaaacttttgaagtgaggctctaggttctttgaacattttaagttgttcactccaagtgtgaaaccaggtccctatttggacctgaagtgaagcattttaaagttgaaggacccagattctcacttcgagagtttatgaacctagatgagaatctaaggctctggaagttatggaacttgaccagaaaatagatctagttcatgagcttgatggtcatattatgcgatgtgtccgtgatcaaaatggaaatcacgttatacagaagtgcattgagtgtgtccccacagaacatattggttttgtagtgtctgcttttcagggacaagttactagcctttcaatgcatccatatggctgccgtgtaattcagagaatcttggagcactgcggtggtaactcacaaggccagtgcataatagacgagatattacagtgggtgtgcatccttgcgcaggatcagtatggcaactatgttacacagcatgttctagaaagaggaaaagctcatgagaggagccaaattattactaaattggccgggcaggttgttaccatgagccaaaataaatatgcatcaaatgtgatagagaagtgttttcaacatggtgatattgcggagcgggatcttctgatcagacggattgtggagcagacagagggcaacaacaatttattggtctgtttggtagtgtagtaaaagtgttccctccattatcccttcctctctttgccaaacgggtcggggttctggaaggtagggctaggacatggggacctgatctcagttcggtacagccaatcagataacaccatgagtatctcagttctgctattccagctttctgggagctgcgaatcctatggattaccaagacatgggatctctgtaaacttatttcttcctgtgttgatgttagtttatatttcctaatcaccttttatattcaatcaggcaatgatgaaggaccagtatgctaattacgtggtccagaagatacttgaaacttgcaacgaggatcagcgggagcttctgctcagccgcgtaaaggatcatatgcaagcattgaggaagtacacatacggcaagcacatcgtaagccgagtcgagcagctctgtggcgacggaactgccgagtcaggttcttgaaacgaaccgccgcctaattcttcataggctggagggtgtcctgctcttttgctcattccgtcagtgacgaagaaagcaaaacggatcaagtctaactctggcgcttcagaacagactaacaaagctgtcgtcgaagattgtataggtgtgactctgttcagggatagtcttcaggttctagaacagaagggtagtggtgtgcatcagtgtatctgtttactggataatagtggttggttaggtgtgtgcagaaaaagtttagtgctatgctttgtatgtgatacatattaactatgccttggaatgttcatatgttgtcctgattacgtgtgatatctctcgttcagttcaagttgcgttttctacatggccatgggaccatctgccgatttgatgaaaaaggaaaggttgtgcacctttgtaagcgggcatggagatgagctgcgctattttttttttttacaaaatgtctgctgggattgaactgtctattttataaaaatatcatattttcttttaatgtcaacagaaaaattacggactgtgtatggatcccatgtagctaaggccagtgagtgttacgatgctttgtcagttgatgttatgtcagtcttttcattgttaattctgaaagtagattttatgccgatgaacctttataaaaag

SEQ ID NO: 31846 - DNA, 2337 bp, Zea Mays
ccctgcctcacgcttcctgttcgaactcttcgtcgcctcacactggtgctcctcctctccccatcgctccgccactcccatggcgtccctcttcggggctggccgccggcgatcaccggaggacgacggcgaggacgatagatccggcagagggaggaccaagcgcttccgcctctccccggaggaggacgcagcgtcgccggcggaggcggggcccggcgcggcgacggagaccggctggctctccggcttcgtctacggagcgaagagggtcatttcttccgttttactgttctcctcgcccgaggagaccggctcgggggaggacgaggaagaggagaaggacgacgacgacgacgaagagggcatccacttgaatgaacatgaagctactcatgacactcatggagcaatagttccttatagcgagccaaagcttactattgagcaaatggttatgaaggaaacattctcaagggatgaatgtgataggatggtagagctaataaaatcaagagttagagattctacttttcctgaagcccatgagtatgtaaagccagaagaaatccctagtaggaatgcaggcattacacatgacttcacaggaacatggcgctccttgagccgtgatcggaatgtccctgaatcagttccactctctattacggaagcaaaaaaatggttggaagagaaaaggcagggactgggcttcaagcctgaagacaatggaccatgcacactaaatactgatatacttagttctcatgatgactctgtctctgacctgggttctccagttgatttagcgaaatcatacatgcagtcgttacctccttggaaatccccattcttaggccgtcagaagtttaacacaccaccctccaaatattttatctcatcagcagaggtaactacaaaggaggactacctttccagcttttggacaaaattggaggaatcacaaagagctcgtattggatcatctggaggttctgctgatgctcctaaattctggaattatggttctaattccaggttatttgagaatgacacctctatattttcattgggcactgatgaaaaagttggagatcctaccaaaatctataatgggtctgggaaatttgcagcaacagaaccagttggtggatgctgcttacctattacacccactgaagatagaactgatggtattactgagcctgtggaccttgcaaggaacaacgggaatgcaccccaagaaaaccaggttgcatctgaaattctccctgataaagttccagagggtaacgatgtgtcttccactggaattactaaggacactactggccatagtggagatgttaaagctcccacttcagaaccacatttaggggaaacacgtatcaactcagcatcagaatccataccaaatgatgcgggccccccaacccagaacaaaaagaacgggtcgacgaccaagaaaacattagtaaacggtctcgtggaccaatcaaatgccaactccgggctagaatcttcaggaaacgataaccctagctacaccaactcgagcagtgctgtgccacccgcaagcacccaaccagtcgagtctgcagccgctgctgtagacgttgattcggtcgagaaaggcccaggtacgacaccagagcaaccggcgaagcgaagggcacccaacgttcgacgaggacagagaagggtgctgcgaagcgcaacgagagaaggaagagcgacgtaggggatattgtgttatagcgaattaaagggggcaacacatgatccctagctaggttaactagagctatagcaatgactggccgtttccacgtacgagatgcgtagtgtgcatcaaactgtatccatgttgtattatcgtaggagtcgtaggccttacagtgaccacgcgtactggttagagttggtcgttcaggaccagtagctgcttgatttgggtttcggtgtcaggatttggttaggtcctgtgtgtagtttgcgcagtcggaaagagactgttggttgtattgcaggttgcaagcagactgtgttgtagcgaccaggtagtaaatccagcgagagctgctcctctctctctctctctctctctctctctctctctctctctctctctctctctctctctctctctgtatgatgatggacgctggtgtttcaggcgatgtactcatgtaacccttgttttgtactgagctatgggcctttctgtgttgtgcgtgctcgcatgcatgagctgcttcctttttttttcctttttctttttttaacgacaatacgctgacaattttttttttctttttctgtgcttgaagcagtgca

SEQ ID NO: 31847 - DNA, 2977 bp, Zea Mays
accaaaccgccgctcgcgtcggtcacgccaggcctgacgcgagcacatcgcaatcctagccaccaaaacaatgcccggcggcaagcgccgccgcgcacgcaaccccaccgccggcgggcctcagcgtagcgccggcgcaggtcgtcgtcgtcccgtccccgagctcccgtcttttgtctcccccgcttctgtcgccgccgccttctcccccgcctcgggcggccgcagccgcgggcggtgcgcccggcgttgcggcgcctactccgatggcgagtcctcccacgccgtcccctttagctatccttccctccgctcctgctccgcttatccggagcgtgatcaggcgcaggcactggaggtgaccatcgacaccgcaccctgcgccgacccagccgcttccgtcccgatgtactcgtacggccccgccgtgctcggtgagaccgggcttgtgctgagtgcggacgaggaggaggcctgtgatagagggctgcatctcgggttaggattccgggatggaggacacgatgagatggagctcaaattgaaagagctgacagaggaagatgtctccttcaagacgcccaagcggaagcaggagcagagggcgaaggccaacccaggatttttgttgattgggggagtcaggatttacacggaggacatctcatcatcagaatcggatcggatgagcagctctgatgtggatttagagcccaactcaggtgatggggagagatttgagaatgatgatggtgacagtgacgaggaagataggcaaggcgaggagagagattcaatatctgatagcgagtcattaggatcggaatcagatgaagatttgagcaccggggattcttcttcagttgacaatgaggttgttgctgattacatggagggtattggtgggagtgacgagctgttgagcagtaagtggatcactagtatgaatttgggtgatgcagatactatagagcagatgtatacaaatgacaatgatgggtttgtgaagaaggggaaggaaaagcttgagggttatgcactaatgactgcatccgagcagtatgggatgaagaggcggaactcccttgagcagcggaagggaaaaggaatggtttgtgacagggatttgtcaagcatgcaagtgatggaccaggaagatatgttcatggtgaacaatgtctggatgccaaacaggtcaagaaaggggatgaagacaggatcatcatcctctcagctctcacagtcgtggcctaaagatgataggaaaagcaaaaactatcagagcaggccaggtgaaaagaagcagcataggaaggaactcattgcaaagaagcgtcaacaacgagctctaagcagaggagttgacttagggcaaattaatagtaaattgaggaaaatggttgtggatcaggttgacatgttatgttttcatccaatgcactctcgagactgttctcaggctgtgcttggtacgacaagagtaacaacaacacgagctgatgtaactactgctaatgcgcaacacccttgtggttgttgtagtcggatagcacaacgtcgacctccgccctagatcgtagttatctggagacggtgtacctgtcgctcaaggcgccacaccatcttggttgtggtagtcaggcaaccaacggcgacctccaacaaattttcaacctccatcatctcatcgaaagatcgggctccctcctacctgtcgggtttatcaaaacctgttccctccgctactattttagacttctcattaaccagaatattggcttctaatactgaaggcatgtttggatcttctgcaactgcttgctttgccctaggaaaaaagcttaggcgagccagaacagctctccgctgctggcaaggatagccttgctgagcgaggcgaggcaagttgagcaggacagaaaaccaaacatgccctgaattgctaaagcttgaggtacaacgccttgcatctatttatcaattgaagagcgggtgtcaaggttctggcaagaagagatttgtaactgtgacattgactgggcactcttccttgccatctgcagatggccaagttcgacttgaaaagcttttggggactgaatctgagaactctgtctcgagctctaaaggcccagcacgactgaagggccattctgctccaggaaagtgtgtaaaacactgggaatccagtggaaataaatctaccaagaaacaggtctccttcgcagagcgtccagtatcttttgtcaagtgtggaaccattgtggactcccttactgaggcaatagctggcccaagtggtggtgatacctcgtgtgttaaacctgttgaaagtaactccacccatctaggctcctttgaggtgcacaccaagggctttggttcaaagatgatggccaaaatgggattcatcgagggcactggccttggtaaagatggccaaggtatagtgcagccgatacaagccgtgcatcgtcccaaatctcttggactaggtgtagaatttgacagtgtggctgaggcgatcaaagcaagggcagaacccatcaaattaatttcagagctgaggcggaatgtgtgggcaccagagacgagtggcgttggctcctttgagaaacacaccaagggttttggctccaaaatgatggtgaatatggggtttgtcccagggtccggactggggaaggatggccagggcattgccacccccttgaccggagtaaggcgaccgaaatcacggggactgggagccgaggacaaatattagcttacaccattttcgcatttgatgtatctttcttgtcgtgttccttgttacatgcggattacatagtttgctgggagggcgaacctttgagcaccctgaatggtgaaacaatgggttttcacttgtttctttcaacttctcaatgaagttttatatatttgttctatcaatgttatatttgtttcatttttctatggcccttgcttgtgc

SEQ ID NO: 31848 - DNA, 1427 bp, Zea Mays
cttggtgacatctttaaaacactaggttgctccaactcgaggtggacgatttgaggttatttttgtttccccaactggtgaggaagttaagagcaagagacagctaacccagtacctgaaagctcatcctggaggccctgcatcctcagagttcgattggggaaccagtgatactcccagacgctcagcacgcttgagcgagaaggtcaaggcaactgagagcccagagggtgagaagacccctaaacggggaagatcaagttctaagagaggcaaaaaggaggaaaaagaagacacagaggctgcaaatgaggctggagaagatggtgcttcggaggaaggtaaaggtacagatgtggagatgaaagatgctgaaaacgctgaagacgagaagaaagaggtcccaaatgcagatgctgcagagaagactgaggaaggtgaagataagaaagaggaggcccctgctgtagatgcagcagagaagactgaggaaggtgaagataagagagaggaggaggcccctgctgtagatgcagcagagaagactggtgagaaagaggtggcccctgctgtagatgcaacagaggagacagaaaaaagcaccgaaggccaagcacagcctaattatgttgctgccccagaatctgagtataaaggagacggaaagccaggtgaatccgaagcagctccccttgcatttgttgatgaaacagctccccatgtaattattggtgaagagaagaaagaggaaaatactgagaatgagaacagtcaggcagccgaatctgccgtgccttccctggcatctttagagggagagaagaaagagaatggtggtgcccctgaacaaccagccctgcctgtagctgagacgaaggcagatgctcctccggcagaggcagaaaagggggctgaaaattcaggccagccgaataccggctctcaagaaccgaaggcagcaaactgcgacgaggggcagattcaacctggtgcctctgctgtgaggtgcacataagggagcttgatctcagatgggactctgttgcgttatgtctttaggacgatacctcgcatttgctttgagaattgtaatcgtggttaacctgacagcgctgtgtagcactaggctgcccagcacgtagttatcctttcgtttcttttataacggtggtgttgcagcatgggtaatgggccggcctgtgctgcctcagccaccactgcatacccagtgtaagtgtaactcgttattagcgtggtcgacattgatctgtggagaggactgcaggacagtactgtcctcgacagctgtaacgttacgttttgtgtgttcccttgtgttattgaacttatattatgatccataaataaagccataagcgtggcagggtcattccctgaccaccttcaggcatcaccatttgttggcc

SEQ ID NO: 31849 - DNA, 3464 bp, Zea Mays
cacaggcacaggcacagcccacccacgggagggaaggtctctccctctttctcttcgtcttcttcctcctccttttggtttccttttgattgattgatctagtagaacacagaaaggagagagaaagagaggagaggcaacacagaaacaagagaagaagaagaagaaggggagatcgagatcgatcacgcaccgggggagcagatccttcgcctcgccatcagggataaggattcatgcgaaatgccacctgaacttggaatgtcttctagaactgttgctggtgctgttgtaaataggaggcctcgccgcctgtttgggagatcatcagagaggaagaacccactcaaccttcagtttgagcgtcaagtagctcgcctcgaggcaaggcagcagcaacagaggataattcatcaaggctactggaagataagcccacaacatccaatagcatgtctgattcagatttcttagtcaacagctttaccaagccgagtgataatgcaaggccatcaagaaggaagagcaaaaagaaaagcaagaaacacaggcaacgctgtaggaagccgactgatggatctgaagctaaattcagagagggcaatggtgctgcctctgcagctgatgttggtgattgtgaagattcgacactttcgcctaagcatgttggtgacatacgctttgaggaaacttctcccagttcttctgtcaaggaagcttctgaagaggctcctgagagtgatgatgatgagtaccattgctgctcaggtggttcagtttcgagtgcgtcctactgtgatgagatggaactgtccaaatcaacaacttcgtgccctgcattgtgtggacaatgtcctagcagtaacttacagtatttggacaacactcaaaattctgcaccaacaggtccatctcaagaaacttgctatgctggcagtaaagcgaactgtaaccatgataccaagtccctgtttatattcagaaatgaacgtggatctgatccttgtgaggcaacagagttttgcagctctagcagtggatttgatgagaactggatagagaagtttgactatgatagtggcatttgttcgccaaaaagtgttggtacatatggtggagaccaggctgcccacttgtgcagtgacacaactggtgacaatgatttctgtcttgtaatatctagaaagagggccagaaaggagaagaaaatgtcattgtggaagagttatggagcgcatgcatccacacctgcacttgatcgaaataaaaaatatgttggccattcttcaatgcagatgaccaacgaattcaacagtaacgactggtcccatagacaaaatcatgttagcaggatacaccctcagcatggaaatgcactgaaaagctccaccaaaaatttcatgcagaggccaagcattggttgcagggagactcaatatgggtttccagctaaagaatccaagttaggagcaagtctcaatcattctacaggtccaagagaaaaaacttgtggaaaattaactggcggttttgataagacagcacaacagctttatttggacagagacctatccaatgctcttaacagcagtgaatcaatacgttgtgagacgagatcaatttcctcttctgaaccgacaactccaaagtctttaaaaggcaattatacttcagagtctggtgaatcaacagatattacaataggagctcttcccatgcagaaaagaagattgcaggatttagttcgaactgatgatgccagtgaaactatttctgggcgatcatcaccttgttctgagtcatcgacaactgaattaattgctggacatagtacagattcatctattgaagggaaccatggctgtcaagggctctgtaactctagaacacatctagcccagatgctcagggttgtaaacgatgcctgtaaagttcaggttggtgcagatgttctccttgctgctggttatccaatttctgatcttgagaaatttatatgctctgcaactcccgttattggtcgtgcaccttgcatgataagcaacacttgttcattggaccaagtagttagtgactcagtttgtcagcatgacatctctaatgtttccttgaggagaatatgggagtggtatgaagagccagggtgctatggattggaagtaaaagctcttagcaatctcagctctaaaacatccagcagcagcagttcagagttctttgcatactttgtgccttatctatctgctattcagttgtttgggttgtctaggaataacatgcatcacagttttggtgtgcaagggagggaattactgatatcatcaaatactgcaagctctatgagctctcatcctgtgcatgcaaaagcgcatacactgcttgaggaaagtaatgcatgcttgccagagtcatctttagttgtagaagatcctggagaactcatatttgagtactttgaaacagagcaaccttctctccggcctccattatttgaaaagatcaaggagcttgttagcagtgcaaatgtttctgaccaccgggtttttggggacactgaaaaattgcaaaatgcgaaattgtgtgagcttcatccagcttcctggttctgtgttgcctggtatcctgtttatcgtgtgcctcgtgggaatttccgtgcggcatttcttacttatcattcactggggaagttggttcataaaaaatgctccatggatacgaatgacgggcatacacaagtagtttcaccagttgttggtctccagagttacaacgacaagggagagcagtggtttcagctgagatgcccagatttgaagcaattgccaatagaagattctttaaaaaccagtcctgctgaagttcataaagagaggctgaggacgctgaagatgggtgcattggccatggcaagagctgttgtcccaaagggaagtggggagtcggtgaaccaccatcctgattacgagttcttcctgtctcgttgcgcctaggctaagcggttgtgatatgaaggaagaggggcttttctgcttctagctcctgaatgtagtagtgaccatgaaaatgaaaaaaaaacccagagtagtgactaaccagagaccggctatagatacagtttatcttagagagaggagagcctggggtgatgcatatcactgactgtataggagatagactcgaatattagatactctaacctgattccggattaccaatgcaaaccaagttggtgagctgttgaagtatggcagtacccgcgggatgggtgctttattggggctgggggcaaagatgagaagataccacagatgagatgacgctgcaggtgttcatcttttgtacaaagaccacaccagaggagcagcaagaaatttgctaccagcaagaaatttgttaacacatttgcgagcaaacgcaagtgaaagcgtgcgagtaattagaggcgtgcaacctcattgcttctc

SEQ ID NO: 31850 - DNA, 299 bp, Zea Mays
cacacccccacaggagaagaacaagtggttcaagaggagccacatcgaggagttcgattcgatctaggtggcgtctcccagttgactttcttgcgccaaggacgatccttagttggttttatatttatcctttattttgtaagtcttccgctatgtaataagtactctgattatattatgacatttatctctatacactcttttattatatatgttgtcttctttggcgatgtatgagatgcacccgtatttgtcccttaaaacccgggtgtgacagttatgttcatactgcttataat

SEQ ID NO: 31851 - DNA, 1350 bp, Zea Mays
aatgattctaaatacctaaatgtgtccttcctagatggagaatggaagtggtgcggttgtaccttctaattcttcagataggtccgacaggtctgataaacctttggaccaaaagacaatgcgacggcttgcccaaaatcgtgaggcagcaagaaaaagtcggctgaggaaaaaggcatatgtgcagcagctggagagcagtaagctgaaacttgcacaactggaacaggaactccagaaagctcgccagcagggaatcttcatttctagctctggagaccaaacccatgccatgagtggaaatggagctttgacttttgacatagaatatgctagatggctagaggaccaaaataagcagataaatgagttgaggactgcagtgaatgctcatgcatgtggaagacacctgctgaaaggtgcttcctatggcttgggggttttcgtccatctgagcttttaaagcaatcttcccaacaagcagaggatgcgttgtcacagggcatggaagcactgcagcaatctttggcagagactttggctggatctctcggtccagcaggttcttcaggaaatgtggcaaactacatgggtcagatggccatggccatgggcaaactcgggacgctagagaattttcttcgccaagccgacaacctgcgacagcagacgttgcatcaaatgcaacgtatcctaacgatccgacaggcttctcgtgctcttcttgcaatccacgactatttttcacgattgcgcgctttaagttctctgtggcttgctaggccacgtgaataacgaagggccgtcagtattttgagttccctctgccttacggtgctgctgcgtcgttcgcagcgatgcatcacagatctttggtggtactgtttttgttgtacaattacttttggccgctgcttggtccaaattgtactcaggtgggtgtacaagtaggtcaatataatcctgtaagttatggtgatttatgggtgtgttagcaatgcaataataattagagagggcaggatcagggtttctgttgtttgtactggttagagatttagtcctaatgtaacttcctgggacatggggggcggaatgggaagagagtaacaagaatcttcctttggttactgtagtatatgttggtattgttgcatcccattttctcattttgctgttaggagaatgattattctgtccatttgtgtactttttgattaatgttgtttgtagccccaacatgattatggatatgactgctagttcattcccattcataccactgcagtagctggccttattattaatatcatcatccatacaagagcagtggttgaagttgaaggcggc

SEQ ID NO: 31852 - DNA, 2522 bp, Zea Mays
cgcagacctgtccttgacatgtgggcccgtcgcccctcagaagtaggacatgggatgggagggtcgcgggcctttgcggctaaacaaaacaaaggcttccttcccatcacagcgcagcggcgcagaacttcacgctctcccacgcagcccttccagcaccaccaccaccagcagcaagcatcgtcgtcccccgtccgcctctccgcttccttccaggcttctagccctctctcctcggcatctctagcgcgggcggcatctatagtagccctagccccggccgcggcattggaggaaggcagcggcattggctgcgggaaccggagaaggaggcattgactaggtacaagcctctgtaacctgccggatccggatccgaatccgcgctgccgactgccggagtttgggggcaacgaagcttgctctagtctctagagatggaggacctactgggttcggagatcgggaagaacgactacgattggctcctaactcctcctgggaccccacgtgttcctgcactggagggcgctgagaaaacaccatcctcaaatatattaccgaagcgcactacaactagatcatcctcaactaccagagcatctaggctttcaatatctcaaacagagaatgggaattcgacgattcccactagacctgcaagaagtaactctgtcagccgatcatctatccagtcagctctcatgaatggcaacaacaggacatcagttctgaatacaagcatttcttcagtcacttcaagacctacaactcctagtaggcgaagcagcacagttggcacaccaaagcattcagctccagctgcacgtccagtgcctgcaagatcctctactcctgttaatactcgtccatctacaccagcaaaaactcgcccatctactcctacgagaactcgtccaacagcaccaaactcttcaactgattccgctgctgccaagactacattcacacataatgcaaggccatcaactccaaattcccggtcccgtattgttcccaattcatcttcaagtgcaactcatgtaataagccgtccgagcgcctccttgagtgcaacaagcagaccagggtcttcctcagcctgcaattcgctcatcagctccagctattggtcgttctccttctgttggacggacttctagcatcaacagctttacgacttcgtccaggtctgcagccagtactggcaggaactcagcaccttcatctgctccatcatctcgtccaagttctccaaacccacgaccccgagctccagtgcgacctcttgatatccccgattttccaaatgaaactccaccaaatctaaggacaaaattacctgaaagaccaccatctgctggcagatcacggccaggaatggctttaggcataagatcaaccccaaatactgaaccttcagctgcctcagctcctgtgaagaagatctctgtgcctgctgtgagccgaagtaaattttctgatgcatcatcaaagacctctactctcacaaatggacaccaaaatcgacaggctgacaggtccaatattgacagtcaagctaatagaccctcgagaccttccacgggtaccacagataatggatttgggaggtcgatatcaaggaggtcacttgacatggctatcaagcacatggacattcggcagaacttgggtggcattcgcggcacatccctgtttccccagagcatccgctcggctgctgccaaggtccgtccagctcgggcatcagacccagggcatggcatctcaaacggggaccagcgctacagtgacaatggaaagcagcgtgaacggacacctctcccggggactcaaacggggttctctcacgtaatggtggcagctcaaccgattcgccagacagggggagcatcgggaccaaggagaccctgagcgaactggacatctatggtagctcgcgctatgaagcgatgcttctcagggaggacgtgcggaacacaaactggctgcacgggcttgatgacaagcccgaccaaagccccctgttcgaccaccggttcgagccgctgccggagcccttcagcccgttatgacagctgctgcttgtaaattatggtcatcactatgattgactggtcgggttttctgtccttttgtgctgtcaccattacgtgagagaaccccctttgtgctgcaagatgtgtatggttccgtctgttctctgtcctataattgactggttctgcactccccccaatccaatttcagaaaccgaagacgtttgagattgcggggtttgagtctcttgatttgtgcctagagattggttttccactttccacgaattgttggactgaaagaaaaaagatctataaaagggagtaagttgctgtaatgcttggatgctcgctcgtgtgatccctgccatttatgtgctcggtttgctgtaggtgctccttgctactcttgggtagacccgcttagggtccgtttgccatttatgtgctcggtttgctgtaggtgctccttgctactct

SEQ ID NO: 31853 - DNA, 664 bp, Zea Mays
aagacataagccagttgtagggaagggccaagggaaacttcaagatagtatggcgaagaactatcgagagcgccgcttaaagagggtgatgaagatagatgagggagaggacgactttgaagctgattaccaagcattctctaagaagtacgatgagaaggatgagtgccactataagttcatggctttattaccattcaagaatggtcttcctaatgtctcaccgccaacaaaagagaaagttggacttcattttgccatgaaaggtgatgtcagtgaggacgtggcagctgagattagtatgtgggagttttatgacaacctattagataataaggaaaattgatggatcttgacatcatgcatggtccatatggcttctttcttgatgatactagcaagtggttcgaagcatgcatgatggggatggggatgtagtcgcaaatggcatattcattttataatgtcaagtaaatgcagccgtgttatccatgtgtatcagtttggactgtttatttatgctttgttgtaagcttacaggcaacggaacctgattgacattgtgggtgttattgtaatgtaatgataattttcaagccttactaacgcatagtaattaggccatgtttgatcctcgcggctaattgtttgcgagtggctaact

SEQ ID NO: 31854 - DNA, 1203 bp, Zea Mays
ccggccatgcccccaaccctagccgccactacctgctccctctccctagcagccgacagctgccatccagcgccaccaggaaagccgcccaggcgccccgcctctgcatccgcccgccaggagcagcgcccctgcaacccgctctgaagactcgacgcccagagccgcgcgcaaccccgttcgccgccccgccctccgtctcccgtcgcctcgcccctgcgctccgtcagctgcccctccccgaaccttctgcaaattcctattgtttcaagctgcatagaagtctgggattttctgagtgtggattcacagacatatattttcacagacactctctcagttatccaaatattgtcagtcagtttagatggtcggtcagccaccagggcctccccgtccggccgtcgtgcgtccaacagtcgggcaccggcgggcggcggccgctcgcccctgcggcttgggcgctcggccacagccagtgcgggccgtgcggcagtgtccactcgggcctcggccagctgctagctaatcctaatcagtaattacttttgcactttgtggacaagaagttgtgaatgccttcagtgctgcagtgttgggcctatcttcaggttgtgtttcttctcaagtcaaccaagagcagcctcatgatggttcccctcctctgagagaagatgacaagaatgggcattatgtttttgctgttggagataatctcacatctcgttataagatcaatgcaaaaatgggagaagtctacaggaatcagtggtcttctccgctacgctcctgaaatatttgagcagtctggagtggctagtttgttttcagacattggactttctcctcattcaacatcaattctcatgagtacccttaatgctttgctgatactcccttgtataactgccgcaatgctgctgatggatgtctgcgggagaaggtagaatctgagacaccatgaaaattagtgatgcagttgtggacttttgaacaatagctggagtgatatgaaacattagtgatgtagttgtgggcttttgaactgcttcaagctggagtgatgtcgctgtggtgcttttgtgactgatctagctagctatctgtaaatgatctagttgtgaatgatattataattgtgatgtttttgtgaatatataattgtggtgcttttgtgtttatgtgatggatctataactgtgg

SEQ ID NO: 31855 - DNA, 1826 bp, Zea Mays
atgctcctcgcacacatcaaggccatgatttgcaatgaggagggtgattcgaatacgatggagctactcaccgcagttggagggcaatggagggagctggccacggaggacagtgggttcacggtctctgaggaggaggaagaggagactcggtccaagccgaccgactccgatatttcaggcgcagccattgcggtaggcgacgaccacgccgagagggcgcgcagccattgcggtaggcgacgaccacgccgagagggcgcgcaggccggtgtgctacgagtcgagccggcggtcggacacctgcgaggcggccggcgacgtgcgcgtggtggggcgcgcgcagacggtgctcgtgggcgcgctggaccgggagtggaaggtgaagccctactgccggaagcacgacgcgttcgcgctgtcccacgtcaaggagtggacgctccgtccgcttgtcggcggcagcgacggtgacgaggcgccgcggtgcacggtgaacagctcggccacggcgttcgtgctgtccacgggggggttcacggggaacctgttccacgactacacggacgtgctgatcccagcgttcatcacggcgcggcggtacggcggcgacgtgcagctgctggtgagcagccacaagccgtggtgggccgccaagtacatgccggtactgcagcagttgagccggcacgagctggtggacgcggacgccgacggcgaggtccggtgctacccgcgcgtggtggtggggccgacgttccaccgggagctgggcgtgggcgcggagacgaaggcgcccggtggcgaggaggagggggtgtcgatgccggagttccgcgcgatgctgcggcgcgcgctggggctggagcgcgcggcggcggcgccgagcggggaccggtgggacgtccggcggcggccgcggctgctgatcatctcgcggcggcagtcgcggcggctgctgaacgagcgcgccatggcggacatggcgacgagcctggggttcgacgtgcgcgtgggcgacccggaggcgagcacggacgtggcgcggttcgcgcggctggtgaactcggcggacgtgatggtgggcgtgcacggcgacgggctcaccaacatggtgttcctccccgcgggggccgtgctggtgcaggtggtgccgtacggcgggctggagtggctggcgcgcggcatgttccgggaccccgcggccgggatgcaggtgcactacctcgagtacgtggtgcgggcgggcgagacgacgctgagcgaggagtacggcgaggacgacccggtcatcagggaccccgccgccgtccacaggaaagggtgggacgcgctcaaggccgtgtacctggacaagcaggacgtccggccgcacctgggcaggctcaggaacaccttgctccaggcgctcaagctgctgccccatggacggcagagcaccgactgatcatccttggcttgctggcgtcagtggtcacggtcgtgcagatggtgtggtccaaagctaagattaattggcaaggaccttgaattcgaatgggccgtgggtttgttctgtaggtagatgctacatagctacagtagataggttttaatgatgtcattacatgacagatcatcatgtggtcattaatcttctttttttttaaaaaaagaatttgttgtactcttttgcccttgccatgtaaacacaatcacgttgtgctaggtttttttttgacaatttagctgttacgaaaatctagatatcgcatggcttgaatacggaggaagataaaggactcttcttagtttaggatacaaattggcggtttactcgtgtcgtg

SEQ ID NO: 31856 - DNA, 2037 bp, Zea Mays
gagtaagaagaaagagggcggcggcacggcagagccaaagccgaggcgagccgagcagtacatgcatcccgcttcccgcattcctcatcgaggtccggtccagcagccttttgcgccttcgtgtccctcccctccactccctcaccgggggctgggctggtggggagtggggactgggggcagtcgccacgccgcagtccattctttcgtcacccatcgcagctccaacacctctcgctagtcgtcatggcggcttccgcggcagcgttccccctcccaccgccgacgcctcctcttctgaaacaagtgttctccctatggccaagacatcacttcctcctggattccggtttcatccaactgatgtagaactcacagtctactatttaaagaggaaactactgggaaaacacttacgctgcaatgctatcactgagattgatctatacaagttcgccccttgggatcttccagagagagcttccttggagagtaacgatctagtgtggtatttcttttgcccgcgcgataggaaatattctagtgggttaaggactaatcgctcaactggagttggatattggaaagctaccgggaaggacaggccggtggtatataattctaggactgttgggatgaagagaactttagtgtttcatcttggcaagccaccacgaggtgatagaactgactgggtaatgtatgaatataggctggaggacgaggaaatagctgcttctggtgttaaactggatgcctgcgttctatgcaaaatctttcagaaaagtggcccagggcccaagattggcgcacagtatggtgccccattcaatgaagaagactggaacgatgccagtaatgtagagtgttctccatgtgtgccttctgtggccccttgcgcacctgaatcaagtcgtggtgggttgaattctgctggtcaacgcctggctgtgagttatgatgtcaaggtttccttgggctcctcggcagaaggtatcaacagacctgctgtcaatggagttcatcctgtcagaccttctcctgatgctcctaatgactgcatacacattcaattgctggctgaggttatgagatgttcctcaacctcaatgcatgttttacgtactgctggtgacgatggtttgctggctgattcaactgctgactacagtagtgataatagaatatctttggatgctattgaaactatattctgtgaagtggatgagcttgggccccaggctatggtgaacaatactaaccattgtgactcatgcggtgagtatttgattcaccctacgatggtggcacgaggagctgaacagtacttagagctaaatgacctgtccttttcgctcaccgatggtcctgattcctgtggcgtgcttttctctaatggtgtatctgttgagcaactaccggatcttgagctcaggtttgagcagttctctcctgaccacatctccaataccgctattgcttccacatcaacaacggttggttcatctgcttcagtgcccttattggaggatcacaggacctgattcagaattggagtcatctggcgcacatgttaattgaatctaggaggatctgcaggacaaaggcataatgctccctttttttcaattttcatgaagttagaatttttttttggatgaaggcacggattagtgaccacttggcacagaaatatgtttgtgttgcggcttgtgaatccaggaccatttctctgcctgtagttttgcatggtagaactagatgggcaacaacaaaatgtgttcagtattgaataacgcactcactgcattaactactttgcctagcttagtatagtattctggatcttgaggcagggtagaagtgggggtgtgggacaatgtactcacagcttgttgtcatttagcagcaatatcttgtttcggtaacctgtggcaatatcttgtttggttacctggatttgctagtgcccaggcaagatgatgttttcgttgacgccataataataaatagcaatcgattttatttgcaaggacg

SEQ ID NO: 31857 - DNA, 2628 bp, Zea Mays
aagttgttggcgcacgggcacgccgccggtgcacgctcgccgcctgctctcttgtctgctctgctcagctcaggcgacacggcgcgctccgtgccgcccacgaaacctcatcggcgtcatcctcatcaatccctgcctctgccgtccgagataaccatgctccacggtctctgactcacccctgcatcttgccgtgtagccttcttgtacagcttggactggactagactggaggtggagtggagcttttccttctccaaaatccaaatcaccacatccccccattaatttaaggggtttttatgtccaccgccgccgccagcgccaactaaacccgcgacgacggtcgaccatggcgtcctcgctgctctcctcccccgctaaacccaccatcaccaccaccaccaaaacgaccccggccccaagacccgcccgctccgcccatgtccatgtcctctccgccgcccgctgcctccgcctccgcctccgcgcgtcgtcgcagcatcctccgcctccgcccaccccgcggtcgcggcggccggattacgtcccgaaccgcatcgacgaccccaactacgtgcgcatcttcgacaccacgctgcgcgacggggagcagtcgccgggcgccaccatgacgagcgcccagaagctcgtcgtcgcgcgccagctggcccgcctcggcgtcgacatcatcgaggccgggttcccggcctcctcccccgacgacctcgacgccgtgcgctccatcgccatcgaggtcggcaacccggcgccaggacccgccggggaggaggacgccgtccacgtgccggtcatctgcggcctctcgcggtgcaaccggaaggacatcgacgccgcgtgggaggccgtgcgccacgcgcgccgcccccggatccacaccttcatcgccaccagcgacattcacatgcagcataagctcaggaagacgcccgaccaggtggtcgccattgccagggagatggtggcctacgcccgcagcctcggatgcactgacgtcgagttcagccccgaggacgccggcaggtcaaatagagagttcttgtatcatattctaggggaagtcataaaagctggagctacgactctcaatatcccggacactgtcggatacaatcttccttatgaatttggaaagttgattgctgatataaaggcaaacactcctggaattgaaaaggctatcatttccactcattgtcagaatgaccttggtcttgcgactgccaacacactagcggagcacggcagttagaggttactattaatggtattggtgaaagggctggaaatgcttctttggaggaggttgtcatggcaattaaatgccgcagagaactgttagatggtctctatactggaatcgattcccgacatatcactttgacgagcaaaatggtgcaagagcatagtggacttcacgtgcagccacataaagctattgttggtgccaatgcgttcgctcatgaaagtggaattcatcaggatgggatgcttaaatataaaggaacatacgaaattatatcgcctgatgatattggtctaacacgtgcaaatgaatttggtattgttcttgggaaactcagcggaaggcatgctgtgagatctaagctagtagagcttggatatgaaatcggtgacaaggaatttgaggacttctttaaacgctacaaagaggttgcagagaagaaaaagcgcgtaactgatgaagacttagaagcgttattgtcagatgagatattccagcctaaggttatttggtcccttgctgatgtacaggcaacatgtggtacacttgctttatctacggcaacagtgaaattggtagcaccagatggagaggagaaaatagcatgttcagtcggaacaggtccagtcgatgcagcttacaaggctgttgacaaaataatccagattccaacggttctccgagaatacagtatgacatcagtcacagaaggcattgacgcaatcgcgacaactcgggttgttgtcactggagatgtgagcaacaacgccaaacatgccctgactggccagtccttcaaccgctccttcagcgggagcggggcatccatggacattgtggtgtccagtgtcagagcttacctgagcgccctgaacaagatctgcagtttcgctggcgccgtgaaagccagcagcgatgtagctgagaccgcaagcgtcccgagcacagaatgagcttccgtttagttcacagtgacatgttcaaaatttctggaaggatcttccattgagcttaggacaggcaggaagtcttggggcctatgtagtgtacaatttatgtgtgtcatatcccgtgctcgttgccagtttgtattgtaccatatataaaccatagaatatgttgccatttagaagtctggccaaggtcagctgtaatgattcacatgcttatagcctggaaacattagacattgaaaacccgagcggtgaataaaggatgcccaaggtagaaactgtgatgaatcatccatatcagtgttgtgatgccagcatgaatattcattcggcgaaccttacatgcggtcagccggacaacaccagaatcggaggcatgcatgatccacgtagcctagaatcttgttg

SEQ ID NO: 31858 - DNA, 2301 bp, Zea Mays
gatgcgggtggccgctcccctcgcgcagccgcacaccgcccggagaaaaggttccaccgtctctaccttgccccgaccggaactggaacccctaaaaatttccctttcgtacctttccccttcctcctcccgtccaccacaccccggctccaccccgtgcaaatccgctggccgcagcaagagaggtcgaggagggaaacagatcgggtggcggcaaccggtagccggttccgctggcacgatgggcggcgaggccgagggcggggagcggcggctggggcgggtcctgagctttgggatcccggacacggcgctggggctagtgatggggtacgtggaggacccttgggaccgcgacgccatctcgctggtgtgccgccactggtgccgcgtcgacgcgctcagccgcaagcacgtcacggtggccatggcctactccacaacacccgagcgcctgttcggccgcttcccgtgcctcgagtcactcaagctcaaagcaaagccccgcgcggccatgttcaacctcatctccgacgactggggcgggtctgcgtcgccgtggattcgacagctctcggccactttccactccctcaagaagctccacctgcgcaggatgatagtatccaatgacgacatcaacacgctcgtccgcgccaaagcccatatgctcgtgtcgctgaagctcgaccgctgctcaggcttctccacgccctccatcgcactcatcgcccgctcttgcaggaaactggaaacacttttcctggaagaaagcatgattgatgagaaagaaaatgatgaatggatccgtgagcttgctacgagcaattctgttcttgagacactgaatttctttcagacagatctcagggcatccccagagtatcttacccttcttgtgcgcaactgtcaaaggctgaaaaccttgaagattagcgagtgtttcatgcctgatctggttagtttgttccgaactgcacaaacactacaagaattcgctggtggttcctttgaagatcagggtcaacctgtggcagaggatcactgtcagatagttcagcgctgccccaatctggaaaccttagaggtgagggatgtcataggggatcgtgggctacaagttgttgcagagacctgcaagaaattgcagaggctcagagtagagagaggagatgatgatcaaggaggtcttgaggatgaacaaggtaggatttcacaggttggggtgatggctatagcccaaggctgccctgagttgacatactgggcaatatatgtatcggacattacaaatgcagctctagaggcggttggtacatgcagcagaaatcttaatgatttccgccttgtccttcttgatagagaagcacatataactgagttgccactggacaatggggttcgtgctttgcttagaggttgcaccaaactcaggaggtttgcattttatgtgagacctggggtcctatctgatgttggtcttggctatgttggagaatttagcaagagcattcgatatatgttgcttggcaatgttggtgaatctgataatggaattatacaattatcaaaaggctgcccaagcttgcaaaaactggagctgaggggttgtttgtttagtgagcatgctttagctatggctgcactagagctcaagtcactgaggtatctgtgggtgcaaggattcaggtcatctccaaccggaactgatcttatggcaatggtacgccccttctggaacattgagtatattcttccagaccaagatgaaccttgcccagagtataagaaacagattctggcatactactcccttgctggaaggaggacagattgccctccatcggtaactccactttacccagcagtttgagcgtagatacttgctttttgctagactgaatctcatggtactaagctccattgctcccacaatctgtgaaatcgatggttcctgttgatggggacatgcagacgttccattgcacataaccccagagctaagctttaagcaggacgacagctcggagctgaggctagctgagaacaatcgtgaatacctgaaggcagcactttgtggatcagattggcctagctgtccagtatggaaatgtaaactttgccattttgaatagttttggagaaacaattttgtaataatttacccctgtttagtgtacattattgattttcgtttatatgatgatgttgtattgctttatttaacatttaagtcaattagttaatctacagtctgacttgctgtgattcgatgaatttatggattttccttgctgctcg

SEQ ID NO: 31859 - DNA, 1076 bp, Zea Mays
cggcaaggcgcggaagtgtggcccgactccccggccccattcctgaccgtcagattacgatcgggaggctcaagcgcaccaactggcggcgccgccccgccgccggagagctctccggcgtcggtgcctcaccgtctcccgttattccggcgccttccgttcctcgacagaagcggggctatggtcgccagtcgtcacgcgctcgccgcacgagcaggagcaggagcagggactgctggccggttagcctccagatgggtagctgttctgcgcaacaactggaggagcgcggagggagaagggactaaacacgaggggggaggtggaggaggcggtacgactggtgagcggattaaattggctttccatgcactggacaaaggacttcatggcccagctctctccaacgaaggagaagacggtcttgatatgtgacaaagtctgcgaacaaatgtataggcaaggattataaacatatataatgaagtgggggatgatctgtgtatcaacatttctatctattcaggaaggaaagcattgcaacttgccagcagctgataaacgcaattatgacaccagcaaagaaagtggagaagcttgcgacgaaatgacccagctgcagaagagtgaacttaagatgcagatctgaccacagagcttcaaaagacttgcatcatagtcaagtcagtgtcgaaggccccaacctcttgattaaggattgatctcagaaacgcgagccgcatgcgtgctaactgtctctcacttgagtatatccagcaggagatctctgcatgcggccaattcatccgataaaaggtctagatggggaaacaacaaaggcgtggcttactggaaatttgatttgggttgagaaaactgaaaacccagcagtgatcctcccagatggagtaaataagagaggaggagggaagatgcttaattttcattaatctgcatgttatctctactaggaaacagcaacaagccattccatcaaatgggctaatcaggctgctgaagatctccgcatctggctcggtggtggtggttttcgacggggtttgatgttttggctg

SEQ ID NO: 31860 - DNA, 3259 bp, Zea Mays
cgactactttaattgctgttatcgcatttgaggaggggaggccgggaccccggaagtctgctgctgctcctgctttctagtacctgcccacctgcgcttgcatctgttgcttccctgctgctggcctgcgaatccacctgcatttgctgaggctcatcgccgcgtgtactcctgctctgtgggaggattcaggaaatgctcggagttgcattcggtggctgaaacttctagaagggtttgagagagtaagaagaacttgaacctcagcggtaaagaagaatatggcagacacggtcacgggcagttcaaggaggtcacaagatgacactgcaacattaatcccacacagtggcaatttgggaggatcaagccggaagggcgtgaaggccgccaggttcaaagatgatgatgaggttgtggagatcaccatcgtacagcgcgattccatggcaatcgaagatgtcagggtagtcgatgatggcggctcagggcatggtggtgggtttgacggcctgtcacttgtgtcaccttcctcgtcaaggagcggcaagctagcatcaaagtttaggcaggtgaaaaatgggctaaagatgaataactcaagcaataaggcgccacagacacagttgggaaagaacgtgaggaagagattggacagaagcaagagcggtgctgctgttgcgctcaagggcttgcagtttgtgactgcgaaagttggtcatgatggctgggctgcagtggagaaacggttcaaccagctacaagttgatggcgtgctgctacgttcgagattcgggaaatgcattggtaatttcagtggtcctattgaattcgtatctgcatacagctatttgaacaacactaatacaagcattgctttggattgtgcagggatggatggatctgatgagtttgcaatgcaagtcttcgattcattagcaaggaagagagggataacgaagcaggtgctgactaaggatgagctgaaagatttctgggaccaactaagtgatcagggttttgacaaccgtctgcggacattctttgatatggttgacaagaatgctgatggaaggatcacagcagaggaggttaaggagatcattagcctcagtgcatcagcaaacaagctttccaaactcaaggaacgagctgatgagtacacagcactcattatggaagaacttgaccgtgacaacctgggatacattgagcttgaggatctggaggcacttttgctgcaatcaccatctcaagctgctgcaagatcaacaacacatagttcgaaacttagcaaagctcttagcatgaagcttgcatcaaacaagggcacaggtccattttaccactactggcaagagttcatgtacttccttgaggagaactggaagcgcatttgggttatgactctctggctctcaatctgcatttgcctctttatatggaagttcatccaataccgtaatcgagctgtatttcacatcatgggttattgtgtgaccactgcaaaaggtgctgcagagactctcaaattcaatatggccttggttctatttcctgtttgccgaaatacaatcacttggattcgatcgaagacaaagatcggagctgttgtgcccttcaatgacaacataaacttccataagtgatgctgcctatgaaccaatgaagcctttctttggagacaaaaggccaccaaattactggtggtttgtaaagggaactgaagggtggacaggtgtggtcatggttgtacttatgactatagccttcgtattggcccagccatggtttcggcgtaataggctcaaggattctaatcccctcaagaaaatgactggcttcaatgccttttggtttacgcaccacttatttgttattgtgtatgcactgctcgttgtccatgggatctgcttatatctaagcaggaaatggtacaagaaaacgacctggatgtaccttgctgtccctgtgctcttgtatgtaagtgagcgcattcttcggctatttaggagccatgacgctgttaggattcagaaggttgcagtgtatccggggaatgttttggctctctatatgtctaagccacctggattcaggtaccggagtgggcagtatatcttcataaactgccgtgctgtctctccatacgaatggcatccattttccattacatcagcaccaggagatgattatcttagtgtccacattcgcacaaggggtgattggacttcacgtcttaggactatcttctctgagccgtgccgccctccaactgatggagaaagtggactcctaagagctgacctttccaaggggatcacagagagcagcgccaggttccctaaactcttgattgatggaccatatggtgctccggcgcaagactatcgggaatacgatgtgctcctgctcattggactgggcattggagccactccattgattagcattgtgaaggatgtgcttaaccacacccagcatggaggatctgtttcaggcacggagcctgagggcagtggcaaggccaagaagaggccattcatgacgaagagggcctacttctactgggtgaccagagaagagggatctttcgaatggttccgaggggtcatgaacgaggtggctgagaaggacaaggatggagtcattgaactccacaaccactgctctagtgtgtacgaggaaggggatgcacgttctgcactcattgtcatgctccaagagctccagcatgcgaagaaaggggtcgacatcttgtctggaactagtgtcaagacgcacttcgcgcgtcccaattggcgaagcgtcttcaaacatgttgcagtgaaccatgagaaccaacgcgttggagttttctactgcggtgagcctgtccttgtgccacagctacggcagtggtcagcagacttcacccacaagacgaacacaaagtttgagttccacaaggagaacttctaatggcataactggagaagctctggacgtggtcctctaatgatttcagaatgtgaattaccagggttgtaatatatatacgagtagaataaaatgatgggagttattttgttatagatgtcaaaagtcaaccatgttctttttgcaatgtgctctgtccatccctgtttactcctctatgccgtctaggcgaagtagataatgtatcttttgcatacaagcaacattagaaggtgtaacacatgattttttttttgataaaggaagattttattaataacttcaagcacattacatcgag

SEQ ID NO: 31861 - DNA, 1214 bp, Zea Mays
caccccaagaatcaatctgcattacatatgttttcactcttcgctgctgaagattgattcggacgagcagccgatgatgatgcacgggaacgggcacgggcacggccgtgtccacccggcgtcctccagctccgacttctccggcgagatgaaccagtcggccgtgtccgacccctcctccagcccgctctacagcttccacttcgagaagcccgtcccgccgccgccgcccgcaggcacgtacgtggtgcaggtgcccaaggacaaggtcttccgcgtcccgccgcccgagaacgcgcgcctcttcgaccactacacgcgccgcgccaggcgccgccgccgcggcagctgctcctgcgcgtgcctgctcgtcggagccgcagtcgcgctcgccgccgccctcgccggcgtcctcgcgtgcctggtcctcgggccgaagccgccggcgtacgcggtccaggcgctggccgtctccggtctcgtcaacgcctcctcctccccggccgcgctctcgccggggttcgacgcgaccgtgcgcgccgacaaccgcaacggcaggctcggcgtgcggtacgaggggggccggggccgcgtctccgtgtcgtacggcggcgcgctcctggccgacggcgcgtggccggcgctctaccaggctccccggaacgtgacggtggtcgtggcgagggcgagggggtccggggtacggctgtcgcggagcgtgcgagggcagttggccgcggcggaacggctccggtcggtgccgttcgacatggacgtcgacgtgcccgtgcgcctccagctcggcgtggtcaggacgtgggccgtgccgctgcgggcgcgctgcaccgtggcggtcgacaggctcgcggccgacgccagggtggtgtccaactcgtgcgacgtcaaggtgcgcctcctgtcgtggtggaggaactgacgatggcgccatggtggcggattacatacttgagcacttcttgtttggttttaggatgcgttttcccctcatttgtaagctggtttggttccccaatgtggatcttgtcatcgtagtatcatatcaggaacgctgtcaaatcgtcttgcgactaatgtcatgttggtgagttgctcaagagtcgagactgaagaattgactaatgttttgttcaagtgcaactcaaatttgtacttaccatccaactaatttggacttcaaacaattcttatgcttc

SEQ ID NO: 31862 - DNA, 7878 bp, Zea Mays
gggattcgaaatttcgaacacgcgccgcctgagagagagagagagagtgagagaaagagagagagagagcaggagagatggtcaggcctttgtgatctcccgcggggctggaggtgtgcggggatggatctcgcggggatgaagcggcgggagctccaggcgctctgcaagcggcacggcctccccgccgggggcaccaacgccgacctcgtcggacgtctcgacgccgtgctttcggggcccgctgttgtggaggaggaggttgccggagtgccggcgaggaaggggtgtctgaagcaaacgggcggaggtgccaccgaggccaagaaggttacttttggggcggaggtagggaaggccaggagactgaggtctcgggtcatatggtcgccggtcgttgccaagacaagggggaagtctgctcgagccggtactgattctgctgctgaagacggtatttctgcagatgtgggcgctgatgtcccagtgaggcggtccaggaggaattcgttcaatcctgccgaggctgaggaagcaggagaggctgttgctgttgacaggaagcccaagcgcaagaatcaggagaatgacgagggcgttgctgttatcgctcaggctagagttacgagaaggtcaaatttggagtggtctgctactgtattgcctcctgctgttgagaagaagagagggaggcagaatgcagctgagtctgatgtgcagaagtccgctctggtggaagtaacagctaggactacaaggtctcgctcaatcgtacctgttgtggtgccacccactgtggttgagaacaagaggaggaagactggagatccacaaacaactgtagagttgactatgctttcagatgtgcccagaagtgattttcctgccaccaggtctttaaggaacaaaattgtccacgttaacaacagcgtcgtggacgaaactcacactaccaggcagttggaaaacaagatgcgtccgtctactcgtaggcatcaacaggttgcatcttctccggaggataaaggtcaaaaaattcctgctaccagtaagtcccctctactgaggtggtcacggagaaactattctgaggccaatagtgcaaattcagtaaacatcaaattggccaaagactcgagcacagctcagccattggcacaccataattctcattctgaagatttggagaaacaaccagcagttaaagaaccaattaaacggtcaacacgtaaatctattgctttggctgcacttgagaaagagaaggatgtaattgaaggaaagaaccctgaagcacatgttaggcgatcaacgaggaaatcagttgtgcaggttaaagataccaaaagtattgttgaagagactcaatatgctaacagtgaagatgtggcgaagcaaccagcaactaaaggacctgctagggggctgagacgtaaatctgttatcacagaattgcatgagaaagagaagagtctcattgccgaaaagaacatggaaacagatgaagcgatattaacgcggaagcctgtaatcccagttaaaaatattaaagctgttggtgaaggaattcaaattggtaagggcaaagatgtggataaacaatttgttgtgaagcaacctactaggcgatcatcgcgcaaatctgtgctgcctgatatgcttgagaataatagtggacttctagcacccaaaatgaatgctgagatgaatgttaggagatcaacacggaagtctgttcttcctgacatgcataatgagaagcaagatcaccataaaatggctagaaatgagaacttgcaaagtggtaaatatcaagatggtgagaagcaacagaaagtaaaagattctattaggcaatcaaggagatctatcgctacagtgctacttgagggacaaaataatgatgaaggaaaaaagttcaaaaatcctacgaggaggacaacacacaaatctcatgcccttaatgcagttgaagaggtcagcatggatcacattgaagttggtgaagaaggcttgaaattgaggaagcgcagtaggtttttgctggaaatatcatcttcagctaatgtttcctggaagcatcagaatgcacagatctctaatgaaaaagataacacagaaggatcgcagcaggcatcaaattgcacaacttcaaagagaaggtcttcaaagaagagacgaacaactgctccagaagaagtgatgcctttcaaggtggcaaatgatgacatagttatcatggaagaaacaaaggacacacttgaatataataatgagtctagtagtaaagttcaagaaatttgtcaggttaatgctgcaagagaagagttctcttcaggtccattgcttgtaacagtagctcctagtgacgaaatttgcacagtgcagagtgtagctgtggtgatacctgggtcagaatctggtgacgatgcaaatcaaagttctgataagagtaagcaacctcaggaacattctgtcactcaaactgttgatgaccatttatctgaaacaagaagtgggaaattagatcaatcaacatgcatcacaggattagtctctgacaattgtgttgtctcagaggacaaaacattgatgagtgaagaccgtgaagagcaaagccctgtgtccggagaacagagagttagcttggaagcaaatgccaatgagcctgaggaaaagaacctagctaacgtcacatcaactgatctccacaccaaaagtctgcagcatgatattgacagaatagctaaagagactgataaagatgttttgtctttggttttccctattgaagagcatgaagaaaaatatggagtgagccctatagctgttgaaaagtgcgtctgtcgtgaagcaagtgcatgtgaatctgcacgaaaacccctaaccgttatcttttctaacaatctccacaccaaacatctgcaacatgattgtgatgtgctaattaaggagactggtgaagaagttttagctcaggagaattgtaatgaccagcctgttcctgcccagactgaccaagaaattaagttaaacgatgaacttgctgatccggatgttttagctcaggagaattgtaatgaccagcccgttcctgcccagactgacctagaaattaagttacacgatgaacttgctgatccggaccatgaagagcaaagccctgtatccggagaacggagagttagcttggaagcaaatgccaacgagcctgaggaaaagaacctagctaacgtcatatcaattgatctccacaccaaaagtctgcagcatgataatggcagaatagctgaagagactgataaagatgttttgtcttttgttttccctattgaagagcatgaagaaaaatatgcagttagccctatagccgttgaaaagagcttccgtcaggaagcaagtgcaattgaatctgcaggaaaacccctaactgtcatcttttctaacgatctccacaccaaacatctgcaacatgattgtgatgtgctaattaaggagactggtgaagaagttttagctcaggagaattgtaatgaccagcctgttcctgcccagaccgacctagaaattaagttaaatgatgaacttgctgatccggatgttttagctcaggagaattgtaatgaccagcctgttcctgccaacgagcctgaggaaaagaacctagctaacgtcatatcaactgatctccacaccaaaactctgcagcatgataatgacagaatagctgaagagactgataaagaccatgaagagcaaagcaatgtgttcggagaacggagagttagcttggaagcaaatgccaacgagcctgaggaaaagaacctagctaacgtcatatcaactgatctccacaccaaaactctgcagcatgataatgacagaatagctgaagagactgataaagaccatgaagagcaaagcaatgtgtccggagaacggagagttagcttggaagcaaatgccaacgagcctgaggaaaagaacctagctaacgtcatatcaactgatctccacaccaaaactctgcagcatgataatgacagaatagctgaagagactgataaagatgtttcgtctttggttttccctattgaagagcatgaagaaaaatatgcagtgagccctatagctgttgaaaagagcgtcagtcgggaagccagtgcatgtgaatctgcaggaaaacccctaactgtcatcttttctaacgatctccacaccaaacatctgcaacatgattgtgatgtgctaattaaggagactggtgaagatgttttagctcaggagaattgtaatgaccagcctgttccggcccagactgacctagaaatgaagttaaacgatgaacttgctgatccggaagttttagctcaggagaattgtaatgaccagcctgttcttgctcagactgacctagaaactaagttaaacgatgaacttgctgatctggctatggaatcaggttgtagcattactgaaaggaatgaagggcttgttgctcataatcttgatcaagaaggtttccttgaagcaacaccagagtgcaaacaggaatgtggtttgcctgaggagacagtaatttcctcaaaagaaacaggatctctgctgtgtgcagatcaatcaccaattggtctggaatctttattttcgcaagaaagcatagttgaatcagtggggcattgtgcacttgcttcagcaacaactcataccgaaaatggctttgatgattcaaaagattgccataacaagtctgcacttgaaaatgttcatgtgccagaaccttgttcacacaatgatactaaaggaggcatttttaaaaatgttgattgtatgcatacatcccagcgagatgatagaatggaaggagtaccagaggctaacactgatgaagaacatgttctgtcagcctttttgctggatgcaaatcacctaaacgtagtcattaattctgaagaagtggtttgtgagggtgaagatagtaaggagcttctccattcggaagactgtaaagcttcatccgagaaaacagatgtgaatgatggcaatgtatatggtattagtgatgctgtagtgagatgtgcactgcatgctccagccgatgataattatgagatttttttgggtcccaatactgatgtaccacgtcaggtttataatgacggatgcagtgatgtcaaagaagatcgatttgcttccaaaccctggacaattgatattattgaggatgcctctgtcaaagaaagatcaaatttaaaagattggcaacttgattccaagttggagggcacagaaatagtggaatctggcctttacttcaataaggatattggtaacattttacatagtggatctattggtgaaataactccatctggttctggtttatcaaaagattcatctgtggactatagaggggaggttttagatggcttctcaatggaagcatctcttgaaaggtcttctacacgtggggaacaaaatggttgtagactagatgctattgagaatccttcaattactttagcaacttctggttataagcatgaaggtgctttatctgaggaagcagtgtacacaaagaagaattacgctggaacatgcttgtcaaatcccagggaattaatcatggagctgcaatcccatttctcaaaggaaaacataaatgaatctgatcctcatgacagccttgtattcccaactgctgaaaattcagcagatgaacagctggttaaagtacaccatggttctaatctgtctcagttaggattaactgatctgttggatggaccaattgggtgttccaataccgacgtgttgtgccagtgtgacaatcataaaaatcaatccaatgaggacaaggtagaggaagttgaggcggtgtctgctgctaaatacatagaaagtgaagttgtgctgctcccatctcaagagagatcaaatttgaataatgagcagcttaacaccaagttggaaagcccaaacattatgggatcttgccttaactgtgataacgatgtttgtaatacttcggacaatggatctgtttttgtcattggtaaaagaactccatctgcttctggcttaccagaagattatcctaaggatagtgacttgcaacaaccggttttagatagcttctcagtggtttcatcttttcaagacaatatatctgggaagaaaactgtttctggtgtagcaggcagtgagattctttctttaagtttagcaactcctgattataaacatgaagatggtttctctgaggaagcagtatgcagaacaaagaattatactggaacttcctcggtagatccgaggcatttagacatggaggggcactctatttactctgagggaggtactgaaaaatctaatctgcaagataatcttgcatttctaagcgctgagagtggaaaagatgaacctattatttgccatgttgagaaactggttgacgcacatgcttcttcagatacataccaaggtccttgtcaagatctaggcagacatgaagaacaagagagctgcatgtctattcctatgcaagccaaagaaagtggaggggttttgaggtctagccacacgaaagggtcagttacagcagcccaaattgatttggcaggtgatgcccatcttattgtgagtgataatgctgctgccaagcaagtgtttagtgaggagaaagaggaaacaaaatctatctcttcttcagatattgatatccttcatgaaaaatcatactccagtggacacgatgaccatgctgcttgtgctgccgaaactcagttctaccatccacagaaagcatctatatctgatggactacatttgggtcctagttctttgcaagtagaatcactggatgctttggatagcgatatactgtatgttaacacaggagttctcgagcagcatcataaagagggttactatgaacccagtgtctaccaaatcacttcaggcatttgcacaatgtctgaagctgaaccattcgaagttttagaaactggaaaagatgtaaaaacgccatctaagctagatgagcaacttaatcctgggttggacggagatgaagctgagaaacacagcttagactgtggtacagacaccagtcctgtgatgagcaagagaaccctttcttcaccaggatcaggaccatgccagcagtatgtaaatgaaagcaccaccagtacacagtcgactgataatcacccaaacgacctacccgctccgagatctcctgaacaatccgcgtgttttcagaatgacaacgattcgggttcagcatttgtcaaagcagcaggcgaagaggtatagatgaactttgcggtaagctgcagagtttcaaagtttccagcgccgtaaaaggaagctacgtagctatgggtgcacctcgtccgaagcctggggacagcacgagccgatctgcagccgcgctgctcaggaacatagagaacacaactgctgttaaagctggccgtcctcctgtcaagccaaacgccgatggtaaggactcgtctaggcgagccctgcagcccataagcggaaggcctgacagtaggtagttcggcggttccttaataagtgtgtcgtgtttgtgttcaaccctttgttgaaagccaggtccgtgtatttgtgcagcttgttgtcatgaagctgctgtgtgcgtgtcatttaacataagcgtgcgtgaagttgtgttatggaagtggctaaatatgtgttcgttaggaggtcaattggcttgaactgaccctgctgttccgtgatttctgtctaaatatacttgtgtggctgtgtcactttgattggccttatcgatcacatgcaatgggatcacatctagcgtgctctagggtcctcgtttggtaatcgctg

SEQ ID NO: 31863 - DNA, 1907 bp, Zea Mays
ggacgaggagttcccgtatctttgcgagaacagcccgcccaatggccatgagaaccaacgcctcttccagccgccgcttaccccgtcgtcgccgcgcgcgttgccactggactcagcacctgagcctctgccaccgtcaattgccccgccgccggctcctccgtgggcacctggtgcctgcacacggggcaggagctgtgcatctccagccacggcaggatgcactggtcgtggaaccggtgcttgcacggcatctcgcgctccgcgccgccaccggcgacctcgtccaggcacatggggcaggtggttgtgtttcttgtggaacggcccaactggttggtaacttggtatccagtccattgtgcatcacaacaaggaccaaataaaggcatagggaaaaagaaggcaggactggcaagaaggaaacagaggtccgcgagcaaacgccttcaagcccatctcggtagccggagaacgagcagcagcggaggcgatggcgtccccggatcccggccacacgccggcgcaaggcgaggaatctgcctccccctcctcgtggcctccccgaaagctccaggtctcgttccctccttattagcacctcataggaaaaaaaaatactattggattcgtgttcgtgcccatccttcttcatctcagatgcagtatttggtatccttaatttcggttgaaatgatctgtatttcgcattacttgcgggcttggttcatacgtgttggaactacagttacgtttttctgtgttctagacttttctttaactaagttaatcctgtttgaatcatcctgtttcatttgcagtgagaaaattatagaacctatccattgatgtctcatttatctgtattgtgagaaaggtcccacaaatattcgttttagatgttgttggattagcggagaagaaacttgcagttcccctaaggccctaagatccattattttttgttcttttgttgtcacattcttcctgttgccttgtagagtttcacaccagggctgtggtcacaatacaaagcttatgaggatgcagttgtggagaacattaaaggaactattgcggatgctctggttcttgtgagagagcatcaggcggaggcaattggatgtgccactgttgcaggattcattctgttcagaggccctcgaagatttttataccgcaatacctttggccgtttaaagactgagaaggatttactgaatgatgccgagcaaagtatgatggagtaccaaacatctattcagaacttgaagaaagaatcaaaatacactcttgacaaagtagctatcggtgaaagcgatgtgcagcgtgggcgaactgatctgagatctactgggaagcagatacaatctcttataggttccatttacaaagcagaatctacagctgcaggtctgatggatagactaagaaccattccaaccaggcaatctctcgagctgcgagcagaggtggcttccatggcctccgatttgaagaaccagaggtgtgccttgcaggaaaggatcaacaaaatatctgaatatggtgtccgtgtctgaactgctgcaccgtctgtacatttcccctcatagagcctcttttggtcctcccgtacaataaactgtgaatccaccgtgaggtgcgcgttttggttagacaggttccgattctaaccatattttctgtcagcattttgaatgctaggacagacatggtaactcatcacaaccataaattgttcctatcactttaacgttgagcattgctcgtttctgggaagcagatgggctgatggctactatcttatatatgcgattgcaaggaaaaactttgttccaccttgggtgctgtgcttcctgtatacaattctgctattccgtttcggaagaaaaaaaaaacaaata

SEQ ID NO: 31864 - DNA, 1333 bp, Zea Mays
gtggcaccgaagaaggcggcaaggcgcggaagtgtggcccgactccccggccccattcctgaccgtcagattacgatcgggaggctcaagcgcaccaactggcggcgccgccccgccgccggagagctctccggcgtcggtgcctcaccgtctcccgttattccggcgccttccgttcctcgacagaagcggggctatggtcgccagtcgtcacgcgctcgccgcacgagcaggagcaggagcagggactgctggccggttagcctccagatgggtagctgttctgcgcaacaactggaggagcgcggagggagaagggactaaacacgaggggggaggtggaggaggcggtacgactggtgagcggccactgcttcctaccagagcgatgactttgcctgcggggatggacaatgagaatccttggagaattggcttatcctggcgggaaggatatgcaaatttttgcctgattgaaggtctgaaggtctggtgcggcatagattaaattggctttccatgcactggacaaaggacttcatggcccagctctctccaacgaaggagaagacggtcttgatatgtgacaaagtctgcgaacaaatgtataggcaaggattataaacatatataatgaagtgggggatgatctgtgtatcaacatttctatctattcagcattgcgtgacaaagataagacattcaactttttcgtgtatgctgctccgatgatgaggataagtggaatgaccaggaaggaaagcattgcaacttgccagcagctgataaacgcaattatgacaccagcaaagaaagtggagaagcttgcgacgaaatgacccagctgcagaagagtgaacttaagatgcagatctgaccacagagcttcaaaagacttgcatcatagtcaagtcagtgtcgaaggccccaacctcttgattaaggattgatctcagaaacgcgagccgcatgcgtgctaactgtctctcacttgagtatatccagcaggagatctctgcatgcggccaattcatccgataaaaggtctagatggggaaacaacaaaggcgtggcttactggaaatttgatttgggttgagaaaactgaaaacccagcagtgatcctcccagatggagtaaataagagaggaggagggaagatgcttaattttcattaatctgcatgttatctctactaggaaacagcaacaagccattccatcaaatgggctaatcagtacgacaaccgtgcatgttaggaacgcacaaggtcaggtccggtctgcacgccacgcatgcaataggttgaagagcgcttacaagaccaaggcgg

SEQ ID NO: 31865 - DNA, 1245 bp, Zea Mays
cctctgggcccacagcggccagcaaactgcctccgtcctccctgcgggctgtgccgcctcttcttcgcgtcggcgccgccctcctcccttctcttctgctgctgatggaactggatcctcgcctctacgagaacgtctctgtcagcgacaatgatgtccgaaacatagttctatcttatcttatgcacaactgttttaaagagacggcagaggcattcctatctagcaccgggttgaatttacctgtcgactatagtgtggatgtggataagcgtaaaggtatttatttgcagcaatttttaattttgtgctagaagggaatgcccttaaagccatagagctgacagaagaaatggcacctaacttgctagagaatgatatggatctacattttgatcttcttagtctccacttcattgagctagttcgctccaaaaaattaagctcttgactttggccagaaaaaattgacatcatttcagaaggttaccaagtatattgagaaactagaggactttatggccctcctggcttatgaagagccggagaagtcacctatgtttcatctactaagcccagagcacaggcagaatgttgcagagggcttgaatcgggctgtccttgcacatgctaatcttccagcatattcatcgttggagagggtggtccagcaagcgactgtggttagacaatacctacagcaggaagttggcaaggattcttacccaccattttctttgaaggcctttctgagcaagtaaatgtgcaaatggtcacttcttcagaacagggtaaccacctctccaggccatcatgtacatgtacccttgtggagtgcatacacgatgaagtagtttatacagttgaggtgttgttgacaccacttatacagttgcaatggtgttgtactttgaaaaggagggtgctgtatgctgtctgcttccttgatttacattctgttttacttgtctctctgccttagacatggcgaaagcatgtatgtatgacctgttgagctattctgtgcgttcgttcggtgaactcagttcgagtcggtttgtaattggtcttttttattactaccgccatgtgcagaggctaaaggtccgaactctggatgcgtaagcgtaacgggttattctgtccatggtactcctatttgcgatttccatatataagggactgtgaattcttcatcacttgtagatgttgatataattttttcagaaaaaaaaatgttcagag

SEQ ID NO: 31866 - DNA, 1032 bp, Zea Mays
ttctgatgaatcagcttgattcgtttgcatgttgttgatggaatttataccagaatgggtgattagttctatcaacaaggaataagtaccttccatgaagagatgaaggaagcttcaaacatactgcataactgctcatctcgatccctagttatcatcgatgagcttggtcgaggcacaagcacacatgacggtgttgctattgcttactctactttacactatcttctcaaagagaaaaaatgcattgtcatttttgtcactcattatccaaagatccttgatatacagagagaatttgaaggttctgttggggcataccatgtttcatatctagccactaggaagcttttggaagtgaccgataaacaggtggaaactagcccagaggcaaatgatcttggagaaattattttcttgtacaaacttgttgctggagcttcagatagaagctttggacttaatgttgccctgcttgcacagcttccgtctagatgtatcaagagggcatccgtcatggcagccaaactgcaagaggagttaagtccgcgggaggaaatcaagcttcggaggacaacggatgcacaaactgtggacggaccatctgaaagttccgcagaagttggaaattgcacagaagacgatatgatgcagcggtccatttgacaactgacatattcttcatcagtgtgaagggaacttatcaggtatcatgtacctttttttgctacggaggatccctaatggtggtaagcattttgctggagccgtttgtgtaacccatactctgccaggatagcgtggttaagcattttggtcacaactcaaagcagtgcctgtgtgtagttggagtgaactccgtgatatatactggagtacttagtatgtaactctatattccgttcattaatttatctagaactcgtttcgttgatgtaaatgcagagaagggacgtgtttactttttttatatctcgtgctctacccgttttctttggcatcctggaccagggctggacaaaaaaaactcaa

SEQ ID NO: 31867 - DNA, 1014 bp, Zea Mays
ccacccaaattttcgtctatataccacgtgtgcgcgctggagtctggaggtgcaggcagcggataacgtgctaaagtgtcctcactgctgctctcctccgctccgcagctcatggcttcctcggtctccctccgtggcgccatcctccagcgcccccacctcacgccccgccccgacgcccgccgcgcgcccacgacgaggcgccgcgccgtgcctgcaaagatctgctgcatcggatgggaccccgagggcatcctgggcgcgccgcagggcggccacatcgcgcgcctcgagttccgccgccgcctcgagagggactccgaggcgcgcgaggacttcgagcgccaggtgcgcgaggagaaggagcggcgccgcagcgagcgcgaggataggcgcgggtgatcccggacacggacgccggcctcgtcgagttcttcctcgacaccgacgcgcgcgagatcgagatcgagatcggcaggctgcggcccaggctcagccaggacttcttcggccacgtctcgcgcgagatagcgcagatcaaatttgcagtcaccaggacagcggagatggaagacagactgatcgagctggaggcgatgcagaaggttcttcttgagggagttgaggcgtacgacaagttgcagaacgaccttgttacagcgaaagaacggctcatgaagattctgcagtcaagtgacagaaaatcgacactgctggaaatggtggagcggaacgagctcaatatatccatactaacacttctcgatgagaacatcgcgagcgcgaagacgagtaatcaggatgaggcggccgctttcatggaggacgtgaggtcatctcttgtgaaatatataacaatatagatctgggacgcttttacataccaatggttcgttcattgtttaggcatggttcgtttttagaagtgtggttgctgttcgttcattgagaaatatataacaatataaatctgaattatttccgcctgtttgtagttgggctgcttccgtctgt

SEQ ID NO: 31868 - DNA, 3776 bp, Zea Mays
acgtactctgtcaaacgatacgccgcgatgcttccagacgagcgccatccccttcctcgcctcacacgccgtcctgttggtcgtgcctctcttcaacctttttttcttgagcattagcgagagccccttacatggtgcagtgctagcatcgttgctggcgacctcggtgaggtcggatctgcaaaggttgcagctagcgcgcctacactacatcaacatggtgtggcatctcctttcgcagatccccaacatgctacgccgccggctgcctcattggaactcctgtgcaccgcttgcctttcttctcccattcaacccgcaggcgttccctggctcaatagcgcaactaggggatgtccgccgctacctccatataggaaacgacagatttagattttcaggtgatgcgtggtcgggatcccggatcaatcaaaataagtgtgaaataagtgtgaaatttgagaggctgttgaacttccagatcaggtaccaaccaaaaaaagtgacccttttgacggcgtattgcgtgggcaaggcatgccagtgcgacaatagagaaactaacggggagctctgttcgttctgctgattgcttatgattaggctcgcagtggtggtagctgggagagcttgggactggccagacgcgaccaactcacccatgtaataagacaacttttatacatagccgacagtacgcaacctcatgcgcaagatccttaatgaaaccaaagagctgcagcagataaccaacgacaagcagaaaaatcaggttgtacgcatccaacattttactttcatatttgctgaagatgtcaacaaacaaaatagacaagcagcccagacaatggagatgatgtatacgataattgcagatgagttcaagtcaatggacaataaggacatgcgccctgaagattacttgaacttcttttgtcttggaaaccgggaagaaccaccatctaatggcagcccagaatcagagaaatctacatataaaagtgcagagatagtctgtttttgcattttccttattcttaagggtatggcttagctcaacccttctgattacaccaaaactgaatatggttttggcgcacggaccttatgggaagctagagaagcatttgaagacgcagaaattactcatgttgacgatacagtagatcctgttagagacatggaaactattagtgaagagctcagactaaagttttcgttggattttgttgatttacaagatcagctgtacaacacttaaaccttttttcgacactattctgtttctattttctgcaggatatagagttcatgaaaaagaaacttgaggaccttgataagccaatgaagaggaggaatgataagctgctcaaaattgagcatgaattatattgatccagcacaatgccgaggagactggagactaaacttggaggtgctactgaaggatgtgactttgagtcaaagggtagcacatggagagcttgaattgaattcaagcttggatatgattggaaaatatttgtattagatcacctagaagggtgattgatgcttgttattggccaagcagacaataggtagtcagatgaagattgtaaaaaacaagcatgcttaacccttcaagaatgcacagtttgagcttgaatttggaaaggggatatgccacagttcagagttttttgaacagaatttctggagcagttgttcctataaaataatattttaggtcttgaagccaccaccgtttggattgacatgatctgtggtattctggtgatctcattatagcagacttcatttcttattgtgcttatacagtagtgtagcgggaagagaattcacattgcatgaaatcatgttgatagctaagaggtggaagttgaagtaagccgggaagggtgaggtattgggaactgtggcatttaaagttcagtaggcagcagtaaactgtagtggtgtggtcgtgtacataagatgtgcacattttgaactcaggcattctttattgagtgctgctagaattacattgagctccctccacttctgatacttgcctggttttgcgtcaattggatctgtttgtccgtcctcaacactgttgtctgtttttgctaatttgggcattatctatgacagaagaagaacgattatgaattatagattaaattgaacataatgttgttctaagaacaaaaacagattatttcactgaatattttctcatcgcaagatgtactaaatagtaggttcactacagtcttacagaagccaataacccacttgatcttgctataatgatgttcttagaatacttatagatgtgttggctggaacattagctctgacaagatagaagcttgtttgttctgttatttagtcatgtctgcccctcaaactactgaaacctaaaatctgaaactgaaaatctgaaaatataaaactaaaaatatgaaactgaatattgtatgtcatgtttgtgtcatgttttcttagactgcattgaactccaacagagactgagaaacatggaattatagctagaacttggatctatggctgtgatattcttgcttgcggaaactgggaattatagagagacggaaatactttttaaattagaatctaactacaattcgatttagttcaagtcaatattcagagttctactttctggaattattcagagttcagttattcaaagttattaatagctatacttagccacccatgatgtagtcaagaaaaaaataactgaactcttctgcttataatttcaactatattaatagatattgttatcaggtgtttaaaaagaatgtggtcatcttgtgtgacatttgtgttcttaaattgttgctctgcttataaccttttttacaatgtactcatcagttctatactcgcagccaaaatctatagtgggaactcctgcatacattgctcatgaggttcttctgaagaaggaatacaatggaaaggttttatgcgtagtgtcgttaattattctacacttgacatactgtttttgtttagtgtgcatgttattattctccacttgaacaacatgtttgtttgtcaaaacattttatacacgcacgatttgtagtcatgcataacagggaactatgttggaaggttcgaatgctaaattagtcactaactctttgttactgaactaaggttgctgatgtgtggtcatgcggagtgatgccatacgtgatgctgacgatcaccatccctgagataagaaaccatccatggttcttgaaaaacctcctagctgaccaaatggatgacaatacgatgagtaagcagtacgaggagcctgaacaaccgatgcagagcatgaatgagttcatgcagatcctggttgaggcgaccattccagcagttggttcacgtggactcaatcagtttctgaatgatgacattgacctcgacgatgacatggaggacctagactcagatgccggtcttgacctggaaagcagtggggagatcgtgtatgctatttgacaacattgaatactttgttgtgtcgtaggttaccaagataattagagacaaggggcaggttgttgtgcttgcaagtatctgttgcagctgttgttcatgcctgatgttgatgcctcttttcatactgttgtgtttggatggtgtaccaccagtgttttacaacagtttggcccttggaattgctattgctaaaacttggttcctctgagaagaccttttgtttttgtattcccagtcgagggacggtgaagtactta

SEQ ID NO: 31869 - DNA, 2536 bp, Zea Mays
tgaaccagcagagtagtccgtatgaagattttgagcaacttctttccttttcactgaatacaagtatgtgggactattcatgggcatttttgctgtcctgatcttcctcttccttggttctgttgagagcttcagtaccaagagtcagccatgccactacagcaagggcaagacgtgcaagcctgcccttgccaatgctatcttcagcaccattgcctttgtgcttggtgcagtcacctctcttgtttctggtttccttggaatgaagattgccacatatgcaaatgccaggacaactcttgaggctaggaagggtgttggaaaggcattcattaccgctttccgctctggtgctgtgatgggcttcctgcttgctgctagtggcctttttgttctttatattgcaatcaacttgtttggaatttattatggtgatgactgggagggcctttatgaggctatcactggttatggtcttggtggttcttctatggctctttttggtcgtgttggtggtgggatttacactaaagctgctgatgttggtgctgatcttgttgggaaagtcgaaaggaatatccctgaagatgatccgagaaacccagctgtcattgcggacaatgttggtgacaatgttggagatattgctggtatggggtcagatctctttggctcttatgctgagtcttcatgcgctgcgcttgtcgttgcctcaatctcttcattcgggatcaatcatgaattcacccctatgttgtacccactcctcattagctctgtgggtatcatagcttgcttgataaccactctttttgcaactgatttctttgagatcaaggctgtagatgaaattgagccggctctcaagaagcagcttataatttccactgctgtgatgactgttggcattgcacttgtcagttggttagggcttccatatacattcacaatcttcaactttggtgtgcagaagacggtgtataactggcaattattcctatgcgtggcagttggtctgtgggcaggactagttattggatttgttacggagtattacacaagcaatgcatacagtcctgtacaggatgttgctgattcctgcagaactggagctgctacgaatgtcatctttggccttgctctgggatataaatccgtcattatccctatttttgctattgcttttagtatttttctcagcttcagccttgctgccatgtacggtgttgctgtggctgctcttggaatgctcagcacaatcgctactggccttgccattgatgcctatggtcctatcagtgacaatgctggaggaattgctgaaatggctggcatgagccacagaatccgtgagagaactgatgctcttgatgctgctggaaatactactgctgccattgggaagggttttgcaataggttcagcagccttggtgtctcttgccctctttggtgcttttgtcagccgtgctgagatctcgactgttgatgttctgacacccaaagttttcattggactgattgttggtgccatgctcccatactggttctcagcgatgacaatgaagagtgttggaagtgcagcactcaagatggttgaggaagtccgcaggcagttcaacaccatccctgggctcatggagggcattaccaagcctgactatgcgacgtgtgttaagatctctactgatgcatctatcaaggagatgatcccacctggtgcacttgtcatgcttacacctcttattgtggggatcttctttggtgttgaaaccctctctggagttcttgctggtgctcttgtttctggtgtccagattgccatctctgcatccaacactggaggtgcctgggacaacgcaaagaaatacattgaggctggtgcatctgagcatgcaagaaccttgggcccgaaaggttcagacccacacaaggctgctgtcatcggtgacaccatcggtgatcccctcaaggacacctcaggcccctcgctgaacatcctcatcaagctcatggctgtcgagtcccttgtctttgctcccttcttcgccacccatggaggcatcctcttcaaatggctttagaggaagaatggaagatggatgggtagtttatttttgccgggggagagcactagatatatgtcatagagaagtttcagtttacccatatggtgcacttcatccttttttgtttcgcttgtactgtgtcgcagtcttgttgaacttgtcagccgtggtatcacctagtttttgggtctagatgcagtagccgagtggagcaaaaacgtctagcattctacaggattggaatttggacatggatgtgttgggaagtttgatactgcatgtagatatttcgatgatgatgatcaaggaatgcacaagtcagatttacctgtgtttgtgaaacttgaaactctgcgtaggagtgtatggcggtagaatagtcaatcagtgaccgatcaaaatctgtaactcatcgaccttattttaatagtataaactagataaaattatacaacaaacccaattaaa

SEQ ID NO: 31870 - DNA, 4202 bp, Zea Mays
ttcacgacttgctgatatctttttgctttgcctgcatccggatctccttctccaactggtctctcattcagcccagcttcgcctttgacccgaggaacaagacagatcctcaggagaagatcgcagttctcacaattctaatcaggaatattcttgattccatggctggcacaacaactgttgtaggatgggttgtttcacctattcttaggaaaatgctttctctggtgcagtcctatgtatcaagtcagtacaactggaagtctaatatggtgtccgacctcaagaatttggaggctacattaatggaggtactcctggtagttgatgaagctgaaaggcgacatttaaaggacaggaatcaggtagcattgttgtgccaaatgagagaagcagtttgtgacacagaagatgtgttagataagtttgactataaacttataagagaaaaagttgagcaccaaagcatggctaggagcatagttgcctcttcgctttctcttggtaagcgtttagttggccttgacaagttgagatcagaactacatatggttatcaaaagcatggccagagttaaatcttgtgcagagatgtttgcaagtgttatggcagttgagagcactaactccattaagccttctgattgtgttggaactagagtcactgggtcttttccacgtgaaggaaccatttttggacgaaaggaggaggttgatgaactagtcagttggttgctgcacagaaggaatataaatccatcaaatgatgaaggatcattcactatacaactgcattctatacattcaaaaaaaaatatagagttgcattctattgttggtattggaggcatcggcaagactacagtagctcaaagcatctataacgatcagagaatagtaaacgcttttgataagaggatgtgggtttctgtttcacataactttgacaagattaatctaattaaggagataattgcgcatgcatctgatgataagaacatcaaattgatacatttcaatttcaatatgctccaagaagaacttcaaagaataatttctaacaagaaatttctattagtgttggatgatgtgtggtatgacgagagttatggggaacacattaacagagagaagtggtgggaactgatagctcccatggaaaatgcagtggcaggaagcaagatactagtaacaacaaggatggaattagtagcaaaagtgctggacagcagcagatcattcttacatggccttggacaggatgatagctgggcactcttcagacattgccacaattctattttaagttcttcaacactagagagcattggaatgcaaattgttcggaaacttaatggttcacctctagctctgaatgtcataggaaggcatttatacggcagacacaaagtggcagagtggaatgaagttcttcatagcaatatcctcaattcagacgacatgttaacgatattgcggccaagctatgaaggtttaccagtacatctccagcgctgcttttcttattgcagtttattcccaaaaggttatcacattgatccggaaaagctgatatatatgtggatagctcaggattttattgacactaaaggaagcacaaacaagtctttgaaagattctggaagaagctacttcgatgaattgctgtctagatcattttttcaaatgcttaaacctggcagcgaaacattttacgttatgcatgatataatgagtgacctggcacttcatgtttctcagggtgaatgccttagggttgagtgtgagtctatggagccaatgcctctttatactcaacatttgtccatttatagtgaaaacctggaaaatcttgtgaattgtgatctgccaaaattgcgttcattgatagttttgaacaaatcctggttttgctccaaaatctgtctgaatcatgctatacttggcaagcttaagagtgtccgggtgttggatataaccggttgttgtttagaacaattacccgatgctgtcaatcggttgattcaccttcgttacctaggtatacgctgaactttgcacccgttaccaagaaagatgttaatgtatcatttacaggcattgtttgtgcagtatcactcatgttattcccaaaggggatataacagttcttcaatgcaaattgcaaagacttttagaggccatttccatcttccagaaagcatcaataaacttgtcaatctggtccatgttgacgtagagaaggcatatgttcttatgttatccagcactctcaagcttccatttgttgagtgtgctggagaattccatgtcaatgatgagggaagtctactaggtctgaaggaccttaacatgatccgaggacatctcacacttctgtccctagataaggtgcaaaacaaagaggaagcttctaaggctcatctacaccataaggagcacataatgaagttggagctacaatggggatcgcttaattttgctagttctaccaaacagggtgttgaggtgctcgatgtcctgaaaccacactctgatcttgaggagctaactataagtggatatcctggtgctaggtctccttcttggctggagtctggttggctgagcagactacaatttatttgcctacgtgattgcaacagatgggaggtacttccacctttaggggatctgccattactgaaaactgtcgaaatacggcgaatgcaagggcttagaacacttggtcagaaattctttggccgtgctggatttccatctttggagagattgctactagagcggttaccagaattggaatggtgttgtgtcgataacgaccaagtgtttcagaatctaagacatctatcagttgctggatgtccgaagttaagagaatatcctacatatccttggacacttgaacatatagctattctggacgaggaacgaattcaagttaagacttttattcctagtgctagagtatcaagaactttttgtatcttggtatcaagcttcttccatgtcttacgtgcacatcacctagaatttgtcgaagatatggagatctatgttaaccatgtggtatgcatgtccagagaagtgctagaaaatctgaaatctctccagaatttgaaaatatatggcatacatagggccaacacttgctctgtgattgcaaaattgtgggatgagaatgggtcagctgtgtttccttcatcacttaggagccttcagttagtgcagtgctacctgaaaccatcctatttctccaagcagttgaataacctctcatcacttgagactttgcgcctaataaattgtgacaccattgagatgccctgtccaccagtaaacatgtggcacttgaggatactaaaacagttggtcctttataaatgtgattggatcacctttttggaggggtcagaagcattggtttccctggaagaaatggccataagtgactgttatgacttgaaatatgtaccagatttaaacaatatgccatctcttgagaaattgcatttgagacgttgccctcaagttatgcgtttgtccagtgctgattaccagacaagattgaaggaactggtcatagaatcttgtgatgcactatcatcacttagagagttgcaaggccttgtctcccttactaagcttatcgttgcaaactgctctaagttggaattgctgcctggtatggattccttctgtgcacttgggattctgattattgaggattgccgtcttctgaggtcactaccagagagaggtcttcctgtatcgcttagaacttttgtattggatggatgccatcaagcattagacgagcaatttcagaagggggaaggtccagactggaacaagattacaatttggagttggagatatttggtgacacctacctcgctgaagatattcatgctcctcaatatttaagtttaatctgagtaaggcaagaaaatttgtgatcatgttgaggccacaaagatacattgactgtgttatttggttccccctattacacaagctattcttgattaaacaagcagttgaaatgtttgatgttcagttgtttcccatccatcaagtgttttgaaactctcttgttgttgaatgcctactccacttcggtttggacaagccattttgctgattacagtactgttagttgccttgtttaccttgaacatgcctagcaacacttaaggggtg

SEQ ID NO: 31871 - DNA, 6424 bp, Zea Mays
ttggtttcgccggtcttcgcttcgctgccgccatggcgtctcctcccgagcgtgaggtcgccgcactcgagagctgcttccgtgccctctccgcggctgacgccgtcccagcggttgtcgactgcgtcctcgcttcctccgcctcgtcctccccttcccaactcttccacgcgctcctccgttcctttcctccctcccagcgggagcagggtctccaagcccagtctgaccgtcatgccgccatctgccacgccgcggcgctccgccatttgctcgcgcaactcgacagcccccctaaggttagggaggctctgcgcttgctgctgtggagggtcttcctgcccttgctccaggatatcattgaacccactcatcctgcccactttgacctggtaatcgagatgatgtgcaatgcagtctctgacactggatgctgggacctgcttggagctacaatagtatcattctgcattcggtcatctgttgttgccatgggtttgtccgccgcagacgccaactctatactttaccaaagtataatggaagcggattttcctgcggagactctctcatgcctactaccgctctccaattcaagcagtgtgttagcatcattgctggtggacatgctggagaggcgaaggactatacctacctcccaggaaggtgctgctgatctagctgcattggttcagaatttgacatgggaccttgccaagttggtactcaagatgtttacacatgctcaagagtatcggtcttgtgccactcgggtccttcttcagcctgtactcatatcgcttacagatgtttcttctgtcactgtatcgtttggtgcagtccagcataagctatcgaggtttggtttcctagaatgtatatggaattcctgtatttctctatttcctttggggcctggtgagcggcttgatgcatacagaatactctctgtatacttctcaacactgaaatcaggacatcaagccgctgtcttgggagttggcattgtccaggaatttgaccttaagaatgtcagtgaattctgggatgaactgcgcaggggactggttgacaaggattctttagtaaggaaacaggccttctatgtcttgacaatatcacttagcatctttacctcttcatctggaaatgatagctgccagcatttttccagtaggagcccagctgctttgcctgctcaaatcaaagcaaatgctggggaaacaaaaagggaaaggtgggctaacaaagaagccaagtcccttggtgttggagagatggaccaatcaggtgaaaattgctcaaatggtcaagatcggtggaaggtctttttgttactctatgagatgctccaggagtatggcacacatttagttgaagcagcttggacacaccatgtagtgcggctgtttgagtgtacgctacaaaatgactatctaaatcacacctcctgtggagcctttcatgctcagatggaatcttgggaaagaattttgtactggatggcagttttgtgggagcgtgggttcagtcatgagaatcctcaagtgagatgcctggttatgcaatcctttttggatattgcatgggaacgctacaaggtttgcactcatataattccaaggggttttgtgctcggccctctgatacgtggtttgaatgatgtggttcatcataaggattttggcattgggggtgcttatagttcgaaaaccataaaagatgctcagagatttttcagaacttatacccacaacttggcgagatgtgaccgcatacatctggtttggagtctggcttctgcggctaagcaagattcatttggccgagcaggattgatgactcttgcatcctgtgttgcttcatgcacacgtcagtcagagacaaatgatgtgccatgtgctatatctgggaaagcagtgaccaaatgtgatggatgtgtacctacagaagttaggccaacagatttgttagatgtcttatggattctcagtgagaggagtaaacaacactttaatccaaagtatcgtctgaaagtttgtgaacaggttatccaagttgcaacatcactgataaatgccactgaaattccacttaaccagcttctgcatttcattgccacaattcctcgagagttcactgattatattggaccattgagagtagtagttcaaaaatggttttttcagaaggaagaatgttctcctggtgacactttgttgagtaagctgatcgatttctctgccaccttcgtaagtcaaaaacggaatgaaggttcgaatgtttttgatgacgaggatgtggatgcatgggaagctgaagcaaggaggtgggctagaacccttcttcttgtaaccgaggaggaggaacatttgaaacgaatcttcaggtttttggaggcatatggctacaagctctctgagcaatgtcccagtggagatttcatacccataaaattttttatcattgttttaagcttcattgaggaacttgagctgagacagagaaagcttgtttgccggagtaatacaatcttaagaggttcagatacattaaatggattagtgctcgatgatctcaacaaaatgttcacagaatcacttttgctaattttggaaaatatggtggcattcagtaaactgtcttgctccattttctggttagatgtggacaacaaggatttacccccttctatcaaaggaaagcttggaggcccaagccagcgtcgtttggctacctccattacttcttcagtattacagggtatttggtcaatgcgatgtgttagttctgttgcctcatggtgtaatccttacaactccgatgattctgtttcttctgcattttccgtgctatgggacttctatttgaatgttacccatcactccactattgccaatgagatcggagctgaacttcacctggcagcttatgaagctcttgcctatgttctggcagttctatctactgcttccagtactcagtttttggattttgtggaagcgaagcagacagatcaagcccacaagttttcattggacattttggtcaccactttccttgacaacatcaaccatcttcttacagagggaactctgacgcgaagcagaagagctgttttgatgacttggaagtggctttgtatggattctcttctatctatttcaagctgctatagtgacaatgaatctcaaatgaagaggttggaacctttattttctgattcaaccctccgatgcatttttcttgatattatcgaaagccttgaaaacactggtgaaaattctgtcttatctatcttgagatgtgtgagatctgttttgagattgctacacctgaatgagggcaacacaattttttcctctttaggcatcagctatgagatgatgatgcaattagcaaagtcttcctggatcttgcaccttaactgcaacaaacgccgagtggctcccattgctgcactactatctgcagtattgcacccagcaatattttgtaatttggaaatgcaccagacaaatgaaaaagggccaggccctttaaaatggtggcattcgacgaagattttgaagctgaactctctgaaaaccatgaagcaagatttgaggtttccatgctagcacaaagtcctgatcgtgaattcacagaggtgttcattaatacagaattatatgctcgtgtttcggttgctgttctctttcatcagctttggaaacaaatcaaagaacatagtatattggaaactgaagaagctcttgaatgcggcaaactatttctactagaacttctggactcagcggtgaacagcaaagatctttcaaaagaactctacaagaaatatagcagtgtacataggcgtaaagttcgtgtgtggcaaatgatatgtgttctatcacactatgtagaagatgatattgttggagaagtgacatctagcattcacatctgtctttatagaaataatttgccagctgtccggcagtacttggagacgtttgctatactcttatacttaaaatttccaaccttggcagaggagcaacttattcctatttttcatgacaaagggatgcgacaacaggcactatcttcatatgtttttatagcagcaaacgtcatacttcactcaagacagtccgtccagatataccacctgaatcaattgcttcctccaatactgccgtttttaacatcccatcatcacagtttacgtggttttactcagcttcttgtccattcagtgctatcgaggttgtggcctactctgcatcccgaaacttcagaagatgcagtctttgagaggaggtgctttcaagaattgaaagattatttggcagaaaattctgactgtgttaggcttagagtttcaatcgaaggtttccttgatgtctttgatcccaatgcatctgggaccccccctggaatatttagcgcccgtcctgaggtgtctgacttcgaatgtgttccggtgtcagtgatggagcgtgtgattgagttcctgaacgatgtgagggaggacttgagacaagctatagcaaatgatacagtaacaatcaagaatgaggatctcgcggtgggagagcatcacaagagtgacgagagcgtgtctgagatggtaaaaactggtcaagaggtacttgatttccagaagaaaataacaccccataggggggactccgagcaagcattgaacttgaacaccagaggtcattcaggcgttggtgacgaatacatttcaagaataatttcagagatggaggaagatgaccaagttttcgacctagcgctagaagcaagattgcatgctgcggaaacgatcaagcagagccggcaagaactgatcgtggttgcgtcattggtggaacgcataccaaatcttgcggggctgacgagaacgtgcgaggtcttcagagcagccggtctggttgttgccgacaagagcgttcttcaggataagcagttccggctgatcagtgtgaccgctgagaaatggctgcctgtgacggaggtccccgtggacagcgtgaaggcttacttggagaggaagcggggcgatggttactcggtgattgggctggagcagacggccaacagcatgcctctggaccggttcgggttcccggaccggacggttctggtgctggggcgggagaaggaaggcatccccgtcgacatcatccacattctggacgcgtgcgtggagatcccgcagctggggcgtggtgaggtcgctcaatgtccatgtcagcggcgccatagccgtctgggagtacacgcgtcaacaacgcaatcagcgttagcttgttgcttgtttttgctccattgaccattgacgacgaagactactactactacctgggagggagagtagaaatcaacatgcagcactcacaggaaggagagaaagacctgggctgggctgggccgacagtaatgaacgctagcccaccttcctttcccaccaccaagacgtacaagtcagactatattacttcatttatttgtgctaatatcgtaacgttttattgtgtaagcaatttggtacttgaagcctgcctgcatttggatttggagcggcatcagaagttttttaaagtatttattcgtagaggggtcgatcgagctcgcccttttattgctgcaaatatataatacacattattactgctgcaaacataagattacgttacattacattaaatgaaaagctatattacctcccgttctcgttatcccgctagttcatttttaacgaaacagtgacaaatatgaactaaacagcaacaaataaaaagaaacggaggggtactacgcttttttttatttcagtgcgcgcgtgtctgctccagacggtgctgctgcgcccagtccttgacgatgtgcggctgctgacccgacgacgaggtcgtggtctgaaggtagcggtacacccacgccagcacagccaccgcagccacgccgaaccctcccgacgaaacgatgcctaccgtgagcagcgccaccgtgatggccgccggcaccagcacggggctgaagatcaccatcaatggcgtcgccacgatgagcgccagcaccgtgcccgtcaccgccagccccgacaacaacaacatggagaaggctgccgtggctgtggctaacgccttggccaccgccatgggcgcgggcggcggccgctgctgctgctggtgaccgtagtgggtggcgttgtagtcatcgtcgccgtagaggcccctcatgtagttctctccgacggcctcgcttcttctccctgcacgatggtcatccgcatgatgagcagtggccatacaagctctggctagctagctagctagtatacaatgattcaaaagaaatagatgagtggagcagctagtaggttcttgcataatatatatatagatagatagataggataaggactgga

SEQ ID NO: 31872 - DNA, 343 bp, Zea Mays
ttcgaagttaagtcaacctatggttaaaattctggccaagattgtccagtggatgttgcaactgttgaagtgtataagtggataaactaccttttcccatcagcttaagcttttgggttgaattggttagtgcgtccactataacatggtatgagagccagaagtctcgagttcgaatcctggcagagcttttgggttgaattggttagtgcgtccactctaacaacaacctacaagaacccactatatgtattatggggatatctaaaatgcttgcaaccagaaaagcatgtgttggtttcagtatatataaggtgcagtagttgaacttgcagtaaattct

SEQ ID NO: 31873 - DNA, 914 bp, Zea Mays
tcattcacctgcctcttcatctcagcctcacgccacgcacgcaatggctggcgttcgtctcgtcggcgtgcgtccgtcccctggccgtctggagaggtgggtggggagtctaccggacgcgggtagccggggcggtcgccccaccttgccgatacgaggtgtccgctcctatttcattcggtccattccgcctctcggaagagttgagagaggagtaaggaaggcgaggacctcgcgccccgcgatgggcggcgacctgtacgccctcgacttcgacggcgtcttgtgcgacagctgcggggagagctccctctcagccatcaaggctgcgaaggtgaggtggccgtcgctgtttgagcaggttgacgccgccatggaggagtggatagtggagcagatgtacacccttcgtccagtggtggaaacaggatatgaaaacttattgcttgtaaggttgcttgttgagatccagatacactctgttcgaaaatcatcagtaatatttgcaaggttgcagatgggcttagcatccaagaaatattggagaactggtcaaaactgaagcccactctcatggatgagtggcaagaagatagggaatctcttgtagatctctttggccgtgtaagagatgactggattgaaaatgatttttcgggctggataggtgctaacaggttttatcctggaacagctgatgcattgaagctttcaagctccgaagcatacatagtcacaacaaaacagagtagatttgctgaagcgctactcaaagaattggctggaatagactttccctctgaaaggatatatggccttggcactggtccgaaggttaaagttctccagcagctgcagcaaatgctgcagcaccaaggcctaaaacttcattgtatctttggttttgttgcacc

SEQ ID NO: 31874 - DNA, 2492 bp, Zea Mays
cttggttcttcttgattctcaggctagtgcttggaaatgtttagtttgtggctgtgattgtagtgatggtgtcttggttgctagctcctgtatatataggtgaagaaatggtccatgtcttgagtgcagttgtgctcttctcagactgattgtcaggggacatggccatgagctgggtacgtgcattgctagctgcagatgttgacacttgagattcagatctgatttgctgggccatcacttactccactttgaaggcaaagatagtggactagtggttgggcaatgagatatgtactacagtactagctgctgaattgggctgagacatagtgcaatcatcctgggttctgcttttatggcctagctgctcatatctgtttcagtgtcctgtttgaagtggttcagagataagccgcaccaatccctcaatggggacatggcatgttggttcaacagtcaggagacttgattcccaggcagatgcagggttcacttcactgcttcggctggagttgtcagttctacagcttcaacatggtttgtcaggtctgccatggggacgcaatgatcgtcaactgctcggcatcctttgctatgctttgtttgtggagctgctgagtggtggtgtttggagaagtcttgaccctgaatatatagctgaatcaaagagtaaggaatcttgtcgagtgggattattggcaagggacaaggtcatgaggacatggatgcagtatgtgcatacatttgatttgagagccctttctctgcttggattgagcacatcctatgcagccatgctgagcggtttagtggggaaggggcacgaggaccccatggccatgtggaacgggagcaacatgaattgagagggccagactagttcggctagacgtagcacagtccgatattgacaaccgaagtccatgtcggaatccctttccgtttgggggtgcaagtgtcgagactgcggaaacttcgctgatatgggcgccatgaacgtgcctgtcattatcagttagttgcctagttgcaatcttgtaggttcatgtaagaaaaaaaacaacgaaaatgtagttcacatgagatgctgataatccaatagaccgccaattgaagaagtgatatgaagtgtcggccacattgttgtgtcgttcagatactctgggcatgaacaattgtcagaacattttcctgagctggggatccaatttataagtttaaatagggcatactagctacccagaaatttcgatatttcactgcccaagcacagaatgaattggtactgacgcaatggacccactttacacatggtctttatgaagcatgcttctttgacaaggttggtcattggtcagtatggcagcaaattgtggtacccaagcactcgcgttgtgtcggtatggtccgacattgacactgctactagtggctccaacaagtggccagcatatgtccatagaattcaaatccaatcaaaatcaggctgctttttcttgcaacattgcatgttctgatctcatgtccttgtcccttgccagcctgagttgaaagctgcacttgagtaacagcatgcttctcttcatcctcacttataaatccatgaggcagccacggtagcaccaacactcaatcaactagctcaacaacacctgacctgatacaaaaggagccctagagttccagagacgaagaaaggagaagaagccaatcagccaccagccatgatgagtgccaagagacttgttcagatgtcaagtagtaggtggcgaagaatggcggccctcgcgaggaagaggctcgcatcgacacctgtgaaagaaactgacgggtcgtcatgcagcacttcgtcggtggctggcaaaggccactgtgccatgtactcggctgatggtcggcggtttgaggtcccgttggtgttcctcggaacggctctcttcggtgagctcctgagcatgtcgcaggaggagttcggcttcgctggtgatgacggcaggatcaccttgccatgtgagtctttggtgatggagtacatgatgtgtttgcttacaagagatgcctctgaagaggtcaaaaggttgtttttgagctccatggcaaggccttgccactatggatctggactggtgcaaaccatgcatcatacccagcgaactgttgttcctagcttctgaagattagcatatatgcgcagtagcaagcagattgttttcaccttttcgtgtttgatgtaaatgtttacataatgtagattgggatggaatggaactaaccatatggttcaaaaacaaatggagcagaaatatgtgtttacgtcagggttcaaaatttcacgaaattcagcaatttcggtagtggcttgaagaaaaaaagtgaaattttgtatcacactagtacatgtgtttttactgtaaatatataattttaggctattgtttattttattcctctagtcaacagatgagtaatcctaaaccgtgttgatcttt

SEQ ID NO: 31875 - DNA, 607 bp, Zea Mays
aatccccacggtggcgccgccccaaacacatcggaaacacgccggggcaacgcaatttggcggccaggctcaccactccgaccatcgatccccgaaaacaaatgcggagcaggcgcggaactgaatatgtgaggactcaccggataattgggtgtccaaatatatgccgaccacggtcgaccgtggtgcagaggcgtggaagtactccagtgacgaattcactggacaccgatgatccacgcgccaagggcttgctcgtagatgatcctcgcgcccctgtgaactccagtgatcccttcttgcacacttgacgacggcagcacgaagaacgggtgtgatggtttcaaccccacccgcctgcgataatggcacaggacggacacacaggatgcccaacataatgggcgagacgagcctgggtcccaactttatacaccgatccaccgaccccaatgaagctagctggcggagttggagtttgttacgatcctcatgcgggcgattcgatctcaacagattgttgcggggaagacgatcctagcggcttggccccacccggcggcgagcaaccaagaggatgcatggggaaaaggtgtggctgacagca

SEQ ID NO: 31876 - DNA, 1856 bp, Zea Mays
gagtttttgttgaggagaagtcattcacatatctgtatcaggaaggagatactgtgactcttatggagcctgaaacgtttgagcaacttgaagtttcgaaggaactgtttggcaaagctgctgcatacctaaaagatgaaatgaaagtgaatctacaatactttgatggccggccaatgtctgggacagttcctcaacgagtgacttgcactgttgttgaagcacaaccaaatacaaaagggctaactgctcaaccacagtataaaagggtcttgctggataatggtcttacagtgcttgcaccaccttttattgaagcgggtgagaatattgtaatcagtacagccgatgattcttatatgacgagagcgtaaggggtatcgtggatgacgttttgttctaccaaatggggatcgattacaatgtggctaccagaataattttatttacactcagttgtggagttgccgtaaacaaatccattcatggcaaaccgtggaatcttttttggggaaggatatcgatttaggtatatggacaaggtgtctgaaggtactaagtgagatggataagaagaaagggaccgatggcaccgaaccaggaccagctccatctcgtgccgtcgacagatttggttttataaagccagaacaaggcaattcacctgatggaattccaaaaggcaagtctatacatgagcgtgaaagggaggaaagaaggataagaaaatggaggaagatgataggtgttggtggtaatgactggaagcattatgttagaaggaaccctcatgtggttaaaaggcgaataaggaaaggaattcctgattgtctcagaggacttgtttggcagttgatttcaggcagtcgggacctcttactaatgaacccaggggtttacgagacactggtgatatatgagacatcggcctctgaattggaaattattcgtgacatatcacgcacatttccatctcatatattctttcaacaaaggcatggtccaggccaaagatcattgtataacattttgaaagcatattctgtctatgacagggatgttggatatgtgcagggaatgggatttttagctgggctgctgcttctttatatgagtgaggaggatgcattctggttattagtcgcgttgctaaagggagctgtccatgcaccaatggaaggcttgtatcaggctggtttgccgcttgtgcagcaatatttgtctcagtttgagaaattagttattgagctcatgccaaaattgggacaacactttgttgaagaaatgataaacccaagcatgtatgcaagtcaatggtttatcacagttttctcatattccttcccatttcatctaactcttagagtttgggatgtgtttctttatgagggtattaaggttgtattccaagttggattggctctattgagactctgtcacgatgatttagtcaaattaccttttgagaaactgctctatgccttgagaaatttccctgaggaagcgacagatccagatgtattattgccgcttgccttttcatttaaggtatcgagtcgtctcgaggagcttcagaaggagtatcagaagcgacaggagggcaccagtgaaacttcaagcggcgagcggctacagcccctcgtatcgaagacgatgagcagggtcggtagccgtgttgtgtcgaacttaacgaccgctgacagaaaatgacagacacgttctcttgtttgtttgtaactcgcatgtacactgtacagaaagaacggccttataatccatccatctaacagtatttgttttgcgtttctgtcaccattgcatttgcttttataatcctggatcgcaggaacaaaaaa

SEQ ID NO: 31877 - DNA, 650 bp, Zea Mays
atgcgctaccacagtaccacttcatcagggagtgcttggatgatgagaagattattgctgattttgttggcactaagggccagctcgctcacattaaaacgaaagcactcgggcgagtcagatcccttgagcttcttgataggattggaaaggtcaggagtttgtgcgatatactgcgtgttagatgggagtcaacccgcagtcggacaaagcagcgggcattactaatgatggagaatttggttgaagatatcagcaaagaattccctgctgccccacaaagagttaaaatggtttttgcggttcatatgccaactcttcctgcattgaggaaagaatatggtgaacttttgatcagttgtggcatagttggagaagcactggagatatttaaagatcttgaattgtgggacaatttaatatattgctatcgattgttaggtaaagtggctgatgcagttagtctaataaatgctcgactttctgttacaccaaatgacccaaggttatggcatagtgtatatctaagtgcacaatgaaagctatgtatctaaaaaaaccaaaacgtcttataatttggaatggagggggtactttatctatccaaaagtttaagggggtgtttgaatgcactagagctaatagttagt

SEQ ID NO: 31878 - DNA, 347 bp, Zea Mays
cgctaaatgaaattgggacgatggcggaccagggaaggaagaatcttacaatggttacgcagcgcttgactctgtccacggcgcacggcgaattcgcggcgacagtgatgaattggaggcgcccagatcgctccccctccttgattccactgtgagtgcattccggatgaccaggcggagctcctcgactccaccccgggtacccgccagcgatgttctcacatggcgacaatctctttcctcacggagatccgcttggacaacacggcggcaccgaggcgattcacggggtgtcgaaaagcgaaaaggaagaggagaggagaggaaagaagtcgcgacgatccggc

SEQ ID NO: 31879 - DNA, 6050 bp, Zea Mays
tggtacgtgcctgcgtaaaagaaaaattcagagatggtcctcgactcctggtgggtggtggcgatctcccagctgaactgaaagagcaagcgtgcgtgtgagacaaccaggtccgatccgcccccgccgagccgaggacagcagcgggggctctcggtctcctcctaggctcctacagatctcgtaccccgtcacagatctcgcgccctctccatcccatgcccaccccccctcgtcggatctgaccactccgcccctcctcccgtctccgccgccggagctgatatccgcggtcatggcgggcgccgcgggcgggttcgtcacgcgggccttcgaggccatgctcaaggagtgcgctgccaaccgcggcaagttcgccgcgctgcagcaatccatccagtcatacctcgatagtatcaagggggctacagcagagggcgcggtcatcaccgaggcgctcgggtcagctgggcgcgtgctcgacgggccgcaggccgagctggtgctgcagccgctccgcctcgccgtcgagaccaagcacgtcaagctcgtcgagcccgcgctcgactgcctccacaaacttattgcttatgaccatttagaaggcgatcctggtttagaaggtggtaaaaattccccaatatttacagacatcctgaacatggtatgtggttgcgtcgataacacctcctctgacagtactgttctccaagtcttgaaagtgcttcttaatgctgttgcttcaaataagtttagagttcatggagagccattgcttggggtcattagagtatgctataacattgctcttaataggtacctgttatatcgctaccttcttgtttgcagtatgttgccttgttgccctttggaccatgtatgataatttattcatttgtattttcttagcaagagccctgtgaaccaggctacctcaaaggctatgttaacccagatgatcagcattgtattcaggagaatggaatctgagcaggtttctgtatcgcccggaagctctgtggttaaagatatgccttcatctatcacaaatgattctgaaaatggagaaatatctactgatggccaagatgaggaaaaggttactctgggagatgcattgtccatgaatcggccttctgaagctcctccaacgtctgttgaagagcttcagaatcttgcaggtggagcagatattaaggggctggaagctgttctagataaggctgttgaacttgaagacgggaaaaaagtgtcacgtggaattgacctggacactgtgaatataatacagcgtgatgcactattgctctttcgaactctctgcaagatgagcatgaaagaagaaagtgatgaggttgctaccaagacaaggctgctatcacttgaactgctccagggattgctagagggagtcagcaatgtgttcatcaaaaattttcacttcattgattcagtcaaagcatatctttcgtatgctcttctgcgagcatctgtctcttcatctccagttgtttttcagtatgcttgtggtatgttttcagttctgttgctccggtttagagagagtctgaagggggaaattggtgtcttctttcctttgatagttttaaggtctctggatagctctgatagccccctcagccagaaggctagtgttcttaggatgttggagaaagtttgcaaagatccccaaatgcttgcagatgtgtttgtgaactatgactgtgatcttgaggggccaaatctttttgaacgcacgtgcgctatcaagaatagcacaaggatctcaaattgctgatactaactccatcgtgtcatcccaaacagtttctgtaaaaagctcctctctccagtgtttggtgattattctgaagtcattggctgattgggagcaacttcgaagagattcctcaaagcaagggagcattgttgaatctcatgaagaggatgcttcaaggagattgacaactgatgagatgaagaaccaagaggatggtcggaatcagtttgagagagccaaagctcataagtcgacaatggaggctgcaatctctgagtttaatcgtaaaccaagtaaagggattgaatatttgttgtcaaataaattggtagaaaataaggcatcatctgtagctcagtttctcaagagcaatcccagcttggataaggttatgattggtgaatacttgggacagcatgaggagttccctcttgctgtgatgcattcctatgttgactccatgaagtttatagggttgaaatttgatgctgcaattcgtgcgttcctgaaaggatttcgccttcctggtgaggcgcagaagatagatcgcataatggaaaagtttgctgagcggtactgtgctgataatcctgagcttttcaaaaatgcagatactgcttatgttcttgcttatgctgttataatgttgaatactgatgcacataatccaatggtgtggcctaagatgtcaaaatcagattttgttcgtatgaacactgcaagtgatgcagaagaatgtgtcccaaatgagctcttggaagaaatttatgattccattgtcaaggaagagataaagatgaaagacgattctcatgatacttcaaaatccaccaagagacctgaaacagaagaaagaggccgtcttgtcaatattctcaatttagcccttccaagactgaagtcagctagtgatacaaaggcagagagtgaaaagatcatcaaacagacccaggcacttttcaagaaccagggacagaagaaaggtgtttttcatgttgcgcagcaggttgagcttgttagaccaatgcttgaagctgtaggatggcctttgcttgcaacattttctgtgaccatggaggaaggtgacagtaagcctagggttgtatcatgcatggaaggatttcgtgctggtatccatcttactcgtgttcttggaatggacaccatgcgctatgctttcttgacgtccttagtgcggtttacatttttgcacgctcccaaggagatgcgcagtaaaaatgttgaggcactgaggactcttcttggtttagctgacactgatatggatgctttacaagatacttggaatgctgttttagaatgtgtctcaagactcgagtatatcacttcgaacccttcaatttctgcaactgtaatgctgggatcaaatcaaatatcgagggattctgtagtccaatcgctgaaagagttggctggaaagcctgctgaacaaatctttgtaaacagtgtaaaactgccaagtgattcaattgttgaattcttcaccgccctatgtggtgtttctgctgaagaactaaaacaaacacctgctcgtgtctttagcttgcagaagcttgtagagataagctattataacatggctcgcattcggctggtgtgggctagaatatggtctgtgttggcccagcactttattgctgctggaagccacaatgaggagaaagttgcaatgtatgccattgattcactaagacagcttggtatgaagtacttggagcgtgctgaattaaacaatttcacatttcagagtgacatactgaaaccttttgtcattttaatgaggaatacccacaactcaaaaatccgaggtttaattgttgattgcattgttcagttgatcaagtcaaaagttggtagcataaagtcagggtggcgttgcgtattcatgatatttactgcagcagctgatgatgaggatgaatcaattgttgagagtgcttttgaaaatgtagaacaagttatcttggaacattttgaccaagttgttggtgattgcttcatggattgcgtcaactgtcttattggttttgcaaataacaagtgcactcctcggattagtttgaaggctattgctctcctgcgtatatgtgaagatcgtttggcagagggattcattccaggcggcgctattaaacctattgatgttgttccagaggccaattttgatgtgactgagcattattggtttcctatgctagctggtttgtctgatttgactttagactccagaccagaagtcagacactgtgcactggaagtgttgtttgatttgttgaatgaaagaggacataagttctcttctcccttctgggagagtatttttcatcgtgtactatttccaatttttgatcatgtaaggcatgctggaagggatgggctttcttcttctggggatgattggcttcgtgatactagcattcattcgctgcagttaatctgcaaccttttcaatacattctataagtttgctgcttgaatgtgcgaaaaaaacagaccaaactgtcgtttcaatttctcttggcgctttagttcatctgattgaagttggtggtcaccagttcagtgatggtgattgggaaacattattaaagagtattagggatgcgtcatacacaactcagcctcttgaactgctcaattcattaggattccataaatcaaacaaccagcagttactttcaagagaagaaagcaatgcacatggcaatagttaccatggcagccggggggaaccctccatcgttaataatggtgagcatagtcatgcagaggcaggtccacaaactagcctggagaattcggaaggtaccacgagcagaggtttaccgtcaccatcagggagaacacaacctgctgtttccccacgtggccaaagctttggacaaagaattatgggcaatatgatggataatcttttggttagaagtcttacatccaaatcaaaaggtcgagtcgatgatattgctccaccctcacctgtgaaggcccctgatgatgatgagacagacaaggctgaaggggaagagagccctatgatggaaactgtccggagcaaatgtatcacacagttgctgctgctcggggcaattgacagcatacagaagaggtattggagcaggttaaaagctacacaacagatagcaataatggatatcttgctctcactgctagaatttgcttcttcgtataactcaccttcaaattttcggacgagaatgcaccatatacctctagaaagacctccactgaatcttctccgtcaagaactagttggaacaacaatttatttagatatccttcataagtcaacagtggagcaggacaaaattgactccattgaggaaacaaatggtttaaatgtggaatctggtgaccaggaaaagatcaagtacctagcagaagggaagctggtttctttttgtgggcagattttgaaagaggcgtctgttctccagcctagcactggggaggctgccagtgcagacatacatcgtgtattagacttacgggcacctgttattgtaaaggttttgaaaggaatgtgcatcatggatgctcagatcttcagaaggcacctgaaagagttctatccattaattaccaaacttatctgttgtgatcagatggatgttcgtggagcccttggtgatctctttagcaaacagcttactccactcatgccctgaagtctggcagtatttcctcccttgcatagatcttgttggaacatattcttcgtcagcatttttgtgcaaacatggagcaccggttgggtgcttgacatccttaacgcgctttctggtgcaacagctactccctaggaacttaagagcttgatcagcgggaacggcaggtccctaggccacatcttttttttttggatgacgcaagggaagtagcttgactgatgcgcacaccgtgtttttcctagcaggcttgtactttggagctatttatctgtgcccggacagggatgatgcttccattatacagtagagtagtgttggtaatatgtacacattgttgagaacgttgtacttgaggcctgttgttattatacggcaatagtagattgtttgcggcaagcctcgttttttgtgcgtctaattctctgacttgcagaattgcggtggcaaatacccattgccctccaagttgtgcgttagcgtatttatccgtagttgacagcaatgaacatattactactgctttctgtattttctattaacgcatgcacatagtttattgg

SEQ ID NO: 31880 - DNA, 2325 bp, Zea Mays
agcgctttcagctgttggaggagatcagaaaggtcataaggaatgaagcactgttacttcttacttatttgactcgggatgcagaggaaattcaaaaaattgttgtatttgagggtgtgtttgagaagatatttagcattatcagagaggagggctattctgacggaggtgtagttgttcaggattgccttgaattgttaaataatttaattcgacacaacgcgtcaaatcagatgcttttgaaagagacaatgggctttgacccattgatatcaatactaaagattaggagaggcagtgcatttaattttacccaacagaagacagtaaatctcctcgctgctttaaatactgtggaattgcttttgatggtgggcccatccggtgaagcaggtaaagatgctaacaagaatgcaaatcaaactgcattggctcagaaaaacattctggaccatcttcttttgttgggtgttgagagtcagtgggcccctgtcgctctccgctgtatgagaaatcctaatggccaggcattattagcatcaactattgctccacatccaaaccaaggagatattcatgaacctgctagtgacatgccttttggaagtgtacttctgcaagctctggtttctagtgatgtcaatggagatatggaggcatgctgcagagcatctagcgttctttctcacattatcaaggacaacttgcaaagcaaggatcgtgtattgcaaattcagcttgagacatctacagcatccttggggcgtactgagccggtattgcatcgtattgttacatgtttgtccatcgcagcttcaatggagggagaaaatgaccaaaacaaccaactagaggaaccgtacattcaaccttttattcttcggctactcatcatatggcttgttgattgttcaaatgctgtcaactgccttttggaatcagcggtgcatctgaacttcataatagagcttgcttcgaataaacgttacgccgcttgtgtccgtggattggctgctgttgttctaggtgcttgcatcctgtacaatgctagccgtgagaagggtcgtgatgcctttgccgtggcagatgctataagtcaaaagattggcctcacaacatacttcttgaggtttgatgaactgaggaaaagcttggcacatccgttgtcagagcagcatcaccgcaaggagctttcccgatcaagtgcgaatagcatgtcagatttccaagagattgaagaggatgaaacaaataagggcgatcaacaccctgtgctttcagaaatatttgattcacagtttgttaatttacttactaagcttgaggctgatattagagaaaacataatggatatatttagtcggacaaaaactgcaacagcagtccttcctactgaattggagcagaagaacggggaggtcgatgaagagtatatcaagcgactaaagtcatttgtagaaaaacagtgcaatgagatgcaggacttgctggcacggaatgcaatgttagcagaagagttactgagaactggtggtggtacgaccacagatacttcacagaaaccgagcagtggccgagaaagggtccagattgaagctctcagacaagaactggagggggcaaaacgacagataggggcactcaaaagtgagaagtcccagattgaagctgaagctaacaaccaaagaaacctttcagtaaaactggagtctgatctcaagagcttgtcagaagcttacaacagcatagagcaggccaactaccgcttggatgccgaggagcaaacgaaggtcgagaagctgagcacaaggctggcagagctcggggaagatgtggatacccttctgcagggtattggcgatgacactgccattccggatgatgacgatgaagatgatgaagagtgattggtttatgtaacctgcaggtctgctggtgtaatctaccttcatgttgggtcatgatattgcgatggtaactggaaaatgtacagtggatgacaaatgcaccgttccaagtttaagttatttctagagaatgtgactaaatagcctcttgttaaatttgattgtctgaataactttttatattacctttgataaatagccccttgttgaatgggcctcagattcatcatcatatatactaaaaagaacgggtctgatctggtgtggaactcggcaacgtccgtagcccctagagtgctgctgataactgttcgacccacctccctgcatatggatgtgagcgatcgaagatcctaagcttcaaacccataagaataaggccattggccctttccatctggacattgctttggggatg

SEQ ID NO: 31881 - DNA, 2217 bp, Zea Mays
cttatccgcgccgcgtcctcccgtccccttccactcatcagaaacccccgcaccctctaactaaaccctcaccggccgccacccatggcgatggccggcgccgccgccgccgccgccggtcgctgcctcctcctctcccgcccgtcccccctccggctccgcctcctccacgctgccctctccaccgccgcccccaccctcggccccacctccactccggctccccctccgcggcacgagctcctcctcgagcgcctccgcctccgccacctaaaggacgcctcctcccccggcgccccgaggcctacctcgaggagctcggagcggagctcgcagcaggggaaggggaagagggtcgaggccgcggagagcttcgaggagctcggtctcggggaggaggtgatgtccgcgctgggggagatgggcatctccaagcccacggagatccagtgcgttggcgtgccggcggtgctggccggaaccagcgtcgtgctcggctcccacaccggatccgggaagacgctcgcctacttactccctcttgttcagctacttcggcgtgatgaggcaatgcttgggatgtcaatgaagccaaggcgtccaagagcagtagtactctgccccaccagggagctaactgagcaggtttatcgagtagcaaagtctatcagccatcatgcacgttttcggtcaacgatggttagtggaggcacccgtctaagaccccaggaagattctttgaacatgcccgttgacatggtcgttggcactcctggaaggattcttgatcatatcaaggatggtaacatggtttatggtgatattaagtatctggttctggatgaggcagatacaatgtttgatcaaggctttggaccagacatacggaagtttcttgctccgttgaagaatcgtgctgcaaagcctgatgatcaaggctgtgcaaaagttgattgatgaggaatttgaaggtattgtccatttgcggacatcatcatttcaaaagagagtttcaacagcacggcatgactttatcaaactttctggagcagaaaacaaacttgaggctcttctgcaggttcttgagccaagcttgggcaaagggaaacaaagttatggtgttctgtaatactttaaattcaagtcgtgcagtggatcattttttaactgaaaatcatatatccactgttaaactatcatggagaggttccagctgaagagagagttgagaacctgaacaagttccgcaatgaagagggggattgtccaacattagtatgcactgatctggcagctagaggcctggacctggatgttgaccatgtcatcatgtttgacttcccatcgaattctattgattaccttcacagaaccgggagaactgcacgcatgggagccaaagggaaagttacaagcattgtggctaagaaggacgtagctttagctacacggattgaagaggccatgaagaaaaatgagagcttggaagctctcacgactaacaatgtcagaaggccaaccagctcgcagagtgtgaacacgaaagggaggccctcaaggttggttaagacttcaaatgctcttaaagttgtcagtcagaagggtagaaggggagtatcgctatctagcaggtcatcccgggctccccaaggatacaacttcaacccgaaggcgctcgccaccgaagagccaggcaaaggcaacaaaatcgtcagcccctcggaaagccaagccggtgaaacccactcagagcagcgcaaaggtctcgaagagcaaagcaaaacctgaggggcgaagatcaaagagtgacactctgaacaagctgggaactaagctcagtgtggttggatttagagggcgcagctcaggcaaatcagcacaatcttcataaggctttggtatttttttttattattgttatgctaaaaaggttcttggaggatttgcagcctgtaaatatctgagactaagtttcatcatttctttttctccttgcgggtttataagtgaagaccacaatctgagatatgaacgcagcactgctatgtaatattgtactgcactcagcagaatgttggaagaatacttttcattaccgcctcgtttggatcattggaattgaattccattctaataatagtaatttaggcatatatcaattaagttaattcggttttatgtaaaatatatttgtatactattattagcaagatgtcg

SEQ ID NO: 31882 - DNA, 4166 bp, Zea Mays
cgccaccgcctcccacagcacgaaaccttctctcctcttctcgttctccccctctatagtcctccgccgcctccattgccttctcttgggctcctccccgtatcccgggactactagtccaacctcccaattctgcggcactcaccattcgacaagcactgaaccctaccccacccaccagtccccgcagccgcgctccgcaatggcgagcggggcggctagaaagcgccgccgcaagtcgtcgccccctgccgccgccgcggctgcacgggacgggaggaagctcctcgtcggcgaagtcgtcgaggtgctgagttgtgatcaaggactacgtggctcctggcataaggctattgttattggtattctggaaaatgctcgcgcagtcagatatactgatttcattgatgaaaatgggtcacctcttgttgagaatgttcaagtgtcagatgccattgatggtaagtcaagtatgcctgaggaactcattcgtggcaacattaggccaatgtgtccacatcaagcactgcaggtgtctcatgcaagctatggactttgtgttgacgcactcatagaaagttcctactgggaaggtgttattgctgatcatgctgaaggctctatggaaaggaaagtccttttccctgatgaaggtgatgaatgcattatagaagttgatcagctacgtcttactcaagactgggatgaagctacaggggaatggaaaccacgtggaatctggtcatttctgcagatacttttgtcacatgaagagagagatggtttacctgtgtcaatcaggcagatatggtttgacttaagatccaaaccttcttttaagactgatgccaaaatgtggatgtgtggaacagaagatttttgggagagatcacttgcagatgtcattgctgaattgtggtctctatgtgacaagcctaccctagatggatatcaagtggaagcagttcagaaggatacagttgagaccactgtcttggataggctggatccattccaagcattatcagaatacatctcatgctatcggaataataggaaaaatgctcttatcaaaaaagagtgggcaaagcaacaccttaaatcttcaggatggacctttctggatgacagacctaagaacaagttttacatctcacctgatggtaagcggtttccatcttttctaggagcatgccaggcgtgtttggctgcaaaagaagcaaatggttaccaatatgatcatacagaaaatttgcatctagacagtatgagtctggtgcacaagaatgcatgctacaaccagacacacatggatcttgccttggtaaagaacaagtccaatgataaatggatcacgagcccatcaagatcttgggaattggttcaactggatgctgaattttccccacagatagtttcccttcttgctagttatcaagatggcacaactgtccttcagaggacaattgatagaactctgagtgtgaagctgaagaagcatctattggcactgggttggagtattaagttcaaaaaggacgaaattcaagaaaatggccatcataaacacactacaagataccggtacgagtcaccttatgggaagacttatgtttctatcattcaggtaatatgcagtttgatagttggaggcgttaaacaagatgacaggcccagctatcggacagcagcaaaaggtgctcatttgacagtgtcaactggcctggcaaggctcaataaacgtaaacgaagggataaaactgatgctcttgaaaaatacatagactatatgaaaactgataagcaaaattccaggaggaggaaactgttgagatcaaatgctcagaagtttctcaaatctgctgggtggaatttttggttaaagaaaaagtctagaaacaaattggagttgaggtatggtgctccacatggcaagtcttacagctctttagtggcagcatgtaaaggttacttggaaaatggatatcaggaggacagtgatgcagacattaaaatcgccaaccatggttctgctgatggttctatgcgtccatcaaaattgatagcactcagcggtggattaaaggattcaagtaaaatacaggatctttccctgtcggcatcacgtgaagacagttttgtctttgttggtagagaaaaatattgtggtaccaagggataaggttacatataagcgaagtgatggacctggtataaaggaaggttccatcagcagagatggaataaaatgcatgtgttgtaatgaattattcactgtggagaattttgaggttcatgctgggagcagtacaccattaccttcggctcatatgtttttaaaggatggaaggtccctatcacagtgtttagttgaattcatgggtggaaacaagcccagagatccactgcatgtgcgcttgaaggggagtagttctgatctggaaagtgattcgatatgctctgtgtgccatgatggtggggatttattactttgtgacaattgcccatcatcttatcattatgattgtgtcggcttggaggtagaggccattccagaaggaagctggtattgtccatcctgcagatgcggtatttgtaacttgagtgattatgatcctgatatcagccaattcactgagaagaccatagtgtactgtgatcagtgtgaacgggaatatcatgtcggttgcactagaaatagtgaccatcagcttatctgccgaccagaaggttgttggttttgcagcaggggatgctcaaatgtatttcaacatttgcaagaagtcattgggaaacaagttccaactccaatcgaaggcttatcttgcactatcttgaaattttgtagagcgaacggcagtgaccatggcgattatgatgatgagataatggcagagcattatggcaagttgtgcattgcagttgatattcttcatgaatgctttgttactattatcgagcctcgcacacagagtgatatttctgaggatattgtcttcaatagagagatttgcggccagaagtttgctgagctgcctctgatcggtacaagatctctataccgtcgtcaaggaatgtgtcgacttctaattaatgaactggaaaagttgcttttagacttgggggtggaaagacttctattaccggcagttcctgaacttttgcaaacatggacatgctcatttggtttcacagttatgtcaaattctgagaggcttgagttggcagggaatagcattctcagtttccagggaaccaccatgtgtcagaagattttaaatgttgcacacaacatttcacaagatagaagtattccatcaatgtccaattctgagagaatggggttagcagagaacatggtggtgaagaaggcatttattccattgacagtggagccagaccatcatgttgatttgattgtggagcctgagctagtaatgaaaattgagaataacagcagtgaggagggtatttcttcaattgatccgctgactagtatgccagaccctcaagttggtttggcagtggggccagagatggtaccggtaagtcgggaaaacaaagataaagagggtatttgtttcattgatgctccaacttgtccgccagatcctcaagttgatttaacaacgggcattcatgagcaatcatttgtcagtgctggtgcagatcagtgcaacgagaattgcactttgaatataacacctaacacagcttcaggattggaatacaagttctcaggaaaatgctatgagcgggtaaaaaagggcgctcgcccaaggaatgtctggcttagaatctcgaccaaataataaccaaaggtagatctagtagagctacggatgaaggatgcttaactttcatgcaataagctttcagccatcgccttggcattgtccaagttcaagtcgaaactaacctaacctggttacggaagcgtgtgattgtgtatttcccacggtgtaaattaaggactatccaactgataacatactgtccagctacgaggaaaataagattatgttggagcaatttctggtgatggttttaccctgatgtgtcatattattatcagttctgtcgccatactgttcattggctcctttgttcatggtgaatcttctgagtttactttcgatgagctctatcctggtgttcctttgtcg

SEQ ID NO: 31883 - DNA, 1496 bp, Zea Mays
cgttcatcggtgtccactccagtactccactggtcgttgtctccacaaatccgcgtcatttgcagccaaaaccctcgccgtcttgtctccccccgcccccgtcgccctccccgtgatcagatcgagagagcaggcccgattcaattcgacccgaggcgccgcggcctgaaggaatttcgcgagtcgcccggaaaaaaagccctagccagatcagcgatggcaacgcacccggcgtccccgaccgccggcgctggtggcgacaggtcgccgtccggcccgccgccggtgcgcctgtctgcggcacaggcggtggcggcgatccagcctacctcaccgcggtactttttctcctcgctagccgctgcctctgccgcggcgtcctccccgcaccgccgcatcggcatcgccgtcgacctctccgacgagtccgcctttgccgtcaagtgggccgttcagaactacctccgccccggggacgccgtggtgctgctccacgtccgccccacctctgtgctctatggtgccgactggggctccatcccggtctccgtcgacgacgaccccgacgtcgacatcgccgagggtgcggtgcgcgctgcggccgctgaggaggagcctgaggaggcgaagaagaagcgggaggaggagttcgactccttcacgtccactaaggcgcaggaccttgcgcagccgctggtcggcgcgcagatccccttcaagatccacatcgtcaaagaccacgacatgaaggagcgcctctgcctcgaggccgagcgcctcggcctgtccgcgatgatcatgggcagccggggattcggtgcctcgcgcagggtcgggaaagggaggctcgggagcgtcagtgactactgcgtgcaccactgtgtctgcccggttgtggttgtgcgctacccagatgatgccttcggggatgagctgcgaacggtacctgaaaatgagcctgtgtatcatgcggcgccggaggcccagaaagaaactgagggaagtgcagggcggctaggcgacgaggggtggagaaagcagaggccgtcacgtcacgtcgtcagccagccagccctagcgtaacacaccggtgtcctgtctctccgactctccgtcccatggccactctgcatctgtaccaggaacctgtatatcatggacgagtccccgctgttttgcttcatgacatgtgtgttggtaaactgaagacttcaatgtttttggcgtgcatgggccgccgtgttcttcttctgcttgtgtcgtactggccttcctgcttggctcgctaccccgccagttcatttgccgatgactcggtggctggcaaacgagtggcaccgcggtcagccacaagggcaacacacgtacatgcattggttggtagctggcagcgggtaaaaataaaaaaaaaattatggtgttcggtttgatggatgagttctccatgactgttaaacattgaatttggtctgtgaagcggaatggattaatctcag

SEQ ID NO: 31884 - DNA, 2251 bp, Zea Mays
aaaaaagcacacgcgttgcgcaaaaggggaaacaggggatctccacctctgccgccgacccgtgggaagagaggagcgtgcgacggcacgcagacgcatctagtctcccgccgcctctactgtcctcgccatcgccagcaccccaaggctcggtacgattcggctgcgtgcccgcgcgtcggcactgcaccgcggcgcgcaggcggaccgtgctggggttttggtggggtgtagggaggggcgtcctgcgctctgcggcggcttgatcctgtgaaggcggcggcagcagcagcaggcttctccgatgcagcggctagtgggggtgggcgagaggctattggcaatcggaacaaataggcgggcggccacttattcccattcgagccacagaagtgggtactacacagcagtgagggacaatggcttgtcaacaaggcgagaaggtggcttagtcttatgcgccggacccttgaaaaggctgggccagcattcattaagtggggccagtgggctgcaacacgccctgatctttttccaagtgatctctgtgtagagcttgcaaagctccatagtgctgctccagcgcatggctttgcttacagcaaggctgccattgagaaggcattcggtcgtcagctttctgaaatatttgagtcctttgaggagaaccctgtagcttctggaagcattgcacaaatacatcgagccacactaaaacatcaacatcctggaaagcatgttgcagttaaggtgaggcatcctaatgttggagaatcaatcaagagagactttctactcattaatcttgtggcaaaggcttctgatatggtccctggattaagctggctgaggctggatgagagtgttcgccagttcgcagtattcatgatgtctcaagttgatctttctagggaagctgctcatttgagtcgttttatctacaacttccgcagatggagacatgtgtctttccctaagcccttatatccatttgtgcatccatctgtcctagttgagacttttgagaatggagaaagtgtttctcgttttatggaagaaatcgaagggaatgctcggatgaagaaagaccttgcacacattgggacatatgctttcctgaagatgcttctggaggacaattttattcatgcggatatgcaccctggcaacattcttgttcgtttaaatgagaacaagcttgcaaggagacgttttttcagagctaagccccatattgtgttccttgacgtgggcatgactgctgagctcacacgatctgaccgggataacttacaacagttcttcaaggcggtggctactagagatggccgtactgctgccaagtgtacccttcagttatcaaagaatcagagctgtccaaatccagtggccttcaccgaggagctagacaagacgtttacattttggggaacacctgaaggggatgtttttcatcctgttgaatgcatgcatgagttgcttgatacagttcggcgccacaaagtcaacattgatggcaacatatgtactgtaatggttaccattttggtccttgaggggtggcaacgcaagctggacccaggctttgatatcatgcaaacgttgaagactttactgctagagaaggacataaagcaaccaattgattttttctcataaacaaacctgtcagatcgttcttatgtatagaagcagtggaagatgatgccctaccaatcagaaggcgaaacatctaatccaactcgaagcaacctggcattaattgagcagatatattatgcagtatgttctatctgtcctttctgatagtagaagtagcagaaactgtctgcactgagtttcattttttactacgtcagtatgaaaattttgccgaccacgaccacccaggcgggtccagccatggtgttctttaaaattcttgggaagttcctgtccaccaaacttcgtagaagagcaaacagatgtagaatagtagtcattgaattgaggccgagttgaactacattatggcacacataggtttggttccagacttgtgattcataccggcaactaaggaattcctcaatcaaggaacaggaagagacagggatggggtaaaaatggctaagctataagtttggttgtccgttttatgcgtggctacgttaaagttttggaccgtcttcagtgttcagtgcgggtgagccgttatttaggtaatgttatgttccagattatgcttaaatagtgaatcgtctcgctccat

SEQ ID NO: 31885 - DNA, 4441 bp, Zea Mays
attcgaacacaacacacatggtgccttggagatagaagaaaaaaaaattgcaagtggaatggcatcctggaagaacacttgctcttactcttacactccagtgtcaaatgccgttgcgatgctagctctagcgttgctggtcctggcggcgccggcggcgtccgcagtccccgacgcgtccgcgtccgtgcacctcgaggcgctgctggcgttcaagaaggccgtcaccgccgaccccaacggcacgctgaccagctggacggtggggtccggcggcggcggcggcggcggccgctacccacagcactgcaactggaccggcgtggcctgcgacggcgccggccacgtcacgtccatcgagctggtggacaccgggctccggggcacgctgacgccgttcctgggcaacatatcgacgctccagctgctggacctcacgtcgaaccgcttcggcggcggcatcccgccgcagctcgggcgcctcgacgggctcgaggggctcgtcctcggcgccaacaacctcaccggcgccatccctccggagctcggcggcctcgggagcctccagttgctggacctcagcaacaacacgctccgcggaggcatcccgcgccgcctctgcaactgctcggcgatggcagggttgagcgtcttcaacaacgacctcaccggcgcagtccccgactgcatcggtgacctgaccaacctcaacgagctggtactctcgctcaacagtctcgacggcgagctgccgccgtccttcgcgaggctcacgcggctcgagacgttggacctcagcggcaaccagttctccggcccgatcccgccggggatcggcaacttctcgcgtctcaatatcgtccacatgttcgagaaccggttctccggcgccatcccgccggagattggccgctgcaagaacctgaccacgctcaacgtgtacagcaaccgcctcaccggcgcgattccaagcgagctcggggagctcgccagcctcaaggtgctgctcctgtacggcaacgcgctctcgtcggagattccccgctcgctcggccggtgcgcgtcgctggtttcgctccagctgtccatgaaccagctcaccgggtccatcccggccgagctcggagagctacggtcgcttcggaaactgatgctccacgccaacaggctcaccggagaggtgccggcgtcgctgatggatctcgtcaacctgacatacctgagtttcagctacaactctctctccggacctcttccggcgaacattggatcgctccagaatcttcaagtgctcgtcattcagaacaactcgctctccggccccattccggcgagcattgccaactgcacttcgctgtacaacgcgagcatggggttcaacgagttctccgggcctttgcctgccggccttggtcagctacagaacctacacttcctgtccttggcggacaacgacaagctgtccggcgacataccagaggaccttttcgactgcagcaacctcaggacgttaaccctggccgggaacagcttcaccggcagcttgagccctcgcgtcggcaggctcagcgagctcagcttgctgcagttgcagggtaacgctctgtccggggcgataccggaggagatgggcaacctgacgaagctcatcgccctgcagctcgggggaaacgggtttgtcgggcgcgtcccgaagagcatctccaacttgtcgtccctgcagaagctcacgctgcagcagaaccgcctagacggcgccctgcccgacgagatcttcggcctgcggcagctcactgtcctcagcgtcgcgtcgaacaggttcgtaggcccgatccccgacgccgtgtccaacctgcggtccctctccttcctcgacatgtcgaacaatgcgctgaacggcacggtacctgccgcggtgggaagcctcgaccatctcctcacgctggacctctcccacaaccgcctcgccggcgccatccccagcgcgctgatcgcgaaactgagcgccctgcagatgtacctcaacctgtcgaacaacgggttcacgggcccgataccgaccgagatcggcgccctcacgatggtccagtccatcgatctgtccaacaaccgcttatccggtggtgtcccgtcgacgctggcagggtgcaagaacctctactcgctcgacctctctgccaacaatctcaccggcgccctgcctgccggcctcttccctcacctcgacgtcctcacaagcctgaacatctccggcaacgagctagacggcgacatcccttcaaacatcggcgcactgaagaacatacagacgctggacgcgtcacggaacgcgttcacgggggccctaccgtcggcactggcgaacctgaccagtttgaggtcgctgaacctctcctggaaccaatttgagggtcccgtgccggactccggcgtgttctcgaacctgagcatgtcgagcctgcagggcaatgctggcctctgcggctggaagcttctcgctccctgccgccacggcggaaagaaggggttctcgaggacagggctcgcggtcctagtggtgctgctggtgctggccgtgctgttactactggtgcttgtgacgatcctctttctcggataccggaggtacaagaagaagggaggctctaccggtgcaaacagtttcgcggaggacttcgtcgtgccggagctgaggaagttcacttgcagcgagttggatgccgccaccagttcattcgacgaaggcaacgtcatcggtagcagcaacctgagcacggtctacaagggcgtgctcgtggagcccgacggcaaggtggtcgccgtgaagcggctcaacctagcgcagttcccggccaagtccgacaagtgcttcctcaccgagcttgcgactctgagccgcctgaggcacaagaacctggcgcgcgtagtcgggtacgcgtgcgagcccggcaagatcaaggctgtggtcctcgagttcatggacaacggcgacctcgacggcgcgatacacggcccggggagggacgcgcagcggtggacggtcccggagcggctgcgcgcgtgcgtctcggtggcgcacggactggcgtacctgcacaccgggtacgactttcccatcgtgcactgcgacgtcaagccgtcgaacgttctcctcgacagcgactgggaggcgcgcgtcagcgacttcggcactgcgaggatgctgggcgtccatctgacggacgccgccgcgcagtcggcgacgtcgtcggcgttcaggggcaccatcgggtacatggcgccagaattcgcgtacatgaggacggtctcggcgaaggtggacgtgttcagcttcggcgtcttgatgatggaactgttcaccaagcgacgcccgaccgggatgatcgaggaggagggcgtgccactgacactgcagcagtatgtggacaacgcgatctcgaggggcctcgacggggtgctcgacgtcctggaccccgacctgaaggtggtcaccgagggcgacctgtccacggtggcggacgtgctgagcctggccctgtcgtgcgccgcgtccgatccggcggaccggcctgacatggacagcgtgctttcagccttgctgaagatgagcaaggtctgtggaagagactagatgcctgctgcaaaaacgcgaactgaaattcgtgctgcaagatctgttcaagcaaagggagaaccctgcttctgatgagtaccacccggacgccggacgggacgccaaagtgtcatagattcgggctgctcctgtttgcacgtgtaatgagttcaatctgttcagagccagcatggagctagattccaggctatagtgacttttatgtgccctatgaatggttcgctgaaaccagtctagcccatgctgcctgacggaatgggcctgaagtggtagtactgtaggccttttgactgttgattttctttgccgcaacatacctgcatacgcagaagaatggaagctgaaagatttggccaagttgtgggggaggatatattattcatctcattggattggatgcaaacaacagtgtccatcaatcacatcagacatgataatgtgaattctagtcccaacgcagatgtctctcaaatttacagcaatggcttattggtggggagaaggaataatgtccctgaaaacactctctcatgttgtggctagcaaatcatgtatatgcaaaacactatttatactctacattatactgtacattatattatttatatatttgatgtaaaagagggtcacaactataagttaattacgcctccatcagaacgcgggagttaaaggtagatgcgatcaatctaacaagtagtagcatactgctgcacagataaattcagacgccacctgtcagcctttgcatgaacatggaggagaattggacggtaagattcagatagcaaaatgagcagcatcaca

SEQ ID NO: 31886 - DNA, 844 bp, Zea Mays
gtcctgtggtgttacctgtctttatttatagattgcaggtgttgcgatggattgcggtccccccatcccccactagcataatagctagccaagtactgtactacggattgctgatttccctgccccgtcatgataccttgcagcatggagtactggcctgacccacagcgggggatcaaggaagcatacagggtcttgaggctcgttgggctagctagcttacgtgattggcccgatgtacccacccttctggctaccccgcttcttcgccgacatgtgggtgctcttccccaaggaggaagagtacatcgagtcgttcaagaaggctgggtttaaggatgtcaagctgaaaaaggatcggaccgaagtggtaccgtggtgtctgaaggcatggcctcatcatgggttgctctgtcacaggcgtcaagagagagcgtggagactctcccttggagctcggccccaagttggaggatctcagcaagccagtgaatccgatcaccttcctcgcttccttgtaggaacaatatgtgcatcacactatgttctgtgcctatttacatgtggataaaggaccaggtcgtgccaaaaggcatgccaatctgagtgggaaggggaatgagctgcatggaagagaggatagccaacatctgaattagtcttctctatattaggcacttcttgtgtgttttgtattagtacctcttgttttcctactgctatgtactccttgtactgttgttcctgtttatgggaattgataataccaagacacggatattatccagtttcttgagcatgactgcttgcagtggaacctccgtagcagattatcggatttgaa

SEQ ID NO: 31887 - DNA, 66 bp, Zea Mays
acgggacagagttcaagaactctcaaattcaaggctttcttgaggaagagggcatcaagcatgagt

SEQ ID NO: 31888 - DNA, 2098 bp, Zea Mays
tgtctaattgaaaatatattgggtgaaaagatcttggaaacatgcaagatgtggctgaacacaagttataaggcatttgatgaggtcgaaggcattgaggtcgcctggaatcaaatcaacatagatgaggtgatgcagtgtccagataatcttgataggctctacacagaagttcatcttctgaagtcactcaagcatgaaaatgttatgaagttttattattcatggattgatgaccagagtaagaaaattaatgtcatcacagagttgttcacgtctggaagcctcaggcattaccgtcagaaacatccacgtgttaacttgaaggcaataaagaattgggcaaggcagattcttcatggattggattacctgcatagccaccaacctccgattatccatagagacttgaagtgtgataatatttttgttaatggaaaccatggagaagttaagattggagatcttggactagctacagtaatgcaaacacctagggtgaggagtgttattggtaccccagaattcatggcacctgaactttatgatgaaaattatgatgagcgtgttgatatttactcatttggaatgtgtttgttggagatctttactcttgaatatccatacagtgaatgtacgaatccagctcagatttttaagaaagtatccacagtaagtgctccttcacttatttgtagaattgcaacactattttatctaaactaccacctaatatctgtagggtgttaaacctgctgcattggctagaatttctgatcttcaagtaaagcagtttattgagaaatgtttagttcctgcttctgagaggtcgtctgccaaagaacttctgcaagacacatttctttgtcctgacaatacacatgaacctgctgtcactaagtttatatctccagcacctaaaaaaacagtagatatctctctggcgtctttgcatatggatgttgacactttggaatctagccatactgattcaggcaaggaaaatggatctgttgctccacatacaccagttttggagttcacaagaaccaacaaaaatacagagctaaagctaaagggcgagaaacttgataacaactccgtgtcactggttttgcgaattgctgatttctctggttggagacctgtaaatgatgcagcagcgaactcgtataggcgatctgaaagtgaacttgcagtcaattcccatcagaacatctcaaagttggtacctgattatgcattaattgatggtgtgatgcgcccaaaagatgtgaatgcatcaactagttgccttgactctgtctcaagtgcaaccaacctaggaggatcacaaggttctgaaggttcagtcatttctgtacagcttgctgagagttccaaaagtgtgagtgactatggggccgaggattatggcactatggactgtggtgggtacaaagacggaatcagcacattagattgcagccatgttttagataatggatcgaggtcgattttccatatagatcaagcatcacctttcttggagttggccagctgtggttcatcaacttcaactgataaccaggatgtgatgaacggggagcttgtttttattgaagctcagtacaagcacttggttgatgagttgacaaggatgcgagaagaggctagggaaggagctcgaaaaaactggttgccagatacatgatgtttttgttcaaatttggcatttcctctaaacatcataaactatgttcgatttcatgtttgaagtgtgagaaatgttaataatctgttttagttaaagcattgatgtagtttgcaagtcacagcaaacttcgtgcccgtccccagatcaggtggtcgttctctcgttgagggcggagcaggaccagattttcccagagcacagaaccaccttaacactccctacaaaaaaaataattgtatgatcgttctcctgggagccattcctccgttcttccctcaattcatgtcgctgtatgaaagcagggtgatgataagacggggtgcagaattgcaggtttgacaaggtagtatgcgtttgggggcggtctgccgtactaggcataacgtcaatcaacgaatacaa

SEQ ID NO: 31889 - DNA, 4170 bp, Zea Mays
ctttttagcccgcccaagcccaaaggccaccaccactcgaccatcacagttcgctccgtcctgctacccagctacaacgcgccactcttcctcacactacgacgacgccttgccacggattcgatcgtcgccgcttgtctgccctatcatctcactccccccgcccgcttgcttttatatctggagcttcccaccagcaaagccttggcattgtgcttccttgctttgtgtgtggcgcgctccaggtgccagccccaggagagaagacaagccgaggttttcgcgacgacggggcttctccagagcatgtcaggactcaggagccggccggcgccaggtggcgtgcacgccgtcgatcgagttcattcgattccaggcttccagcacgctgcacgcacgtagtagctaggtggagaggagcattctacgtaccactgcgcgttcgtgtaggcaggcccctagctagctagctagccctgtgctctgcgtgctcctgctgggctttactcctactctgcctcgtagtagtcgtaggaggcctggccatggcatgcgcggcgtgaggacacaaaagccgcctgctttcttgggaaaaggcggggtcgtgctgtggtcgccatggcatgcatggccgcatggggggacccagtcccacacctcatagcccgcgtttaggcactagcagcttggtggagtagtacaatgtacaactacgacgactgctgcgaatgcgtttgggcgggttggggccgggtcttcttcttccacctggcctttttactccaccctcctctttgcctgctgttcgcgaaacggcaacatctcgcttgccatttaccactctcgtcctctctcacagtggcatgcaggcgcggtagggtagagttcctcacttctcgcccatcaacgatgacgaagtgcgcgtaagctgctgctgggaaacggagattggatagattcgccgggggtcttgttggcttcaagagagcccgagttctcctttttccagcttgggtctggtacgccatctctgggtctggggactgtagatgatgacgtcctcgtacgagaaggccacgtcgggtgtcctgaggaacgcggcggcgctgctcgacgaaatgcagctcatgggagaaacgcagggtgccaagaaggtgatcaactccgagctgtggcacgcgtgcgcggggccgctggtctgcttgccgcagcgggggagcctcgtctactacttcccccaggggcacagcgagcaggttgctgctaccactaaaaagatacccaactctcgcatcccaaactacccgagtctcccgtcgcagctgctatgtcaagtccacaacatcactttgcatgctgacaaagaaactgatgagatttatgcccagatgaccctgcaaccagtacactcggaaactgatgtgttcccaatcccaacgctcggtgcttataccaaaagcaagcaccccagtgaatatttctgcaagaatttgactgcaagtgatacaagtacgcatggtggtttctcggtgccacggagagctgcagagaagctgtttccgcagttggattattcaatgcagcctcctaatcaggagcttatcgttcgagatctgcatgataacatgtggacattccgtcacatttatcgccagccaaagcgacatcttctaacaactggatggagtctttttgttggtgcgaaacggcttaaagctggtgactctgtcttatttatcagggatgagaagtcacagctccttgtgggtgttaggcgggccaccagacaacaaccggctttgtcatcatccgtcctgtctactgacagtatgcacattggtgttcttgctgctgcagctcatgcagcatcaagtggtggctcgtttactgtttactacaatcctcggacaagcccgtcgccatttgtgattcctctcgcaaggtacaatatggccacatatctgcaaccatcagttggaatgagattcgcgatgatgtttgagacggaggagtcaagcaagcgcagatgcacaggtacaattgtgggaattagcgactatgaaccgatgcgatggccaaactcaaaatggcgcaacttgcaggtagaatgggatgaacatgggtatggagaaagacctgaaagagttagtctatgggatatcgaaactccagagaacatggttttctcttccccattgaattcgaaaaggcaatgtcttcctagttatggagtttctggcctacatgtgtcatcaatttcaaagccacaaggaagtccttttggtaacttgcagcacatgccagggatcagttcagacattgctttgctgcttctcaatcaatctgcccagaacctcgggagttcaattgcttgtcaacaatcatcattttccagcattattcaaaatgctaagcaaagctatttccctccaacgacattaggtgcttccactggttggaatgaatctcagcagcagttaaacgcccttggtattcaaaaaggtgatcaagtaagctgtgatgttcagccaggtattgattcaatcactgcaccggagatgaatgttaaaccaagagtcccaagaagcacggattcatactcaagtcagagcatttcggatccaaacagcaagagtgaccctaaaacaaaaacgcgaaggagcaagaagagctcgtctcacaaaaccatttcggataaatctgagatttcttcagtaccttctcagatctgtgacaagcaaaggcatggttcagaaccaacatcggcagactttgaagcagaacaagctacctgtgggaacaatgaggattcatctggtgcactcacacgtggtgattttgctggagagctacaagttcagcaggttgaacaagatggtctacttccaccaccgaagttagagtcatcaaagtcacctgatggagggaagtccgtcagctcgttcccaaaccaagggtgtttctcacagttctttgagggtctggattggatgatcccgccttcctgctaccaagactccaatggcatccattcagttaccacatcggatagcatctttaatccgtctgaaggtataccaccttccacaatgaacgcggacggcatggacgcgttccaaacctcttgcctttccgagtgctttcctaattccatccaagaattcatcagcagtccagatataaacacactgacatttatgtcgcctgagatgcaacatctggatgcccaacacgacggcagcaacttgcagagcacgtccaactcctatgtgcagatgagcttctcggaggagagccagagtgcatccttaagtggcctacacatggaagctgtccatatcaacagctcctgccttcaaccactggcgacagggagctttgatgcagggacgttctcaaaactatcaaacataaaagaatgccaggccttgcctctgcaggagattcacaacagctccatgggaacaccttcgtgcagtatggatgcggcggcggtcgagtactgtatggatcgaagtgtgaagccactgaaaccaccggtccggacatatacaaaggttcaaaagttaggatcagttggaagatctatcgacgttacacggtttagagactaccatgagttgaggtcagccattgcctgcatgtttggactacaggggaaactggaacaccctggcagttcagactggaagcttgtttatgtcgactacgagaacgatgttctcctcgttggagacgacccgtgggaggagttcatcaactgtgtgagatgcattcggatcctggcgccttcggaagtacagcagatgagcgagaatggcgtgcatgtcttgaacgactgcatgcaaatggcttagaaagtcagggctatatgtcctgcgcagcctgcacagtgtaacgtcgcaaatacgagaaatgagtgttcttcgtagccacgcagcggctcttcttgtaaataaaagatacatcacgtgcatccaattctctgaatgctttgattcttttctagcacgagaagagaccattattatatggcggtgcattacaggtctattttctattttttcatgcaatgacttaaattatgagcttacgaggaagggggtgataatgtatcaaattatcccatctatttatttattatattaatacaagaaatttaaaaaaaaa

SEQ ID NO: 31890 - DNA, 1696 bp, Zea Mays
ctgcttattctgttcgctgtgtttctttcgtccactcagctttccgcagccgccgttttacgttagccaattctgctgtcagcttgccgctgtccgctcgtcctttgagctttggttgtgtctcccaaatatcttgcctttttgttgcattggactcttctgtggttagaatggcagcacccaagcccatttctcgtcttatttctcacgtcattcttgatttggatggcaccctcttaaacacagattctgttgtaagtaaggtagtaaaaccatttattctaaagaatggaaaaacgtgggatagcaagaaagctcacaagctagttgggaagacaccttatgaagctgcagctgttgttttagaagactatggactcccttactctacagaagagttcctctcgatgattactccgatgttcagtgagcagtggtgcaacttaaaaccacttccaggagctaatcgactgataaaacatttaaagactaacggggtgcctactgctttggcttcaaactcaccaagatgtaacatagaagccaaaattttcttccaacaagggtggaaagagtctttctctgcaattgttggtggagatgaagtagagaaggggaagccatccccgaatatatttttggaagctgcaaagagaatgaactgtgctccttcaaattgcttagtaatagaggattccttgtgttacaggtggaaaagctgcagaaatgcatgtcatagctgtaccttcaatacccaaaaagactgctgagttcagttctgctgatgaggtgatcaattccctccttgatgtgaggcctgaaaagtgggggttgccaccatttaatgattggattgaaggtaccttaccaatagaaccatggtttattggtgggcctgtgatcaaaggatttggccgtggttctaaagtactaggaataccaacagcaaatttacccgcggagaatttttccgacgtagtgtcagaacatacatcaggggtatactttggctgggcaggactttcaacgcgtggtatatataagatggttatgagcattggctggaacccatatttcgacaataccgagaagacagtagaaccttggctgcttcataatttcggcgaggacttctatggcgaggaggtgcgccttgccatcgttggctacataagacctgaggccaactttccttcgctcgagagcttgatagagagaattcacgaggatggaagagtagcagagaaggcactagacctgccaatgtatgccaagtacaaagactcgccttatctgagaaacccttcgaagcacgggagtagtactaccggtgggacccagtctgagatggattccaagtgacaacccccctacagggccactagataatatgttacttattttctctatggtaaatgcgtcggtgttgatgcagaaacaattggactctctgtgagctaactcgcttcttaattttcggaagtagatagtattcctcgaagtggtgtttttactttgtaatatagaaaaaaataaagtggggttgttgaaacttgagagtcaaattccgagacgttatgcacgttttgatttctgaattaatcgattggtatcacttgtactgtttttatacgatgatgcttgaaccattcatttgtcattttaatttgatatacttgaagtcaacaatatgctt

SEQ ID NO: 31891 - DNA, 714 bp, Zea Mays
ctcacgcctcgcgcctcgttgcttcttatcctttatttttttccccaacccgtcgtcggctgccggctgcggcactctgggaggaaggccccaagcccttgccgccggagacgaaccgaaacgatggtgggcgccaatgaagtgggcgggctggagtgcgagcggaagccgctggcggaggtggtcggcgactgcgtccagcgctggttccaggacgcgtacaaggaggcgcgcaaaggcgacgtcgccaaccaagtgcttgtagcgcagatgttcttctcgggttatggaacccccaagaacgagtataagggaaaacaatggatggatagggcgtcaaggttcaggtcttcagctttgaaggttggcatgaaacgtccaggatacaatgcaagtgactcggactccgatgatgcaaatgatgatgccaaccaatgacagtcagttacaaattgagttattattagttaggagattcacaggtcacggctgcaggtagcagaagacgctggaggcaggaaggccttgaatgccgcagtgcatgtgaacgaagagctttcctttgcaagttacgtttggctgctgacgggtgtgtgtccggaggtcgcggctgacaccacacgcacgtctgctggtcagctgcagctacatctatgggtccatagacgatcccgcaagtggttgaaaagaagcgtgatccggcccagaggagat

SEQ ID NO: 31892 - DNA, 1756 bp, Zea Mays
cgcacactccagcctctaaagcctcctaaagcctgtgggcacgcggctggtggcgtaggcgtgcgatcctcatcacttcctcagaacggagaccctgctgtcctggaaccccgctgttgaggtctgggctcagaccattccagcccacgcatcctcctcggcattccgtcgaacacctctcttaccaccgcccccatgccgccggccaactccacgccgcccaaatggccgaagaccctcaccgcagaccacctccaccgcctggttcgggccgaacgggaccctcgccgcgcccttgcgatcttcgacggtgccaccgccgccgcttccacttcggcgccagaccccatcaccccgtctctggccaccgtctctctccttacctctcgcctcgcctccgccggccacctccccctcgccacctccctcctctcccgctcacgcggggtcttcccctccgttgccgctctcgagcctcccttcctcggcctcctccgcgccttctcccgcacgcaccgcccgctcgccgctctccacctcttccgctccgccccctccgacctcgcgctcccccactctgctcgctcctacaacgccgtcctcgccgctctcgtcgcgcactcgcacctccccctggcccgctccctactcgccgacatgcgcgccgccggattcgcccccaccgctgccacgtacaacgtcctcctcaaggcccactgctccgacgccgccgctcacatcgaagatgctctccgtcttttccggaacatccccaaacccgatgtatgctcctacaacaccatcatcgacgggctctgccgccgcggccgcctggcggaggccctcgacatgttctctgagatggttgggaaatgcattgcacctaccgtcgttacttacaccactgttatccattggcttgcaagggagggctgctttgatgatgccttaaagatatttcatgaaatggggaggagaggggtctcgcctaatctggtcacttatagttcactgattgatggactgtgcaagggtggacgtgccacatcggcattagaattgctggatagaatgatcaaggagaagaaactgccaaatatgatcacatatagctcggtgattgatggactctgtaaggagcacatgctgagtgaggcaatggagatcttggaccggatgcgactacaggggaggaagcctgatgctgggttgtttgggaagctaattgttgggctatgtgatgcaggaagggctgtggaagctgcaaattacctggatgagatggttcttgccggtattgaaccaaaccgggtgacttggagcttgcatgccaggataaacaataccgtgctgacagcattatgtgataagggtgaacttggcagggcttttcaggtctaccagagcacaaggactcgtagtatttctaccgacccaaccactttccatcttcttgttgagagcttctccaaaaataacatagagaaagctgcccgtgttgtgcttgacatgctgtcggagagatgcatccctgagagggagacatgggatgttattatcagtgggtactggagtaagaaaaaggtgaggcaagaagccaaggaaatctgggaccatataacagttagttgattttagaatttggctctatgttgtgttattacctggcgtcgcctagcgcgggagcttactcgtcagtggatctttggatgtggatgtggggagagtctttctattatcgagacatctgtgctag

SEQ ID NO: 31893 - DNA, 1350 bp, Zea Mays
cttcctgtctctcccccctctccgcgaccactacggccgccgacgccgccctacaccaggtgccgaggccttcgttggctcttggccggcgacgagcacctgccaggtgtttttacagaactgttgcagcagatgcaactgaagggtcttcaagttgatgaaatctattcacttgacctggatgctctcaatgatcttcagccaatatatgggctaatagtgctatacaaatggcgacctccagaaaaggatgagcgtcctgtcatcaaggatgcaattccaaaccttttctttgccaaccagataattaacaacgcgtgtgcaacccaagctatcctttcggttctgttgaactctcctggcatcaccctcagtgatgaacttaaaaagctgaaggaatttgcaaaggatttgccacccgagctcaaaggattggctatcgttaattgtgaaagcattcgcatgataaacaactcgttggcaaggtcagaggtctctgaggagcagaaacgacctagcaacggcgacgatgtttaccatttcataagctatgttccagtggatggtgtcctgtatgagcttgatgggctaaaggaaggaccaatatgcctggaaaaatgcccaggtggtgttggtgatgcagggtggcttaggctagcgcagcctgtcattaaagggcacattgatctgttctctcagaatgatgtaagatgcagtgtgatggcaatcttaaagaaccggaaggagatgtgcacggtggaactcaaagaactaaagaggaagagggagagcctcttgcaacagacgggctatccttctgcaattaggcacgtgccatctgttgagcagtcactagcggaggtgtcagctcagatagaggctgtgacggagaagatgataatggaggaagagaaggtgaagacgtggaagacggagaacttgagaaggaagcataattacgttcccttcctgttcaatttcctcaagattcttgaggagaagcagcaattgaatcccctgatagagaaggcaaaggcgaagcagaagtcgcactgccccagtcctaggtgaaagatgcaatgatgccatttcattcacatattagtaacgtaatgggtaatcaacaacattaaattatgtttgtttaagtaacgtaatgggtaatgcaatgattcgtagttgggtccttgttttcttgaccagtatttgaaccttatgtttatctctactagttttattaggtagtgcacaaatggctgccattacatgtttgaggtgaacgagtcttgacgagacgagtgcctcgtggactgtatgcagtcatactgatgtgtttgaacaccatccatg

SEQ ID NO: 31894 - DNA, 2187 bp, Zea Mays
gtgcccccacgcgcctacccactgttcccggctccccacccgctccactccgtcccgtcccgtcccgttacaaaaccccgagctgcaaccccacagccagagagagagactctcccggctcccctgcctgcgcgccgtctcctccaggctccagcgcctcgcggccaccccgtacgtaccacggcacggctgcacggccgatggcgtaccccgccgcgccgcacacgagcgcggccttcctcgctagcttcgcgacgccgctccccgcgcgccgcgcctcgcccccgacccggcgccgcgcggtgtcggtcgccgccatcgccaccaccaccacctgcgtcttcgccgacgccccccgtgggatcaaggaggagcaggcggactcgggcgcccaggcggcggcggctgcggctgcgcggagggacgtcagcccggacaccgtggcctccatcatcctcggcggtggcgccggcacgcgcctcttcccgctcacgcgtacaagggccaagcccgcggtgcccgtcgggggatgctacaggctcatcgacatcccgatgagcaactgcataaacagcaagatcaacaagatctacgtcctcacccagttcaattcccagtctctcaatcgccacatcgcaaggacatacaactttggtgagggagttggattcagtggcgggtctgtggaggtgctggcagctacccaaacagctggggaatcaggaaagaaatggttccagggaacagcagatgctgtcaggcagttcctctggctttttgaggatgcaagactcaaatgtatagaaaacatactgattctgtctggtgatcatctgtatcggatggattacatggattttgtgcagaagcatgttgactctggtgctgatatttcagttgcgtgtgttccaatggatgaaagtcgggcatctgattttggattgatgaaggccgacaggaatgggcacatcactgatttccttgaaaagcccaagggtgcagatttggaatcaatgcaagtggacatgggattgtttggattatccccagagtttgcaagtacgtacaaatacatggcttcaatgggaatatatgtattcaaggcagatgttctcagaaagcttctgagaggccattatcctacagctaatgattttggcttagaagtgattccaatggctgcaaaagattatgatgtgcaggcttatttgtttgatggttactgggaagatattggaacaataaagtctttctttgaagcaaaccttgctctcactgatcagtctcccaacttctatttttatgatcccgtgaagcctatttttacatctcctagatttttacccccaaccaaggttttgaactctatagtttcacatggctgctttctaactgagtgcagtgttgagcactctgtcattggtatccgctcaaggttagaaccgggagtgcagctcaaggacaccatgatgatgggggcagattactaccagactgaagctgagagattatctgagctgtctgttggaaaagtcccagtcggtgttggagagaacactaaaataaggaactgtatcattgataaaaatgctcgaattggaaagaatgtagtcattatgaactctgagaatgtgcaagaagcagacaggccagctgaaggatattacattcgttctgggataactgtggtgctcaagaatgcagtaattctgaatggtacaaaaatttagaagattatagaattatctgcagaataccaatccctcagtgaagagcacaccattgaagcccacagcagagttctacgacgcagatgcagtcaataaaaccccaatagcacaaaagattaggagactgtcgatgcagctaaagaagtgtggatataggcatggagcacctgcaacacgccaacggtacggccaaaccatgagcatgaggccatttcacgtcctttcataagcctcggctagtgccggcgcgcgcagggtatcttttgttccttttttctagcagtaatttacgtgaagtgtctgtacatgtagagggagagatagggtacaagtacgagagagcatgttatagtacctactcttattatttgtttatttattgttgtgccgaagaacgacccgtgcatctcatgtgccaagtccatgcctaattgcctattgatgcccactttcgggg

SEQ ID NO: 31895 - DNA, 1585 bp, Zea Mays
ttcggtgggggattcttctcccttctttgtgatccagggctaggcaaaagccaactcctccaagctgcagcagctgtttccccacgaggaatatatgtatgtgggaatacgacaacaaaggctggcctaactgttgctgtggttaaagattctatgacaaatgattatgcatttgaggctggtgccatggtccttgctgatcgtggaatatgctgtattgatgagtttgataaaatgtttacagagcatcaggctttacttgaagccatggagcagcaatgtgtttctattgcaaaggctggtcttgtagcaagtttgtcagctcgaacttcagtgttggcagctgcaaatcctattggtggccattatgactccataccaatgatgttgataatttcagacccaacaagaggaccagaacagggtcacattttgatggtgatccggggcttggagttggtggaaattcagtagcttcaaggctgaggctacacccagagaaagacaaggacttcactccattatctgggcaacttcttcgcaaatatatatcttattcaagagaacatgtcttccccagaatgtcaaaggcagcagctgcaattttgaaagaattttatttgaagctgagaaaccgcagtgcttctgctgatggtacacccatcacagccaggcagttagaaagcctagtcagattagccgaagctcgtgctcgcgtggatctaagagatgaagtgactgaagaagatgctcaggatgttgtcgatatcatgaaagaatctctgtatgacaaatatgttgatgaacatggttttgttgattttactcggagcggtggaatgagccaaccgaagcaggcaaagaagtttctgaatgcattaaacaaggaatctgagttgcagcaaaaggactgcttctcgagaactgaactttacaccatagctgataagatcagcttgcaagttccagacttggacactcttgtagaaaagatgaacattgccggttaccttattcaaaaaagatcagggatgtatcagctggtgactgcgccatattaacaatgcagccaacgaggtcaagatggagagttttcttgaatgaaactagaatttgcacctgctttgtctgtactagtgcctgctctagatctccagacactctggaaggccttaatccatttcaacataattgacatgtacctttcagctcatttccccccgtcccgtgagagatgtatggtttggaagctatgcgtatcgtcatggctgcgcacatacgtgctgcagtgtacaggcgactgaagtgcacgcgtcgcaggatgagcactaactttggtagcttggtgtatgccatggttgcgatatgatatattattgtgaaacaggaacctctagcggttattagtttatagatattcaagtttgccaatgaaacatccagaatagcatatgatgcattttacaccccttacacccgatcactcggaaaacatctagcacgctgtaaattactccctcagcaatagtaattattgctgttactgcgctgcactgcttgggaacactccttttcaaagccacat

SEQ ID NO: 31896 - DNA, 257 bp, Zea Mays
actcctaaataagtacatgacaagtatacacatacttctacacaacctagcacttaataaaagtgaccaatttgaattcacttaggtaaaccaggcaactaatccaacttatatctcatccaaaagcttaaaacttcttaagcaacttcatctcttcacttaactactaggtgtcctcatttcataggtgaaatccttttcctttttggcaactattatttcgctaagcaaatcacatccaaactgttccaaacttt

SEQ ID NO: 31897 - DNA, 2760 bp, Zea Mays
atggcggattcgcgaggaatagcttccaagagcgctgacaaggatagcacctccactcgcccggcgcgcctccgcgtcatgcgccaggaagtcaaggattttttgacgagtcctcgccgtagccgccccaagaagcagccgcctccgcctcatcccccgccgccactggaggagaaggtgaaggagaggaagaagggaaaggagaaggcagcgacggaggaagagaaattcgagcgcgcgcaatacagctgtgccttccaggacgagggcgatgggggccgcgacttcgcgccgccggagctggtctggggtaaggtgcggagccacccctggtggcccggacaggtattcgacgccgccgatgcgtcagagatcgcactgcagcaccggaaagccggcgccccgctcatcgcctacttctgggacaggaccttcgcgtggagcgactcttctgcgctgctccccttctgcgccaactttacgcgactatccacccagagtactatgtctagcttcgtctccgccatcgactccgcgctgttggaggttgagcgacgcgtagaggctggcctctcgtgcggttgcttcagttccaacattgccacgaagcaggaggttcaaaactccggtatccggcaaggggcgtatggtgcggcgatagactctgtctacacgagggatgccttccatggcaaaacatttcttgactacatctcagcactaggaaagaagccactagccggtgctgatcttcttgacctagccaccgccaaagcacagttgagggcattcaatcgttcaaggggttcaagggaccttcctgagtttgtgatgtttgagggcattgcggagattacagagatgacacacacaaagggagaaaggatgcacaagagtgaggatgatgttctgagcaaggagaagaaatcgaggcgcgctgggagttcacgtagaaaaggagaggctttaccagaggctgcaaatgatgatgctatagatgaagacagcaatggaggggcaggaaatgatacgttgagtcagggggaaaagtcaaagcgtgtgaagagttcatcgaagaagaaaacagacatttacaaacatttatatggactcaaaactgattctgttgctgacagcagaacactggacaagaagggagtagatgatgttttgagcgagagaaaatctgggcgcacactgcgatccacgagcaagaaggaagatgcattagagggtttgaaaaggctggcaaagcatggaattgaggaattagcaggaaaaagcaaagatgcccccgttcttaaagaaaacaatcagaggcatggtgcaggctctgcacacaagggtagaatcacagaggatgggtatcatagacttggagattgcaatgctgaggatctaacttctccaagcaagagaagattggggcataatgaaaactcaataatcaagccagtgaccatctccgagcatggtaggaagaagaagaaactttctgaactcatggcagctataggcaggcctaattctgtatcgggtggtaagagcaaagctcgagggaagcgttcgttgcatggtttagctgagaaacctgaggatgctgatcgccactctaaggatacattgatgactaggaaaagaaagaagctcaacacattaggggatttatcttcacagtcagagcctctctctcctaagaagtccacaaaggttggagaactgatgagcaaagcagctgggagcaacatgttacaggcagcacctgctgtcaaagctattagtgcagtgtctcagacgaaaccacgtagggctaagcacaggcaagtaaatgctgcagacaaatctccacgtcatatgaaggtaaatcgggggaacagcaaagccgctagtaaggagtctctatcttgtggagaaatgctacggcagatctcattagcagcatgtggtcttaagcagagagaggaaattgctccttcaagtgttaatttctttaccgattttaggaagaactccattttttctagttctgatgtcgatgagaggatgcctgagaaggcaaccaacgccgagtccactccttcagaacagcccattgttgatcatatgcaggatgactattggtccgacattctcattaatgtggaggagccgttatctagcctcaaaaagaagatatataagagtaagaaaagagcaaacaagaaggcacctcaggttaagaaacctcctgttaattcattggcgactgcagaaaatgcggatgagccaaggagtgaaggcaaccaagatacagaaaatggggaacaacttaggaacaaaacgaagctgttttctgcaaatggatctcaacagaatgggacaaaatctggtgaagagatggaaaatagctttctgtctggactggtgctgcacttcagcaggccaagtgatgttccatcatgcagtgaccttatcaagatctttagccaatacggtcctgttaatgaagccaaggcagaggttgcaaacagtaccagctctgctcaggtgatcttcaagaggcgcatggatgctgaggcagcgtttgcaggtgctgggaagatcagtgcccttggaccagcccttacgagctttcgtctcaccgacttcccagcaagtgcttcaggaaataaagcttcacatggtgcatgaaagagcgaatagagtgttgcatggcagtgagggaaaccagatgagggagttagagaaaaaggtaccaacacttcagcttgaggtagaaga

SEQ ID NO: 31898 - DNA, 531 bp, Zea Mays
agagaccgtcgtcccctgggccataaaattcgtgcgccatggccttctatcccattccttcgccgttcctcagtcgtcgatttccagagagagagaaaggatgtccttctgccaggaacttggcggctccgcctcgggctcacgactgcgtgctactcggtgaaattaaaggggctagggtgtgtcgtcgaggttcgttgtccacgagtgtggtttgcggtggtcggaaaagcacgaggttactggggatttctcgccggaggtcatttccgtcgcgacgtcgaggacagccttgcgcccaccgtctcctttggttggaagagatccaggtgacggaagccatactcgctttcggcctcctccagcagcgctgcgaagacgaggtgctcgaggtggcctattgactgctggtgtgcatcagcaccgtcaacctttcgtgcatcccccagttcgtgtaccggtactttggccgcggcagagtcgacatctgagatatatgaggccttggaattgaggaatggtggatctgat

SEQ ID NO: 31899 - DNA, 2634 bp, Zea Mays
cccggtcgcgtactctgtcttctcgtggttctcccgtgcccctcgcgtgcgctctctgtctctcggggcgacgactaggcggctgctcgccggccgccgacgccgacgcccgccgccagattcccaggtatctatcttcgggacctcgaccggcgacgagcacccaacaggtactgattttgctgaagcaacagaataatgtattagccctcatgcgttaacacctacataaactttgagtatcctagtttcaagtgaaatcatggcacgaaaaggaaatcaaagtaagagtggccccaatcatgcttcacctaagtggaaaaatacaactgatggtgatgcactaagtacaccagaaagaggtgctgcagatagtgaaaatccgagttcacatgttcaaggcagatcaaagggtcctgaaggaagcagtgagaagaaaggaagaggcagcaaaaggaacagcacaaacaacggcatatcatcctctggaaaaaaacaacaaatggacaccggttgtgatataaacagttcagaagaaaaggagattccggtaagaggtactaaaaatagaagaggtagccagaaaccctctaggcgcggttttggtagaagttttttcattgagcaaacaacatcgtctggattggcaggaaatgttttggagaagaccaggtgcattgcttgcatggctgcatccattattagagcttccatgatatatctagttgaagaaggcaaaagatttatcgaaaaaagaatgccaacaatcaacacttatatggcttttgtcaacaaagggcatgcatatgtcttaagcaaaattgcatatgtttatcccatagttcgagcttggatgcttaatgctggaagggtgatgctgctcttgtttacagtttggttagactgcaatgtaaggggctttgattctttgctacgattggggacaaactctctcctagcagtactttggtgcagcacgctgtcaacttttgcaatgattgggataaaaaagatgctcatattcatggcgattgcagcttctgcgtttgccttcataggtctaggttttgctatcctgcttatatcagtgcttgcagtggtaatcttatggttttatggaagtttttggacgaccacttgtgtaatgattcttggaggtgttctctttttcttgaaacgcgaaagaataactcttcttgttgcctgtttatattcgatgtattgcgcgagatgctatgttggatggctcggattgcttttgggcctcaacttatctttcttttctagtgatattctagtgcagttcctaagggacaatgcagacaataaaaaattcaatggttcttcaaggtactcagagcgaagctctggtagacaaggcaatatctttgaagaatttcagccatcagcaaatagcacctaccaagccagatatgctcgagcttcagatcgagatcctggtgatccttcaacaagtggacctgagaaagagcttacctctgaagatgaagtggctcgtttactgaactgcactgaccactattcagcattaggtttccgtcgatatgagaacatagatgtatcatctcttaagagagaatacaagaaaaaggctatgttagtccatcctgataagaatatgggcaatgataaagctgctgatgcatttaaaaagcttcaaaatgcatatgagattcttcttgattcactgaaacgcaagacatatgatgatgagttgaggagggaagacctcttgaactacttcaggcagagtgtttctcaaaaggactgcaaggagttccatcaagctaaagatggcgatggatgggttgaacagtcctttcaacctgttctatttggcatgctgcagaagcctgatttacctcatgcatatgtttgcgcagaaagctacatatttgatgtcactgagtggttcaactgtcagggaatgagatgcccggcgaacactcacaaggcaaccttccatgtcaatgccaacatggcaaagcagagcagtggcaaggcgagtacctcaacgcagagggctggtaaggccccaagtggtgtaaacatggatggaggaggactcaacgaggaagagttcttcgagtggttccagaatgcagtcaactctggaatgtttgaaactacattcggggcacaaggcgacccgacttctcctggtaacggaagcaatgccaagagtagcggtagcagcagcagcaacaacaatagtaggaaaaagaagaaaggaaagaaacagtggtaatcaaagcaaagcaggctggggtctggtgatcacttctcggggcagagaaaaaaagaaacaaacagaataagcgttttgggtatgtaaatacaactcggaaaaatcggtccctggcttaaatggttcctaacgagaggccactgtaaatccttgttcatcatggggtgctgacggctgttaaatggccattataaatcctggttcattatgttgtcggatcttaatatatcgtcctggccctcggtaacttgctagcaaaaaaaatgttataaagcaagttactacgaaacaagaatttgcaagattaaagatagttttttttgactgtcatggggaatccctacctggatttcattgattctagc

SEQ ID NO: 31900 - DNA, 5791 bp, Zea Mays
ctcccaccctccctccggccaacgttactactgtagcagcagtagataaatactgctgcggctggctgctgtacccctcctagtcggctagtcctctactctccattcatccccaccacctccacttgtcgaaattgaaactcaaatcaaatcgaaccacctccacctcggcaacgagcgaattccggtgcgaattggagccctcctccccccgcatctagggtttcgcccatggaccccgccgccggcgggggccggggccgggaccgggcgggcttcgagcgggcgtgccggctgcccaacaccgtccactccgaggtcctgccgtcgctgccgctccccaccctcccgcgcgagctcggcttcgacgcgctccgcgacgacgagcccctcgccgcgcccgaccgccccgacacgatcatgcaggccgccaacatcgcccgcgtcctcgccgacaccgacgtctcccacctgggcttcaccgctgcggacaacgtcgacgtggaccccatccgctgctcctggctctggagggaggtgctcaagcacaaccccgacgctttcaaggtcaaggcgccaagtccgtcttcgcaaggtccatttggaggcccaggatatcaaaatcaagaacatgagaagcactttgagcattttacacctaatacgagcaaagcacgaaatgaatctgcatttcctcaggatgaaattgactcacatagagagcatttttataatgaactgacctcagattcaattgcttcaaagaagccaaaaataaggaagagagaaaataacaattctgtttcaagttctgctcccagcattcctaatactcaagatgttatcactaccttctgtgaggtggtggaggatttctgtggaaaaaccgaaattcctgatgatggagatggcggtgactggttgtcaatcccacttggtgatgttaaggttctcgtgaatgaaattacatctgttcgatccaaaaggatattgcatgaggttcctatggatacagttacaaggttattggatgtgattgaccgtcagattcgatattctcaaggtttgtcgatagatgtgaaagaaaattctgatgtcgttgatgctgaacctctggttttctctgctttggaggccagtcatgctgcgttggcaattatgacccaccatgatatgccaaagcaactgtaccgagaagaacttattgagcggattattgatttctcaaggcatcagatcacagattgtatggcagcaagtaacccaaccttccgagctctctacaaaccagctgaaaatgttgcaaatgatggagatgatgatgaagatgatttggaaaatggacaagttagcaagaggagacgtactgctactaatttgagcatgagaaaatcttcaaacaaactttctgcttctgtttattctgctgtgcagaaactatgcttgatattgggctttcttaaggaactgctcacaacagtgcgcttgtcagatggttgtattctgcagttagcgaaaacatgctttactacattcttggtggataatatgcagctattacaattaaaagcaatcggggttatttgcacggtgttttcgtcatacacacagcacaggagttacttggttgatgaaatacttcaccttcttcgcaagttgcagttttccaaaaatgccgtcagaacctaccatctagcagatgaagaccaaaagcaaatccagatgataacagcactgttagttcacctggttcagtttagtgcaattgttcccaatagcttaaaaggaacagttgattggaccactattgttgatgcctccggagatgctgattattatccaattaaatgccatgaagcggcaacagaggcttgttgccgtttttggactgatgtccttcaacgttttactgctgctaaatctcaagatatgtcggaaaccaaaggaataatagataatcttgttcaggatttcctaatgatactaaacttgccggagtatccagctgctgcttctatccttgaggttctctgtgtgttgctccttcagaatgctggattgaaatctaaggacactaatgttcggtgctttgctattgatcttcttggtggtattgcatcaagattgaagcatgattcggtcatctgtagtgaagagaagctttggatattgcaagatctcactgatgcaggtagcgatggctcaaaaatcttgaaaaacaagtgctgtgtttgtcttggtggaagaggtataaatatagcctgtaatgaatgtggaagatgtttccattcagattgtatgggggctgctagccaggataacttagagcgtgatagtgtttgccccttgtgtttttgcaaacaacagctcaatgtgctacagacgtactgtcagtcacaaattaaagaaaatggcaaaaaaactgctgcgtctactagtaagaaatctgctaaaccagctgaggtgccagcagtggatattattcaacaaatactactgagttatctccaagaatctggtccacaagatgatgggaacctgtttactcgatggttctatctgtgcatctggaacaaagaaaaccaacattctcaggaggagatcatctactatctcgctagattaaaatcaaaagagattctgcgagattctggcaatggtctggcaatttccagagattcagcaaagaaaatttgcttggcacttggtcagaagaactcattttgcaggggttttgataaaattcttgctcttcttttggctagcttgagagaaaattctcctgtaataagagcaaaagccttgcgtgcggtcagcagtatagttgaagctgaccctgaggtcttgggtgacaaacgtgtccaatctgctgtcgaagggaggttttgtgattcggctatttctgttcgtgaagctgcccttgaacttgttgggaggcatattgcttcacatcctgatgtgggcctgaagtatatagaaaaagttgctgagcgaataaaggacactggagtcagcgttcgcaagcgtgcaatcaaaattataagggatctatgtgcttctaatccaaacacagacacaacacatgcctttgtggagataatttctcgtgttaatgatgaggaatccagtgtacaggatcttgtatgtaaaacattttatgaactatggtttgaagaaccaactgggagccataagcacttggttgctgatggaagttcagttccaatggagatagctaaaaagactgagcaaattgttgacatgttgaggaagatgaccaatcaccaacctctgattaccatcataaaacgtaacttgactcttgatttcctccctcagtcaaccaaggctgcagggattaactcatacatggtggcatcaattcagaagcgttgcgaattaatatgcaaacgcttattagaaagaatattgcaggttgaggagggagctgctaaggagatggaaatccacatgcttccttatattgttgctttgcaagcattttgtattgttgatcccacgctctgcattccagtaactgatccttctaagtttgttgtgacactacaaccataccttaatattcaggttgacagtaaatcagctgcccagttgcttgaaagtattatttttgtgattgatgctgttcttccactcataaggaagccaacacaaaatgttgttgaagaacttgagaaagatctgaaacatatgatagttcgccattcgtatttgacagttgtacatgcctgtatcaagtgcctttgtgctctgagcgagtcagcaggtagaggtccaggattagtggaaaaccttgtcaatattttctacaagcatctgtctggagctaattcagatagtcagactttgggatacatacttattgcgaagcctgaatttatgctacaaaaggatatgttgaaactcatagagacagcactatcttctgagattcaaggacttcaaaacctctatgagtatctcagagatgctgaaagccaacttactgccgagagcactgtgaaacctcctgtccggtgtgaaataaatggcagaagtaaagtgcctgttgctgctggtgctggagacaccaacatatgtggtggtattattcaattgtattggagttctattcttgaaaggtgcttggatacaaatgatcaagttcgccagagtgcacttaagattgttgaagttgtactccgccagggtttagttcaccctattacctgtgttcctcaccttatagcacttgaaatggacccactggaggggaactcaaagttggctcatcatctgctgatgaatatgaatgaaaagtaccctttattttttgaaagccgtttgggtgatggactacaaatgtcatttaaattctttgaatccatagtcagcaaccataagatggcagcaaacataaaatcaaatccaattgcatttgtcaaacctggcatatctagaatataccgtcttatccgttcaaatcgaaattccagaaacaaatttgtccactcgatagttcggaaattcgagtctgatagccggagtcgcagcacagttagctttcttgtatactgtgccgaagttcttgcctccctgcctttcacatgctccgatgaaccactttacttgatctatgatataaatcgaattattcaccttaaagctggaggagttgagagcaatttgaaaaggtggacttctatgtctcagtctcaaaatacagtggatatgccaacgttgccaggagagaggcatgttgtcatgcaagagcctggcggatattatgataacgtgggctatgcccatgaaagggtgaatgccaatccttgcagtacttcagacgtggacatggccaaagtgcaggttgacgtggatatggccaaagtgcagggagattgccttgatgcaatagcccttcagctactgctgaaattgaagagacatttgaaagttgtctatagtttagatgatgcccgctgtcagtcattttctctaaaggagcctccgaaatctggagaaacattctccaggcagaatattccttttaatgttagcagcactaacatcagtctgccgagctgcctgcaggacgtagcttctgtttaccaggatttcaagacagtgctccacgaagattccatggactttgctgtgttcatcccttcagtccagattaggaagcgcccaaccccgagaaatacgacaaacccaaccccaagaagtacgacgagggtcaggagaacggctgcctcgagtgttacaaaagcccgtggtggcgcacgtggcgatgactccgacgactccgatgatgacgactggaccgggggcccaagagtgcttgacttcagtgggggtggccgtgtgacaaggcagagggtccaagtatgatgactggtcttggtgcttttgtacattctagggaaacctatagcgggtagcagctgacacgaggagagttagggttgagttttaggtttaaagtcgtttagggtacatagaagcagaaaaggaaaggaagatagcctttttacttagatgccattgatttggagcactccttttcttgctctgcccctgtcctgtttgtaattccggtcgggctttggcaaaactgacaaacagggttgtgctccggcttctgatctgattcaatgggaatgaaattattccttttgctttgcctgtataataacagttaagcctatgtttcgtgtaattgtctgccttgctaatgttatatatctgtacgtgtgctgagccttttttgttgaagttcatagaaattgcc

SEQ ID NO: 31901 - DNA, 1076 bp, Zea Mays
gccagtagtgaggagcagatcctaaatcaccatccatcgctgaaccgaaagcaaaccccaccacaacaacaccaccgctcgcctgctctcaccgaccagcgccgcgccactcctccgccggatctccagcatgcagccctcctcctcgtcctcctccgctcacccgcccgaccatcccaactccaagcccccggccccgccggcccccgccatgggctaccccgcccccaacgggaaccccagcgcctacttcgccgccgcgccgcccgccgccgccgccgccaacggctccgctccggcgaccttcggcgtcgcgtacccctaccccgcccctcctcaccaccatcacccgccgccgcaccaccactacccgtatcccccgcccccgccgacgcaccaccactacgcggcccacccgccgccgccgcccacctgcctgcgccgcctcctcgccgccgtcgttggcgccttccttctcctcggcgccgccaccttcatagtctggctcctcctccgcccgcgcgccccggccttctccctcacctccctggccctctcccgcgtcgcttactcccccgccaactcctcactctccgcctccttcgacgctgccctcctcgccgccaaccccaacgccaagctctccgtcgcctacttctcacccctcgcatccgtctccttcgcgccctcctccccgctcgccgtcgcctcgctcgcgcccttcggccagggccccggcaacaccaccacgatcgccttccgcctcgtcgtagaggatgcctacgtcgggcccgacgacgccgcagcgctcaagaccggcgccgggggcgctgtcgacgtcgaggtcaggctcatggccgtcgccgtcttcgacagaggtggctggcgcacgcgccggagggtcatgagggttatgtgcgatggcgtcaaggtggttttccgcgggaagaattccactgaggcggccttcgatgggccgccaagaaggtgcgatgtcgtgttgtgaagtcaaataaaagcaaaagaccacacaacgccaggtcagcaacaggctcataccaatacgccaagtcgcc

SEQ ID NO: 31902 - DNA, 3975 bp, Zea Mays
cccacaccagaaggagccaaccccccctcaggccccaacccttttcccacttcccgccggagcgctctcctcttcgccgctccatcaccgcctcccaatcccatgggcgacccgcaccccctctcctccgcccacctcaccgctgctgcctcctcggctcgagaacaccgtggccccaccaacgagcgcctcgccgcgtccgatccttccacgtccttcgctaagcgtcctagggttgcggcggagccgtccgattccggcggctgcgttccatgcgtcgaggcggacgtacgagctcttgtgtcggtgtccggaggaatttacccgctggcgcgggcaggagcgctccgtggactcaccgcggtccttgagaaggtcgacaccagcagctgtgtcagcgcagcgatcacggactgttgctacaaatgcgcggtggagctcatgagggacgacgacaatggcgtcaggtggacgcgtgtgctcgaaatatttcagcgagattggattttgatgccaatggctatggtgacctgatggacatgattttcctacagctaagctccatggctagggacatgtgcacgcaggtgagaatggaagcattcgctgcacttggtaaaatgcaacgagtttctgagggtgttctgctacaatcgctagaaaagaaggtcatgaaaactgacaggatgggtgtttctatcatcaacggccaaaaattacctcctaaactaaaaattccctgtgctgctgggattttttcccatggagttgaagatgaattttacgaggtgagaagaactgcctgcaaatcattaggagcgctggcaaagttttctactcagtacacagagaaggccttggacttgttgatggacatgatgaatgatgatacagaagcagttaggctgcaggctctggaagcactatttagtatggcaacatatggatgtttgagtgtgcaggagaagcacatgcatatggtatattaactatgaacatagtttggcaagtaatctgcatatatatatatatatatataattggccactccttaggtaccacatgccgcatgttagtcctatggcactctttttaattcatagctagtcattttttcatactctgtttataagatatgccttgtaatgatatcacaggttcttggatagaatgaagatttttttctcaagcatgcaggagagctgcgtatcaggatatattttttatatcctcagtttatcatgcaaccatgctattcactgaaatattttgttgcaattgtaggaaaatattttgtagccactagccagagatcctcaagccaataccactgtaccagcgtattaaagaaagagtattggcacagatattattcagagaaatctttgctgatagtgatatgtacagttgaacatgtaattttcaagggaacaatataaaacaatatttgaccatgaacatatatgcaataatgcaaggataatggacttagccagaatatgaaacattcgtgcaaatataattttcggtcaaaacagttcggttttgtagttcctaaagtggcgggtccatatttttcgattcttgtgcattttactgtcacaaagcaaccttagctctagcttttaagtagatgaaaagcatgcataatcaaaagacgaagcaggtttgaatcttgtttttgttgaaagttctctctggattctgaatgacttataattgggtttgtacctgtttaaaaagatctttcaaataatctagacatatctttgctattgatattgctaaatgctagtaaaaatctctgaccttatgtatgtataactgtttttgtagtttcttgggttgctggttgatgccaatgtcttaattcgagatgcagcacgcaagatctttgggttagtcaacatgccaaaacttcaaatattcaaatctgcagttgatggtcttgttacaagtttggagaagtatccagaggaagaggatatatatggtattatgttttccattggtaagaaccatgggagcttttcagctaacatagctaaacatttggccaaagagattactatggcatctgacggagagcttatcttggacaaaccaagggtcaaagcattgttaatagtgtctatttcagcacctttttctgatgataagcacaagcagctgggtataccttcgattatcttctcgtatgcaattcccctactggagaagatctcatgcgcactaggagaggttgatcaggattcactcttatcttacttgtatcataaaggtggaatgccattttgggaaaacaggtcagtatctgcagagtttggagaatctgaaagctgcaatgttgaaacagtgaaaattggtgcccatatagaaaacactgcaaaggaagccaaatgtctagatgaagttctggtaatgaaatccatactagaaatagttgaaggagtctggactatgagaatgtcgtgcaatgtttgtgaagttcgaactattttcagaacatgcaaagaagagctgagattattggcagaaaattcttctggatcaattggtgcattattgagctttctgagtgagtatcttgatgcaatattattcattgttgaaatatggcagttgattcagttggacaagccttatacttgtggcctaacgtcacttgatattttactggagaggttggatatgtctgtaaggaggatgaaatattgttatattggattaaatagagtattggaggtccaagttttggagctttctttgatagctcatttatgtagactctcaaagattgcagtgtgttccaaggtagttctgggtaaggtgctctgggtaattaatcgcttagaggatctgtgtgctgatgggtcctgtgaactgtctgacttcagtggagaaattaagaaggcctgtgataccaaccgtattggagataatctgattggcaacatcaacaatttgtttcaactcttccatctgaaaccaacaacagactttggaatgcttaaagtgataagtgcaatgttgcgggtctgtgataacgattctgaaaatccattacaatacatttgtggattaccggtgggtgtcagctttaaaatatctctgtggaacatatctggtcaccatcgactgtggctccgcatgaccattggtgaatctgtgcaacataccttcctagaattttctcgttttgaaggcaatgatgaggtgatgagtggctctatggttgttcctttgtatgctactccaaagacatgttcatttgtgcttcgggtatgtctggtaatggaatgtccatctgcagggatcagcacccaccagggtggacatggaggaccgagtgattgtgtggttcaactctctgatgaactgaatgtttattttgttagtgctagccaatggtgatgattaaaataagcgaccatatgctttccatgctcatcgtcttaaaggcttttgcttgagtggacattcttgatccaggtctcttctggggaaaagggttcagttgtgctgaaatttttgtagttatggcaaaagcaatgcagatgagctgcatgctccatgaccgtatgcatagtgtggagtgcaagtgggttttaacctggtcgaagcactttgagttcgttaggagctacaacttcagacggaaagtgaaggcgtgaagctcaccaagtgacgatggagaaagtgcagcgtgggggtgaagctgacgatggagaaggtgcggcggaccacgctgcgcgggtttttttttgtcaccaatttgtgtggccttggccggcggtccaggttattaagatatgggatcatggtcaagtggacttttgtgtggtatattacggttgatcattggtttacaactaaataattgtagtcaaatttcttgtgctgaaacaaattcccatcggcctagtcgaccattctcgtccaacctttgtgctgtttggttcaaaaaatgtaacg

SEQ ID NO: 31903 - DNA, 5333 bp, Zea Mays
atgacgccaaaggctccaagaataactagagaattgaagcctgattggagatcacggggaatcttctccacagccctgctccaccagtcatcaaggctgcaaagagcattgtctggtgattcatatataactggtctcttgagtgaccttgagaaagctttgcagagtggtgttttgattataaaacttcattatgcaatcgacttccttgatctagtctctagatattaccctcatgaagtttctcgagctgcttcccttgttttgagtggtgctgtttctaatagatcatttcagccttatgaatcccacattccatatcttcttcactttttggttgactacaacttgtatggaatggggcacatacatgtcaaaaacttcaagtttcgtcctccattgccagttgattttcatcctaagtcatctcttcgcaggaaggcacagtcagataatttagaaataaatagtccaacagtttggatatcttcaacagtgtcgcattcttctatcctgggtagttctgccccttcgcatcatttgggaggaaccaatttgagcttcgctattcgacagagttcttcaatgcttgaagctgattctagagtagaagttccaccttcaggtatcctaaatgagaaatataagatgtacacttctctttctcaaacaacagaagatacaaaaatggttcagtcacttgtagcagtttgggaggaacttgaacgattaagactgttggaggaaacaaaatatgctgatctgggtagacctttaagggaagaagttcttaaagattttcttcatggtattaagtatgagagtgccctttctgtgttgttttcacaagaggggccacatcacaaagtttccaccatagaagagtctgaaaggctagaaaggtgcttaaaatcgttgactgatattattgggactgttacattctcacaggataactactgtggtaatattgatgttggtaattctgctgatgtgcaaaacgacaaacccgatgcaagtctttgctcagggtcattagaacaaaacatgcagattatatctccagagagaaacagtgaatatcctgtgtcttcatctgtacaccaaagaacactatctcagttatctgataaaggtgaaaagcatctggatgctgaggctcttggacttttaagctggctggcctcttcacaagctgcagaggaatcaactgatgatgaattaactaatgaagtcatcctcagccctttgtttgccaataagtccattgaagttgctgtggagtctgctcaattggattttgatagcgcttctcagcaggagtgtcaggatattcttgattcagttgaccccattagggcagtagaagaaccaaacatacatacatcttacctcgattctgtgaagtccaattctgctgcttctctgggcaattctattcctcagcttgatgggtcatctgatgagaacccaaaagtctcccaggaatatgatagaagtaaggtcactaggaaatcagtagtatcggcaagttacacatctactaagaagccttcaaaatcagccagtaagtattcaggaactgaacatctctggggttctttgcctctttcttccagaaaaaagaggcaacatggagatgctgatgattcatgcagtgcaatgtcaccgcagaaggatttaagtgcatctaagaagagtacaattgataaggactatcatgataccataggcagcactgattcagaatcttctagttttttaggtgtacatgattcagtttgtcattctgtgagggatttgatgaggcggaggagatcttttcggcgtgaacagttggagtttggttgttctggagctgcaacatgcaccatggataaagagagcgaaactgtgaattctgggggattggaatttcatgatttcacaagtgacatcccaaacttagcactgacacggatggcttttgttcagaagcctccattgaaggatgatgcatgttctggtttggagagcccttcagattgtgagcaacgtggatctgaaaaatcgggattagctgatcttctaccatttttcaatcagaatatggaggagaataagcagaatgaatcatttcaagatatggaaagcacaggggatgtattgggtgtcccaactcattttcaaaatgatggatcagccctatatttgctgacacatgcactttcgccaccatctgcaggagctgtgggccattggctaacccaacaatctagttccagtattttctcgggttacaccaactatgatggagtcgcagctgataaggaagaggcacacagttctactttatcacggaattctcctaccagatttaccaaggagaattctgcaaataaaatgcatggagatgtgatgggatcggctctatcttacaaagaaagtaaacatttggacgaatggcatgatttttcccagatatcagctggaaatgagaaggataggctcacacctctaagtcaaattggatttcgtgaccctgctagtataggtggcgggcaacaactgactatacttagcgtggaggttttaacagaaagcagaggagagctgcgtcctgatccacggtttgatgccattaatgctgtgtctttggccatcgaagatgatgctgacaatactgttgatgttcatgtgtttatacgtggcaacaatgtcaaatcacataggagaaatctggatggtattgctggctgtaatataaatgtcttccctgaagaaaaggacgttttgaacaatcttattagtgcaatatgttcaattgatcctgatatcctagtcggatgggagattcagttaggatctttaggatttcttgccgaaagagctgcttatctgggtataggcttactgaaaagaatttcaagaacaccacatgagttgaatcatccacctaagatcccagttgataactctagtcaggtgctttctgaaacatcttctgcggatgatattattgatgatgtcagtgagaatgattggagccatactcatgcgagcggtatacatgttggtggaagaattgtgcttaatttatggcgtctcatgcgtgcagaagttaagcttaataattactcccttgaagctgtagctgatgaagtactgaggcgaaagataccactgataccaagcaggatattgaaccgatggtttgcaacaggtcctggacgaggaagacaccgatgcatagaatacattagcaatagagctagaatcaaccttgaaataatgaatcaaatggacctggtgaatcgaacatctgaacttgctcgtgtatttggtattgattttttttctgttctttctcgggggtctcagtatcgtgttgaatctatgctcctgagattggctcatacacagaactaccttgcaatttctcctggaaatcaacaggttgcttctcagccagccatggagtgtttgccgcttgtaatggaaccagagtcggccttctaccctgatccagttgttgtgttggattttcagtccctctatccttcgatgataatagcatataacctttgttattctacatgcttgggaaaagttttcccatcaaagtcagatgtacttggtgtcagctcatattcagcagatccacatacacttgtagatctgaaaaatcagctgctgcttactccaaatggggtcctgtatgttcaacctgagataagaaaaggtgtacttcctcgccttctagaggagatattgtcaacaagaattatggtgaaacaagcaatgaaaaagttgagtccatcacagcaagttcttcacaggatattcaatgcacggcagcttgctttgaagctgatagctaatgtcacgtatggttacacagctgctggattcagtggtcgaatgccttgtgcagagcttgcagacagcattgttcagtgtggccgtagaacactcgaaacagcaatatcatttgtcaaccagcatcctttgtggaaagctagggttgtgtatggtgatactgacagtatgtttgttctcctaaaagggcgttctagggaagaagcattcaggatagggaaggagatcgcctcatcaataactgcaatgaatcctgatccagtcacattaaagtttgagaaagtgtaccagccatgcttccttcttacaaagaagagatatgttggctatagctacgagagtcctgaacagaatgagcctgtctttgatgcgaaggggatagaaacagttcggagggacacatgcccagcagttgcaaagattttggaacggtctatcagaataatgtttgaagaacaggatttgaccaaagtcaggacatatttggagcgtcagtggacacacatattatcaggaaaagtctctattctagatttcatttttgcgaaggaggtccgtttaggcacttatagtgcaagggcttccacgctgccccctgcagcaattgttgcaacaaaagctatgttgtctgacccaagggcagagcctcggtatgcagagagagtgccatatgttgtaatccatggggaaccaggagctcgtcttgccgacatggttattgatccttatggtctgctagaagttggctccccttatagattaaatgaacaatattacataaccaagcagattattcctgcattgcagcgtgtttttggacttcttggtgctgacctgaacaagtggtttaatgagatgcctcgccccatacgatcaactcttgcgaaacgccaatttgctgctgctcatggttcattctctcgtgatggcagtttcatccgattaggattgaataataaaacctcagccaaaggaggcagaatagatacatactacatgtcaagccactgctcaatttgtggtgatatgattcaaggatcagagtccttctgcaacaattgcttgaaaagcgaagctgttgttgccacagtagtcgctggcagaacttcaaagttggagcgagaaatccaacatcttgctgctatatgtggccattgtggcggtgcagactggattgttgaaagtggagtcaagtgtatttcccttgcatgcccagtcttctatgaacggaggaaagttcagagggagctggtagtcgtctcagagtcggcaggagaagcagggtattaccctttctgctgcgctgaactcttttgagaacatttttttggggctgcgtttctctgtccataccgtgtaaattgtggaatctgtaacctttacatcacacgtgtgtatagttgttgtatgtaacactgaagaacatgtactggtgaaagaatacatacaatgtataccgtgtcgctcgctgttca

SEQ ID NO: 31904 - DNA, 4017 bp, Zea Mays
catttggcgtgtacgacgtccaccccacaagctcccacggcgctccccatggaccccatcccctcccccatggccgatgagctcgttcgtcgccccatatatggagtgaggttcggctcaccctatccggccatttccatgaggaagatcctccacatccagggcgggcagtgcggcaaccagattggggcgatctgcgacgagcacggggtcggcgccacgggccgctacgtggggaattcggacctccagtttgagcgcatcaacgtctactacaacgaagccagcagcggccatttcgtccctcgtgccgacctcatggatctcgagtccgagaccatggactctgtgcgctccagccccttcggccagatcttccaccccgacaacttcgtcttcggacagtccggcgccggcatcaactgtgccaaggggcacgacaccgagggcgcggagctcatcgactctgtcctcgacgtcgtctgcaatgaggccgtgaactgcgactgcctcagggcttttgacattacagctccaggaggtgacgtgatctctggtggttttgacgactctgctagttggaacaacaacatggtttgggttgttgacaacagcgacgatggccatggttgccacaactgcgttccagttctgattgaaagtatggactctctggtgttcaacgaaatgccgctggagagtgtgatttgggatgaggaagccaagcatggagatgtggtgaacctggaagggaagggtgaccagacgcacaacaattgcgagcagggtgttgttcctaatgctccatggaagttgggtgatccgttgttcagtaaagtgggtctaaaagtggcatgggatggggagatgcaatttgaatctcatacgcatgaagggttattgctcaaggtggagaagtcttagatgaatcggctgagaaggagggtgaggtggtagatgagaccagcaggtctgatgtactgagtgaggcagctgctatggttatgcatggtggaagcatggaggagcttcttcctgctagtgctggcagtgtgatagaggatagcctggagaaggagcagaatgataccagtgaagaagaggggaaatatcttgcagtatctaaagaaggggctgagaatgaggtgttgcagtttcagttagcagacgatgaaataagggaggataaagataaccaaactgaagcgagaaaagggaatactgctaataccttgcagtgtgacctgttagacagtgcgctcggcctggaggaaaagcatggcgatgaagatgcatcaaaatcacagacatccaactctgatagaataggattcttcattcctgtcatgtcttttatgggacacaatggtgaggaaggaattaatagcacaccaactaagggacatatatctgaggtagatccttcggaagtatcaggaacaacatctccaaaattgccttcaaattcggaagaagtccatgtagcagaagaaaagcttgatagctctaccgagacacctgcatctaaggttggtgatgctgaatcatcagaagtatcacaatctacaggacatccttcaacagtagaagacatccaggtccatcaagttagcaaacatcctggtcctagtgatgaagtagagccaaatcagcttagagggtctgttggagacttacctgagggtagtgcctcgtcggcgactaccaaaatacatcaatcaggtgacaccgagacaagggaatctattcatacaagaatgggattggaagatacatctgataggaatattttgcaggcacaactagcagagtctgcattagaacctgctgaacctgaagaatctttagcaatagaagaggttcttgtaactacaagcaatgaggcggataaagaatcagctgctgtcattgaggctgtaccagccttgtgtgagacaactggtcccaaggaggctgctgctactgaaaaagcagtgaaagaggttgacaacattgtgaaatctttggatgaattcaccttcgaggagggagaatcaaaggagatgcaaaagaagcagccgcaagattatgtttctgttgatattgttgataatagattactgcctcatttgccacacgggttttcacaaaacagtgagcaatataaggtggagcagtccccacagattatatgtgaacaaggttctacgcatccgggccagtatgatgaggatacatctttatctttaacagatattcacatgggtgtatccttccagaacttactgattcaaaggcaccacttggatttctattcaccaatcaacgtaatttttgaagcctatgcagcaaagttcgattcatctagcggttcttttgcacaaaggaattccaaattgctgaaggaaactgtgaacatgcaacctgagcaggctgactattatgtcgttcgcaatcacattgtagtgctctggtgttctagtccttgcactaatgctgatgagtatcacgccattgttgttgctgctgattttggagacatcgttttcaaccagtttttggacaaagtttgtcggttgagacaggtggttgtagatgttgcaccacatggtgttgaagtgacgttaggcatggcacttgcagcattccgggcagcacgtggtgttgcagctaagcatgaagcgaaattgtttctggactggcatttggaaaatctcgtgtatgctattgctgcctcccttactgatctctccatggccttatggggatctgtatgatccatacgaagtgagcagagaccactgctatgttcctggtggcagttctcattttgttcgtgcatttactaatggaatcttgatagtctacgggcagaacgtaccaaggaaacaatatggaggtgatgagttgtgggtgcacggtgataagatggcattccatggtgatatggtcctacggtccctcttggcatgcttcttctttggataactagaccttgggatccaggcattttgtctgcattgcatgtcagtgttgcttggggacaagcaacgctttgacggggcggtaatgtaacatccggccaatgttagagattgcacatacaagtactagtgagtacgtatttgaatttgtaatggtggtgggccgtaccgggccgtagtgggctatacccatgacattagtataagtatgttgtaagacttgaggaaggggcatccaagaaataccagaaaccaaaacgaatcaaccttccggttgttatcgtattcatcgatcacctgagattgctcatctgctcacgtcggtgacgccgcgccggccaagggccatgagcccgtgatagaggacggtggtggccacggtcctggagcgactcggtgacgggatctggaagttggcacagaggagcgaggaaaggccgagcccgagaagcatcgtcgaggacacaaccggcatgtggtggtctttttggtcggcggcgtcgtgggcagctggttgttgccgtcgaagctcgaaagaagcctcgattcgtcgaaaggttgcaaagtggacatcccctatttctatagtttcatgtttcatgcatatgatggtcagacttgtgtccaatatattttgcaaacctgaaatgtcaactacattttggagacatccgtcaagaatagtagagcatcctgttaggtgtcttcagaaactggaatgacacactgcccatagttgtaggatacttggggcttgtggtagtaatggcaacttttagatgacttattttttttcatacgatgtctaaatacttgcagacacactgtccattgtttgaggttttagagatgttagcaaaacagttttttcctcaatgagttgggctctgtttcggactcctactgttctgttacctcaagtctgttatgtgctagttgtttaagtgcctttactgaatgtcgagtttaactgcctgaaatcctgcagtttctaaagaaattagaaaactgaccccatgcatactttagaaactgttgcaaaaagtacataaaa

SEQ ID NO: 31905 - DNA, 2507 bp, Zea Mays
acaagaagtgacttgcatagattttatcaattgtcctttgttttggtgccaatgatttttcatgcatcgtttcaatctggatttctcactcagtctggcttgacatatagttttattaattgtcatagttttggtgccaatgattttgcatgcgtcatttcaatctggattcattgcccagtttggctatttgtgttgatgcaagttggtgtaacaattgcagctcagatttcgtgatacttttgctttgtgcgtatttattctgtaggccacgaataggtattccgttaagtacaatggtcacagtttactcgtgtttccactgctgtcgagtcaaataagagaaatggaatatgtgtaaattgcatttctgtatggtctcctctctcctgtcatcttttatacccatgaatatgcagatgaaagagcatccatacctcagaacacaactgtgctggtccgcagaatttccattgccgggcaactgtcagagaagatcgttttgtcccccacgcggaaagtcacagaagaattttctgtgccttgcaagtcagtggttactgactcaagctcaaagtcatgttcttccacggtagtgcaagatgaagatgctgcaattgctgcagtgattgatgccgctgaactcaaatcggaacaactcccgtctaaaaaaggacaaggcagtggaaggtttacgtcaggacgtaactatgggtcattggaaggggaggcacctccaccaggctatgtctgtcgctcttgcggtgttccaggccatttcattcaacactgctcacaggaaaacaagatacctccacctggatacatttgctacagatgccgaattccagggcattttatccatcgttgcccaagcattggtgatcccaagtgcgacaacaataaaatgctttgttctcttgtcccagtagttacacctgtcaatggcattttggattcacttgtcccggcttcccccgttagtgctgttgatgacttgccagcagagctccactgcaggctatgtaaaaaagtgatgagagatgcagtattgacaagcaaatgctgttttgatagtttttgtgatagatgcattcgggattatattattacagagtcgaagtgcatttgtggagtcaagacactagcagatgacctcattcccaatcaaacacttcggagcacaatcagcaatatgttgggaacacagactatcagtggtggaagtggtacaacaagacacagaagttcgtcaggcagcaaccctgaccccaaaatacagagccacactgcctcgacaagggaggtgaagcaatctagagaccaccagctaccagcagcatctgcacttgatgatgtgctccaggttgccacagaaggtgctctagtgaaccagcctcgggagaaattggtacccagtgctaaaatccttggtaaagatggaggcaattttgcacaagtgtcagcagagaagactgtagcaaatgctgaagccctcaaagtaaaggatggaactgaatcgacttcaaaggccaccactgtttcaggggcccgagaacacaatgtcacaaggacagatcaaccgaagaagtggaagaaggcagtcttaaccaagaactttcaacctaacaatgttggatatggttacaatgttccatttgaccctgcatattgcaatcccttcatcaatggatatccttgggcaactgaaccttacatgtatagctcaatgggggtgccgtaccctggttatccgatggatccatattgtgtaaattcctttacctgcataccgtcgcaggctcttgcaatgcaaggctatgcaacaagctaccaaaggcctgaaactgagcccatgcatcgtgggggcactgcagctgcaccttcaaagcgccctgagaggagtgacaggcccaaggacactcgtcatcagccccaatcacgagagcacgagcgacaattgggctcttctcatgtctcagaatcgagaacgaggaacagaacaaggtcaagctccgagggaagggaccgtgggcattccgacagggcctctgttgaccaccatgaggaccactctactaggaagcggacgcgcgattcctctccgaagtacggtgatagacagagcgaccggaggtcgagtcacggttccaggagtatgatgactcctgaggaggatgcaagcgacgatgaatgtaatttcaagaggagatggggtcgcagatcatcaggaggcgtggacacaaggcactgaacggaagaatgtggactacggcggaccgaccaagtgcagcaatacattgctggtcaccagtgctcacctatccattttcttttactcgtaattgtatgtattcccctgcaaacaaaggggaacttccggttccctggcgaaatgtaatggtattaccatgcgatctctccaaatataaatggaagtttgctaagctcacgagttcttttttacttcttttaccctaacgccccgttttggaatcgaattccac

SEQ ID NO: 31906 - DNA, 2974 bp, Zea Mays
cgaaggctagaccgctagaagatagggagaacaacgccatatcagataaaagcagatggagcttccgtaggaggtctacaaggcaccgagttttgaagaactctgatatctcagaacctgagactcttagttccagcaaagcaaaggctgacattacaccgagcaacaatgtttatacttcaacatattcttatgcctcggagaagcctctgcaacaagacaagccagatgagaagactctgcatcaagagaagccagaggagaaacctctgtatcaaggaaactctgatgaaaagctgatggagaagccaagtgaaaagcctactgacaaacttatggaagaaccagctgaccagataattgaaaaatcaattgaactacccactcaaaggataaccgaaacaccaactgatgagccagctgaaaaaataaatgttgcaccaactgaagaaccagctggaaaaataacagagacggcatctgaaaatacagccgaagggtcaataaaaaatgcaacagaagagacacccgaaagggcagttgaggaactaattgaagaggcagatgaaagtatttccgtctcatcaactgtgctgaaggaggaggaaaacacctcacttgttgaaggaagcagtggagacccggaggaagatcatctggagtctgcagctactaatcttcagcctaggagtgacacttgcattgcaagggaagagctgctgaatcagaaggatctggtgaaactgcaagctgttatccgtggacatctagttagaaagcaggcttcagaatctttacaatgcttgcttgcgattattaaaattcaagggttgatcagggctcatcaagcacaacattcaccaggaaagattcaggagactattgttcattcttcaggtgagaaattgcttcgcaatggatttgctctcaagctcatggacaacacaccaacttcaaaatccattcgcataaaatgtgatccttcagaatctgatgttacatggggatggatggagaggtggacagccttaattccaccgatcactgtggtgcacctgccagagcataaagaaaatagtgagttgatgggtgaaactgtgaccgaacaagtgactgaacatgctcagtgtgatgaagacattgttcctttggattcagacctatctttcccaaagttggtggctgatgatgtgaaagaaacagtagagacatctgattttagtgccttggaggctcctgcaagtgtcccagatgaaagccctaagatggaaatgaaacatgatcctgaatcggagttgatcgaaactactaatgcagatgctgatcatgtaactgaccaaaaggctgaaaatgatgtggacgagccttttatgtccttggatcaacaatatgcccaagctgatgatgcatcaaggaatccctgtccactccctggaaaatttgaaccgtccaatgaggacagtggtgacgcatacaattctgagcagacactggagatggaaggtaaaaggtttgtggcaagaaagccatgcaatccagcctttgctgctgcccaattgaaatttgaagagctgagtacaaattcgacagtcagcaggtccagcagcccaccgcatctggatggggtgagcaagccaaggatgcacactcctagttcgcaagaagattacacgccaaagcaagatggcacaggcatacaagaaagctcagctggtcatgatactaaaatgagaattgctgcatcagaatgtgggactgaaatatcaatttcatccacactggactcaccagacagatcagaaggtgatggtggggagatagtgttggagattggagctctggaaaacagaaactatgtcactggcaaagctgataaagactccagtattgtccatcccggggtaaaagatgctcctgaagcagaagcccagccgcagaaggaagtagaagagaatgggcatgttcctgcccttgaaacggaagcccagccacaaaaggagccacatactgaaccggaagtggcagatttgcatggacaattggaaaaatcggtcacatcttatgccacacctgaagggactccaatgagccgaacgaccaccattccggagtctcatgggacaccgtcaagtgaggtctctgttaacaccaaaaggagcaggagcaacaagcccaagtcccacgcgagcaagaggtcgctggctagtccaggcagcgactcagttggacggagcagcaccgacaagttttcgaaggaatcaaggcatgccaagagagagagctcctcaagcaaagctgctaaatccgaccagggcgatcaagaacctcgtgtaagcaacagcaacagcaacccgttgcctagctacatgcagttcacagagtccgcaagagccaaggcgtcgtccccgaagatgagcccagacgtgcaggacagcaacgccgcgaggaagaggcactcgttgcccatgaccaacggcaagcacgactcgtcgcctcgcatgcagcggtcgtcgtcatcgcaagctccgcaaggcgtgaaaagcagtggcccttctcctcacagcgcgtctggtggcgcagacaagaggtggcatatctgactgatgatgagtaggccgagcacagcagcatatttcgccgtctaatccgttgattcgtcgttgggaaactgagtatggtttggaagacgggcagcttttgccgcttgatacgtgtacatttgtcgcttctcattggttgtgttatgtgactgatagtggtttgtgtgtgccccctttgacttgtaatgcaacagtggcatcaggagtgtgtggattggtctgttgtatttggcgacattgaagtttctgttggtgtggatgctactacgcctctcatttctttttgaaaggggtttgcttcgtatcggccggtgttctctggacgatggtgaggcctggcccaaaaaaacacaaacggaacggctttagttcac

SEQ ID NO: 31907 - DNA, 548 bp, Zea Mays
ccgaccattaggtttctccaatttgataaacacaatacctctccccaagggggtgactaccaaaagccaacgaaagaacctcggcatctagcctcatctgagcaaacaatgtgcctagaccccattgacgacatgatggagaagaaaactacacctcatatttctgtaattaattagataaggatgtcccataccaccctcatggctgcactattttctcggatggtcatccaacgatccggttcttacagagaagtactcgggacatatggcccaagtctccttgacatcacaaatccataaacaaaacctcggaaacattgtatcataaatgtatctcttcatcacagcccaaatccaaatggtaaacaaggacagggaaaacagaaagctagtcaatccttaggttgaatcttgttgtctgggaatgtaaattctcatgtgaataggacatcagtaagtcagaggatatttgccttcaccaaacttttgctcaaggtcttcatctgctcctcctttggaaaccacaaactgctcattgtctacat

SEQ ID NO: 31908 - DNA, 2881 bp, Zea Mays
ttctttttgagatttcccccggatcttttcggtgctgttttgttgttgtttcgtttcaggatcgcgtagtctcggcgatttccccgagagtggttcttggaacttcagggttggaggaatacggtgtgcgctagacagcagtctccgcggttgttgtacacttacacaatgttgacatatcctatattgaacgaccgatcaattgatcagtggacggttactgagttgaaggatgagcttgagcgaaggtatctgcctgtcagtggttcgaaggatgagcttttgaagagactctttgaggccatgcaggatgagatacttgatggtgagggaaaaacaactgttgtaacttcccctcctgaggaattgaaaggtggtgaaactcctggttccattgatgtatctgttaaccaggcttcaattgagcaacatgttcataaaggtgcttccgaggttgcgaaacagggggtaggtcttgttatctctgttacagaagcttatgatgaaagtacatttgctacttcagaagttactcaggaggctgtggttggtactgcagaagttagtcagagaagtttggatgctgttgcagaagttgagtcttgtctagttgatgcagctgcaactgatgaacccgatggtaatggtcaaggttcagcttcaagtggtgatactatagtgaaggaaggaagtccgcgctctgaaggtcatggcaatactattgagaagaccccagaagatggcaccaataagaaaatagctgtcgatgatgaaccttctgaccttactggtggtgacatcaagttgggcctcgatgtgcacagcaagattctaaagctggaagatgaacccgcacctcctcatgatatgttgcataatcatgaggattctgatgttgttgcagttgctgagccagaagatgacacaagcaaaaaaatgataagtgatgatgtaccgactggtcttatgcataccaatgttgagttaggtgccaaggtagactgcaaaattgaacaggaagaagtatcaacattgtctgatgctgctgcattgcattcttatcctaaggaacatattgtggctgtggcaaaaggccttgcgctcccaaggaggatgctgatgtcaggctacacaagtaatatagacttggacagaaaagaggagagtcctgacataaattcttgtgagaaactgaacttaaataggagttcaggtgatgaatcaatggatgaggatgtgatggaaaggaagcatgccgattcctatatcaaacctgaagatcttagaggaaagacaaaggttacttcggagcatgtgtttaaagatgtttctctgcttgatactcgtgctgagggttcccctgcacactcaaaggaagttgtcactgaagagaagctatcaactccaactgaaaagaggaaacttgaagatcaagaagtcattgaaaataatgagccaatcaaacgccagtacctatggaacgaggatgctgtcaatatttctgatcaacaagcatccaaaataactagtactggtactcagaaggaagttatttgtcctgctccagaacgttcttttggcaggcctaatacagtagcaagaagaaattctccaaaggagcggattggtgaggttcttctacatgttcaaaacataccacctgccaaaacatccgcaacaacttctttaagaattgatcggtttgtgcgcccatttactctgaaagctgtgaaagaacttcttggtaaaactggatccatctgcagtttttggatggatgaaatcaagactcactgctatgtcacatactcttcagtggaggaagctgtggccacgaggaatgctgtctacgacctccagtggccctcaaacaacaacaattatctgatcgctgaatttgtcgatccagaagaggtaaagctcaaacttgaaactccaccatctcaaattcctcctatcagtctgagcacagctacagcacagcagacagcaaccttccaacaggcaatggctaaccaaactctagtacctccccatgttcctgctacttcgagaggtttattgcccactccagcacggtttgccaaggtgcctcccacctctgaccctggaccagcaagggagagccttcctccccctccactgagcctggaacctgcccggacactggatgagctcttcaagaagacacagacgtacccaaggatttactacatgccactgtcagaagaggaggtatctgctaaacgtgcagctcacgacaaaggtagaaggggatagtgggctttagtttgtcgctcaagctggtattttgctgactccaccagaccagcagctgcagctctatgaagaactactgcaccgtacttgtccctacatttagctggtattgtgttgaaaggctttagtagtttgttgtgagggaagacctgattgggtacgtggtattttggagttaaggataccgtggcttctccaaatcacgatggcgtgtaattttggcattccatagagtaccacggtttctcaaaactaagatgatgacaaaacatcagggatttgggtccaagtgatggtgtaaatgcagaaaattgacagcattttggcttctccaaatcacgatggctcgttgagtacttttcatgctctatcacactttgttaatagcatcgcacttattgtaggacaaacactgcaaagcaaagtgtattttgtgtccatgttttgagtggcttagtgtccaactcactagtgatcgatagtcttcatgttgtatagcgagtaagcgttcctattgcagtgaattgagtaatttgtttgagtggcactagatggagtgttgcaagattgtgatgcttgttactcttagggctgatttggt

SEQ ID NO: 31909 - DNA, 2441 bp, Zea Mays
tggaaacacggcttgtcagccgagattatcagtttcaccatttttttgaatttgaaatttaaaacaagtccgaaaattcggatttcggtaaaaaccggtcaattcctcttttttcgctggtgaccgaaaaatcaaaccaaaacggtttgttctgatcggaccccagatccagattactgctaaataaaaagcatgtgaaggccttcctccccctcccagtcgcccttcaacttgccagccgatcccttcgcgtttgtctccgcggttccgacgctccgcactccgctcccctctcccaagcaaacacagccgagtccacgcacgcctcccatcattcctcaaccgcctcgccggagcaaggggagtagcggaggatggagattgaccaggcggtgcgcgggtgcagcgaccgccgcatgcgcaccaagtacagcaacgccgtctacgtcgtccagcgggccttcgcgctctacccatttgaggaagttgccttcagctttaatggtgggaaggattcaactgtgctcctgcatttgattcgagctggttactacctttacaagaaggactctggtgatgtagcccaaacagatgctgttaaaaactgtccactgcgtactatctatttcgaaagcccttgtgctttccctgaaatcaattcattcacttatgagattgtctcaacgtaagagttgtctaagatgtgtctaactttacccttagtctatccgctatttaaggaagggcaggcctggtgcggtggcgagctgtctcactgaatcatcaggttatgggttcgaaacaacctccgtattttcggagggaaggcttgcttcggtttatcgctatcctagatcacactcatgtgggagccttcagcactggatttcaagtctggtctagaaggccttctgaaggagaagcccaccaaagcaattttcattggcacaagaattggtgatccaaatgcggttggtcaagaacagttctctcctagttcacctggctggcctccttttatgagggtgaatccaatcttggattggtcatacagggatgtttggtcttttctaataacatgtaaggtcaaatactgcagcctttatgatcaagggtatacttccattgggagcatacacgatactgttccaaatgcactccttagtgattcatcatctgagaaaagttttagaccagcatacatgctaactgatggaaggcttgaaagagctggtagaacaaaaaagattaatcctaaagtagaaatgaattctgctgcaagcaatggcatcaacgatactgagggaggacggatgatctcacgggcggcatcaatcattgtagtcggtgatgaaattttgtttggtacaactgaggataacttaggagcagccttgtgcaagaagcttcatgcaattggctggcgggtttctcatgtagcagttgttcgcaatgagattgattctgttgctgaagaagttgaacgttgtaaatctactgatgacatggtgtttatttttggtggactcgggccgctacattcagacgtttctttggctggtgtcgcgaaagcatttggagttcgtctggctcctgatgaagaatttgaagattaccttagtcaactcatgggaaacaattacactggtgaccgaaatgagatggcacagttgccagaaggtattacagaattactgcatcacaaaacgctaccattgccattgatcaaatgtagaaatgtcattgctcttgctgcaaccaatatggatgaactagacaccgagtgggattgtcttctaggtacccaggagagtggtctaatgccatcaaaaccttttgtgtcaaagcatctcagcactacactttcagatgttcaaattgcttcagtccttgcaaaactgtgcttagagttttctgatgtttacatagggtgtcatcggatatcaagagctggtcctttggttgtgaatcttactggaaaggataaccagagggtagatgcggctgccgagaagctgacaagcagctttgaaggacaattttcccaacttaacagttgcaaataagctgtcagagacacccctctatttttgccaaattctttccgcctgaagctctgagattgtgcaggactgatgatggtgctcaactgctctaaaccgacgaccaaaataaaccacggagctggtactactttgaagctacaaattttatttagggaacataggaattttgtactaggaattggtaactgggttctagcataatgtagctttgcagctaatattttgacattattatacgttccaaattatttcatttatactataatttatagcataactttactgctcgatcatgatgtcttcagttgtttgacctttttgctacttgttcgagcatagctttgcagtgcttggtgatgcaaacattgatgctga

SEQ ID NO: 31910 - DNA, 1779 bp, Zea Mays
aagactttggaacactctagaaccctactcgattggatttaaacccgggtttgggtggcgtcgcctttcatcatttcccccctcgtgctctctctcgaaccttcttccaaagcacccgaaccctagtgatctcggaaccctagccgcgcgcggatctcggcttttccccttcctccacgccagccatggacgaggacttcgagatgcctcccgccggcgccgatgagatgatgggcgacgacgagatgggcgacttcggcggcgacgagggcccggtgatgaaggtgggcgaggagaaggaggtcggcaaggaggggctcaagaagaagctgctcaaggagggcgagggctgggagactcccgaggtcggcgacgaggttgaagtgcattacacgggcacgctccttgatgggacaaaattcgactcaagccgtgatcgtggagaacccttcaagttcaagcttggacaaggtcaagtgataaagggttgggatcaaggaatcaagaccatgaagaaaggagaaaatgctatttttaccattcctccagagctggcttatggagcatctggttcacctccaactatcccacccaatgcaaccctgcagtttgatgttgagctgctttcatggaccagtgtcaaagacatttgcaaagatggcggcatattcaagaagatccttaaagagggagagaaatgggagaacccaaaggatcctgatgaagtacttgtgaaatatgaggcccgtctggaagatggtactgttgtatccaagtctgagggggttgagtttactgtgaaaagggtagaccagcagctggagaggaaggtgctgtgccgccaaatgcttcgctgctcattgaccttgagttgatttcatggaagactgtcacagaaattggggatgataagaaaatccttaagaaggttctcaaggagggagaaggttatgagcgtcccaacgagggtgctgttgttgaagtcaaaattatcggaaagcttcaggatggcgcggtgtttacaaagaaggggcatgacgaagagccatttaaattcaagaccgatgaagaggaagttattgccggtcttgatcgtgctgtgttgaacatgaagaagggcgaggttgctcttgtcacaattcctcctgaatatgcatttggttcaactgagtcaaagcaggatcttgctgttgttccacctaacagcacagtaatatatgaagttgagcttatttcatttgtgaaggacaaggagtcgtgggacttgaacaatgaagagaagatcaaggagtacaacaagaaggacgccaaattctacagcaacatgttcgccaagatgacaaagtagcttttggggtggaggatgttgtggtgaagcgaagggattaaaaacaccgatttctgctgccgaaggacttcgcccgttgcttaacttctcgcttttcgcatactttgtagtcaattagtgtgcacggatgcttggatatgtgaaactgaggaacatgtacttcgaggattattattggttctgaatttttatgttttctggttcttgttaggaccattgaatgttctctctatataattttcggacacatgttcttaataaaccacgggagcaaaagtttatgctaagaacgtctgctcatcgtaactaacaacagctgcctcaccgtcacgcactgccgtgtcaggatgtgtcaacctgaagatcacagaaactgcacaacgtttgcagatcaatgaatgggcactttggattagaggtggtaatgagct

SEQ ID NO: 31911 - DNA, 303 bp, Zea Mays
ttttgcaatactttacttgactagatctgatgttgcattctcagtaaatgtgtcacacccagatttaaggggtaaagtcaggtgcttctcatatgtgtgccaaagataaacaacacatataatgacaaagtgtatagagacaaatgtcacaaatattattacatagcagaagtatcttacaaaaataaatgataacaataaaatgaactaataattatttcttggcgccatcaagctgactgggagatgccacctagattagctcatactcatcgttgtagacctcctcctggactacctgct

SEQ ID NO: 31912 - DNA, 1562 bp, Zea Mays
cactcacagacagcagccacagcggagcttaattagcaatcattgactatgggtgcgctcttgccatggctggcatggttgctcgtctccctcgtcggcgtctacctcctcggccatctcgtgcaggcccgtcgtcgtcgtggtctaccgccgggaccccacccgctgcccatcatcggcagcctccacctgctcggtaaccaaccgcaccgctccctcgccaggctcgccaagacccacggcccgctcgtgtcgctccgcctgggctcggtgaccacggtggtcgcctcctccccggccgccgcccgggagatcctgcagcggcacgacgccgccttcagcaacaggtccgtgccggacgccccgggcgcccacgccaggaactccacggtgtggctgcccaacgcgccgcgctggcgcgcgctgcggaagatcatgggcacgcagctgttcgcgccgcacaggctggacgcgctccagcacctccggcgcgacaaggcgcgggagctcgtggaccacgtgcggcggctggcgcgcaggggcgagcccgtgaacgtcggccgcgtcgccttcaccaccagcctcaacctcgtctcgcgcaccatcttctcccgcgacctggccagcctcgaggacgacggcgcgtccaggaagttccaggaggtggtgacggacatcatggaggccgtgggcagccccaacgtctccgacttcttcccggcgctcgccgttgccgacctgcagggctgccggcggcggctggcgcggctgttcgcgcggctgcaccggatcttcgacgaagagatcgacgcgaggctgcgtggccgcgacgctggcgagcccaagaagaacgacttcctcgacctgctgctggacgccgcagaggacgatgacaacacggccggcctggatcgcgacacgctccgttcactcttcacggacttgttttctgctgggagtgacacaagctccagctcagtggaatgggcaatggtggagctgcttcgaagcccgggttcaatggctaaagcatgcgacgagcttgcaacagtcatcggcccaagaaaagacatcgaggaatctgatattgggcggctgccctacctccaagccgtggtgaaagagaccttcaggctgcatcctgctgccccgctgttgctaccgcggcgtgcccaggccgacgtgaagatgatgggctacgtgattcccgaaggttctcgagtgttcgtaaacgtatgggcgatgggtcgagacgaggagacgtggcctgagcctgagaagtttttgcccgagaggttcctggggaagaagacgcagcaggcggttgatctcaggggcggggacttcgatctcatcccgttcggtggaggacgccggatctgccctgggatgccgctggcgatcaggatggtgcatctgctgcttgcgtcgctcttgaatcagtttgcatggaggcttccggctgagctagagaggaatggagttgacatggctgagaatttcggcatcacgttgaccaaggccgtgcctctttgtgctatagccacagagatctgagtcgg

SEQ ID NO: 31913 - DNA, 579 bp, Zea Mays
ggcgtgcagacgacggtgtcggcgacgctacaggcgcggcctccggcggagcagcgacgacaaacaatgggagcgaagtgcgtgagcgagggtggctggggaaggacgaaagcgagagttgggtaagggagtaggagaagaaacgcggctgggcgtccaatttataggccaaggcgagggaagtcgggcgtcggggtggaaggagaagggcggttaccagcaccgccaataacgacacttgggagaactgggtaggagaaactgccaatagttagtggggagaaatggagagggtggggcgagctggccataatgctgggcgaggaggtgaagagccggtggcggctgcacgcgcgagtggggagagattcatggccatggttgaatgccgattgaagcactgtgttgaacgctattgatgacagcatcaaagaaacggttgtggcgtgaggaaactgtgaacgggcgctgccataacgcgaggctagaggtgcggggaggcgaacgagctggcggccacgaacggacgttgcaggcggcggtgcgtctgctcacggaaaaaggaaaacgatagaactg

SEQ ID NO: 31914 - DNA, 3570 bp, Zea Mays
ccgcaattcaacacgcgaagctaaaaaagaaaaaaacaattcgaaacccccgacctacgcgaggacaaaacagcaaaaccaaagcgctcagccgctcgcgaggagcgaaaggcgagcgcgcagccgggcgcccgtggcggaggcgaaacccccgccgccgcatcgccctgagaccctccggttcggcccgggccgagctcgagcccgcgcaatctcgccgccggcgggcttgatctgatccaaggccaccgcgcgccggcgcgggcggcgaggaatggggagcgtggacggccgcggggtcgaggggatccacgaagctaatcggcgcgcgcagttgattggatggatgaatgccttactcccggaattcagtttgcctccggattcatcgagtgaagagctgcgagagctgctcagtgacggcgtggtcctgtgccgtcttgtgaacacactcatcccgggggttcttgagggatcctgggagggttatgcaccgtcagatcagaggttaggcaacgtgaagaaattcctctcggtggtctctgatatggggctgccaggcttcagtttgaaagatcttgatgagggattaatgtcttctgtagtggaatgtctcttggttttgaggggcagtgtggatcctagattaggtgatgatattccaccagatgttaccagaactcctttgagaaaacaatggggagttcaggaaatggacaagcctcaagttcccgctgcagcactagggaaaagatcccctgcagaggacatgagaaacggcgttgcagattccaaaacccatcagaaaacttctgtcttttctggacaaaaggttcgtgaagttttccaattaaaacgcggatcatattcagatcttactgctgccaagatttcagagatgatgcactctaatagcttagataatgcaccgacacagtcgcttattagtgttgttaatggtattttggatgaaagcatagaaaggaaaaagggagaaataccacatcgtgtagtttacttactgcggaaagtcgttcaagagattgagcaccgtctctgtattcaagcagagcacataagaagtcaaaatgttaccatcaagacaagagaacaaaagtactgttcaaaaattaaagcacttgaaatgttggtaaatggcacaaatgaagaaaaccagatggcaataaacaggcttcagatagtcaagaatgagaagtcacaaatcgaagagaaaaaagaactctgtgagaaagatgttcaacgattaatgaaagagaaagaatattccaaaagcatcataatgaacctaacaaaagatatggaagccatgaatagattgcatgagcagcaacttgagcaaattggaagaaaggcaaaggaaatggaggaacaattaaccaccagggtaaaagaagtagagtatctcttgctacaatcgaataagaaagttgaagaacttgagattgcttctaggctaaaatcacagttatgggatcagaaagagaacatttttcagagttacatggataatcaacaattagttatcaaggtaatataagagtatattgtcgtgttaggccatttctttccggtcaagataaaaagtccaccacaattgactacatgggggaaaatggtgagcttcttatatcaaatccatttaagcaagggaaggacggacatagaatgttcaagtttaataaagtgtttactccatttgcttcccaagctgaggttttttctgacatacaaccactgatccgatcagttctggatggattcaacgtttgtatttttgcatatggccagactggttctggcaaaacttacactatgagtgggcctaccacatcaaaacaagattggggtgtcaattatcgagctttaaatgatttgtttgatatttcactaagtaggagaaatgccttctcatatgaggtgggggtacaaatggttgagatatacaatgaacaagtccgtgatctgctatcaaatgatattgcacaaagaagacttgggatttggaacacttctcaacccaatgggcttgttgttccagatgcaagcttgcactcagttaagtcgacatctgatgtattagacttgatggagattggacaagcaaatagagcagttggttcaacagcgctaaatgaacgaagtagtcggtcacacagtattctaactgtacatgttcgagggatggatttgaagaatggatcaacctctaggggttgtttgcatcttattgatcttgctggtagtgagagggtagagaagtctgaagtaaccggcgatagattaaaagaagctcaatacattaacaaatcactctctgcgttaggtgatgttatttttgctttgtcacagaaaagtgcccatgtgccttatagaaacagcaagttaacacaagttcttcaaagttctttaggtggacaagcaaaaactctaatgtttgttcagataaatcctgatgttgagtcatattcagaaactataagtactttaaagtttgctgaaagggtgtctggagtagagttaggtgctgctagaagtaacaaggagggaaaagatataaaagagctattggaacaggttcttgtacttcttgacttgtcactaactagagtttatttgtttccaattctgtagcaattttggttggaaaaacagtatactgaaaaaagggcaaacttttacatgaatgctatgttagtatttatcaaggttcaactttcgaagcatggtttgcatactactcaaaggttgcgtctttgaaagacacaattttgcgcaaagatatggaaatagagcagatccaggtcatcaaagacaaagtaaaatccccaaatttgttgttagatagaaatgtgcctggcttgacgaagactacagcaaaccaacctagccaactattatcaggcgaacgaatgcttaagtctagtgacagagttctatcggatcgtcagagttacggcgaggtgaatgtagatcctaaccaccatgtgatggatactgcaccagtgagcatagatgaagcaggatatgagaacaatgcatcggatgatggtttatcgggtgaaaccgagaatgataattcagctgctgagatgacagcggaacggctgcatagatttccatcaagaataagcaggttcactctcacaaagaacgggcagccatctatgtctagatcgaacccaaaggatgctaagactccaagcaatacgaaagctccatcgagccggttgacaggaggctcttcagccaggtctaaaagacggcagtagagcacgatcatgttgctcgttttgatgtgcattgtagttgaaatgtgaatttgatgggtagttgtaggaccgttttatgattgtaactttagaaaatgtcagacactgatggcagaatatttgaggcatttgtttgatcatttgcttatgccgagcaaaacagcaaacaatgctcgattgtatgtgaaacactctgacctgtgaccatttgaatgtcggtgcgcctccggaagtccggagttgtgtatataccaccaaattgccggcctaaaatttccag

SEQ ID NO: 31915 - DNA, 1160 bp, Zea Mays
cacccctccctccttagatccggccatctcctgcccgcctcgacgtcggtcccacgacccggaaccctaaagctcaccccaatggcggtgtcgccggagcccccggtccggcggggagaatggaggcggccctggaggcggcgcgcgccaaggacaccaaggagcgcctggccagggttgagcggctgcacgaggcgctcaacgccgcggcgtgccgtgggctgaccactactgaggtcaccgcgctcgtgcgctcaacgccaacatctgcatctcccagggcggcctccaggcgctctccgccgccgccatcgtcagcggcaaccacttcaagatccacctcaacgccctcgtcccggccgccgtcgaacgcctcggcgacggcaagcagcccgttcacgacgccgcacgacagctcctcattactctgatggaggtgccattgattattcatcatttcttatgctcttgaagcaactggttcctccattgtcgactcagctgtctgatcgacgttctagtattgtcaaacaggcatgccacctacttaatatactatccaaagaactcctcggtgattttgagccatgtgctaaactattcatcccgatgctttttaagcttgttgtcataaccgtgcttgtgatcgctgaatctgcagatacatgcataaaaactattctacagaattgcaaggttggtaggattcttcctcgcatagttgacacaacaaagaatgaccggagtgcaatcctccgtgcaaggtgctgtgagtatgcacttctgatactggagtattgggcagatgcctcagggatacaacgttcagctgatttatatgaggatatgataaaatgctacactgtagtaaatgcgatgagcttttcttccattggtgttatttttagcctatcacatatatcattattctgaactcaatcccttcttgtacgtccataaatccaacacaacatacacattttcacaacatttatctactagtggaggtaccgaccatcacttgtcactataactcgatggtgatcagcggtcgtgagcttttatgttatgtgttctgatacttgagacttttattatgactatgtataatatgttgtctcttatttgtactggatgagatgtgtcttattatgactatg

SEQ ID NO: 31916 - DNA, 1834 bp, Zea Mays
aatgtttcacgggtgaggaggtgagggaaagagtgggggagagaccataatgggcttggcccaaacaaagattaagggaaaagcttgtggaatatgcaagaacagtgaaactgaaacccttcatctccgaaatatatgctttgattggtcaaaggatgatttagctgaaaaactgaaacccttcaagttggaaaacttggatagaattaatctaattgagcacccagacagaaagggtaaaaacagaggctatgcgtttcttgacttcaggactcatgtagatgctgtggaggcttttgtgaaactacaaaaaatagatctgtatcttggtactgactctagagcaaacatatcattttcaaacactctttcacaagatgatgagatcatggaaaaggtgaaatctgttttcttggatggcgtaccacctcactgggatgaagacaaagtgagagaaattttcgggaaatttggtgaaattgatagcatacaacttgctagaaatatgttcacggcagcacgaaaagattttggtttcattggctttacagcaagacagtcagctttagactgcattaagatggtcaataaagatggtgttggtgaaggtagtggaaaggttcccataaaagctagtttacaaaggccaaggcatgctttcaagaagtattcccggcaaggctcaagttccttgctaggcgtcagaagaggatttgtagataaaagttctagtggtagaggacaccactcggacagatataggcattttagtcctgtaaggcgttcgtattcagataatcattctcgccgtcactctattgatgttgaagagaggcatacttctgtgcgaggatacagagcttactatagaagagactctccagtgcatgccccaagctataaatatggaaggacacatctggagaccagaatcagcgaagaatatactgagggaagatacactagtaaatatccaaaacacagacacacgatgcatggaaccatggagcgagatgcaaaccgcaggatcaagtatggacattcataccaggagagggcacatagaacttgcccaggttgtaagctgtgtggtcaaaattacaattaccccaatggtgaggaattttctgcaatcagcggttgtcaggaggcatactaccagacagaccatgatctgattccttcaacttctcaagtagcatctcattgcgagggttcttgctgcaagggccagcagttgaaaccgaaaagttattctgtgatgcgtgattatgactatatcaatcaagagtcaacacctagttcaagtgaccatgccagaacaagatctaatcttccagcgccgcctcatcattggcatgttaaacattctaatgagcatcggaggtatgtatcatgaaagaaaggaaagccgaagctggtatctatcttccaaagatgctccaagtactcactccaggaagcaccataggccagcaagataagctgtaactgcaagatagagaaaatctagtagcagctcgcttctgatactgatggatagcatttgttaccggggccctgcttacgtggctgacaccctgttgcggggaggaatctgttccaaggacagcagtataccgtcccaatttataaccaaatactttgccttttctcggttctttgtattcgcgttcgatttctcgaaatgtggtgctgacaaatagggatgaaaacggaaactgtaatttttgaataacgggaattgtttttaaagtttaaccgaaatttaggtctaaacggaaatggaaacgattactgaaaatacggaaatagaatcggtagaagaactcag

SEQ ID NO: 31917 - DNA, 2616 bp, Zea Mays
catttccccaacaaaaacaagttcgcaaacccagcacctcgtatcctcccgtcgccgcctcgccttcccctgcgctaccaccgccgctatctgaaccccagcgcctatccggtgagccggaggggaccgccgaggatgttttactcgcacacgatcctcgcgcggaagagcccgctgggcaccgtgtggatcgccgcccacctcgagcgcaagatcaagaagccgcagatcgatggcatcgacatccccacctacgcagaaagtataatgttccctgaagttccaattgctctaagattatcagggcatcttcttctaggtctagttcgcatttattcatggaaggtgcaatatctgtttcaagattgtaatcgaatgctaactacaatgagaacttcattcgcttctgtccaagtcgatcttccaattgatgcagactgtgctccatttgagtccattacactaccatcaacactaaatcttgacgccttgaacttggatgacgcaatttctctgatggatacgccagataatcatcagaagactcttgatcagattaccttgcctgaaggagaatatgtgatgatagaacttgatgaggatgccagagtagagcaatcaggtcctgctccatcattacacatgggacctacagcaatcgaggatgagacgtcccctccatttcatgatggttttggagctaataacgatcctaatgaagaagctcccatagatcgtcccataggcaattcaccagtgaattccaacatagcaaatctgacagatggagcactagatccacctgaaaaaatgcgtgaagctccacatgagtttcctcacctgaaattaacagagtccatccttggaaatgatgaccccatggatttggaccatgattcttcaccttttgtgcaaaacaaggctatcacccctccagttattgatgaaacaacttctgctggtcgacaagtacctgggagatccatttccaatttacgtgcaccaaacacctttgatgcttttgcagatgatgcacccctaaattttgacattcagttacctgaatttcggcttgagccatctccacgtccagtacaagagaacaaggataatagaagaccaaaagcacaagttagcaatagaaataggaagagagggatgaaatttgattacaaaattgtgctctccaatgactgtatgagaaagcaaattgatggtgctgaactagatgagttgatctgcaagaggagaaaattaccccagacagcccttgatgtgtggagattcagcagaactaacagacagggcagcttcttgcttgaacctctgctgcatgtgatcttcaagaaacctatgagagaaacttcccttgtgtcagtggccttgatgctgagtgtagcaatgtggctggtgtagcaaatgatgatccggatgcatcacttgaacggcagctaagcccaaatgttcctagaactgcggagctgtcttaccatgagctcaccccaacgtctccaggaaatgcagaggcacagcctgaaccacctctgccaaccctaaagtcaccaggagctgcaggtgcagtgccagacgatgatatgttgcctgagttgccccggttctcaccaatagatgtgccatcttcaataagaggaaatgatactccttacaaaactcctggcggaactccatcttggctcggaggatctgctgtttctgaaataccatcatctgatgggaactattcattacctggacaaagtactcgtgactctgataacatgtcattcctttttccaatcaatgaagatgatgaacacccagagatccctggtctcatgagtacacctggaggggtatctagtgtagctactggaactaccggattaggaagcatgtcggctaggacaagggctgttgcacttttctttaaggatcatgcgtcttcaccctcagatgatcagcctggaaaattcagtttgaacaaaattttggaagggaaaacaaggaaacaggctgcaaggatgttctttgagacaacggttctgaagagttataattacattgatgtgcaacaagaggatccatatggagccattgaaattttagttaaacccttgctgtcagctgccaaactgacataagttacttggaatcatctgcaggacctcttgtccatctgcaaaaagatagaatccccaaaggctacctgaatattgtttccgggtgatcctggagaaggggtcaaatgggcgtaaacttctgttaaatgtcggctagggactaagttagcttagtgaatatcagtgcgaatactagtgtgacatcttatacatgtttatgtctattacttttccttttcgtccattaagaaggttttcatgatattctgtaatatgacctgtttggtcgctgcctagcttgccacattttacctaacttttctgcttaatgttagttctttaattcgaacgactaaccttagccaaagtgtggcacagttagccacgaaccaaatagacccataatccttctgtttggttggcgtgggcagccatgcgacaaattaaagcgtatgctgtttggttcactttggtcatgtttggttcaacttttttc

SEQ ID NO: 31918 - DNA, 4258 bp, Zea Mays
gtccacttctctattctcctccgccgtccttccgttcgtctcgatgctaacgctactgctcgtcattctcccttcccacacgtagtagaaaaaaaaacccatccatcccgcttccttgattcagcctaggacgactgaatcaaacccatacgtgatcggaggagttggattgcctcccgcctctcggaggtcgcttccatctattaatcaagaaattccaaacttctcgcccaaatccgtgcggacttggtgaagcagggtaaattgggccaggagacgtcggtcccggccacggagtccccctccccttcaggccgttcttgttgggggagataaaaggattcggtgcgtctgatcggaggcgtgggagagaaggcctcggcagacgttgttggctcgtgctcttcttcgacggacggaggctgtcgtgctggagaggttaaagtgtttggtgtttcgtgttgaactgtgcgcgtgcggtggttgcttcgtttggtggtatatggtagaactgtagattttgatctggactgcgtgaagcaaaagaagggaaaaaaaaaaagaagattcggttttggagtgaagttgtggctagtcgggaatcgcaaggaagatgagttccgggtcggcggtgacaggcggtggtgcggaggaggcggcggcggtgccgctggggcagaagctgattgtgcacgtggcggagaacggccacaccttggagttccagtgcggcggcgacacgctcgtcgaggccatccagcactccatccagctccactgcgaaataccccctgccgatcagctcctcctctgcggcaacatctccctcgacggcgccaacgcgctcgccacctacaagcttccgcgggacgaccgtgaggtcttcctctacaacaaggcccggctccttgcggactcccggcccccggcgccggagtccctctacatccctgagccaaatattcctccgccgccccggccgcagggctcaccaccttcggacgcatctgcagaccccgcgctgaaggcgctggtatcctatgaaacaagattcagatatcacttccaggtcgccaatgcggtgtatcaatctagtttggcaaaatttgagctgtgcaggcggcttctgcgggaggggcaggtccaggagcgagcgctggacacagcagggagcaacctagagcacacattccggaaactctcacagaggtattcagaatttttgcggtgcttcacacaacagcaccgttcacatgttgagatgctggccaatttcgagagagatgtgcagaagctgcgtgctgttaggctgcacccagccctgcaaagtgaggggcggcattgcttgatggaccttctcaaggaaaatgacctgaggaaattggctgacgaatgcttctgctcacataagaagtttgaggttaaggtgtcacagctgaaggcaaacttcttggagctgaagaagagggtggaaggcttattccatgccatgagctcaggtgggtgcaaggatgttgagaagctgataaaggagcaccagggagtcattggtgaccagaagatcatcatgcaagctctaagcaaagatgtggacacctcaaagaagcttgttgatgactgctcaagttgccagctatctgcttctctccgtcctcatgatgcagtctcagcggttggccgtatctacgaagtgcatgaaaaggataacttgcccagtatacgggattttgatcagaggcttacaaaattgcttgagaaatgcaaggacaagaagaatgaaatgaatactttggtccatgtttgcatgcaaagagtaaaatcttctcagattagtatcaaaggcatgatgagtgaactcgttgcattccaagaggtgatgggtcatcaagaagattttgataatctgaaaatagtcagtggcttgggtcatgcatatagagcttgtgtcgccgaggtagccaggaggaaatcgtattttaagctgtatactggattggctggaaaatatgctgaaacgttggcaatcgagtgtcaaaacgagaaaacaagacgagaggattttcataggacatggagcaggtacattccagatgatgtcatgtgttccatgggactctttgattctccaagccagtgtgatgtaaaagttgctccttttgatcttgatcttcttcccattgatgttgatgatgtggaaaagcttgctccccagtctatactgggttcttttttaaaatctgagagatcacagctagcaaagcctttgctaagcaattctaccagtggaaatttgaacaaatctgaacaacattctctgagtgctgatgataagatggatttccaagattttctggggggctatgatactattgacattgcaggaactagtaagttagaagtggaaaatgccaggctaaaagcagaacttgcttctgcaattgcaattctctgcggtgctggatatggatatgagtctattgacgaagggcaaattgatgctgtattgaaaaaagcaagggaaaaaactgctgaggcacttgctgcaaaggatgagtttgcttaccagcttcagtcattgctcactgcaaagcaggaaaaatgcttggcatatgagaagcggatccaggatcttgaggaacgcttaaccaaccagtacatgcaaggtcacatggtgtcgggaagcaaaggcatgtctgattccctgctttctgcatttaaaagtaatgagtgcaacctggatttatctgaaggcaggcaaccccaaatacgtgatgaatcaagtgtggccatggatgaggtctcttcaacatctgaacagccatctaaacaaacagaaggtggcgatgagaatatgactgacatttcgggtgcactgaacttgcagttgatcgattcagcagcatgtactaatctggatgctttcatgacagaactgccacgtgataatgaacacaagattgtaaacatcaataaggaaggacacatgttgacacaacttactatggctgatacttctgatgttcctatagaagatcctcttagcaacttaaactcaagaactgatgatcatcatgccctagagttgagggataaggagctccttgtgtcagagctgcaaaacacgcttgatcaaaaatcaaaacagttgggtgaaactgaaattaaacttagtgccatgatggatgaggttaattctctgaagaaagaacttgaacaaacccggggccttcttgatgaatctcagatgaattgtgcgcaccttgaaaactgtttacatgaagcaagagaagaggcccgaacaaacaaatgttcagctgacagaagggctgttgagtatgatgctctgcggtcgtctgctttgaggatacatggtttgttcgaaaggctaaataactgcatcactgcaccaggtgtgactggctttgcagagtcactgcattctttggctgcctccttggcaagctctgtaaagaaggatgaagctgataccactgttcagtttcaacaatgcatcaagatcctggcggacaaagtttatttactgacacgacagagtgctgagctgctagaacgctattcagctatgcaggcagtacatggaggtatcacaaaagagctggatgagaagaaagagctgattaagaatctctacaataaacttcaacaagaaaaacagcaaagagaagatatcatttggtcggtttgaagtccatgagcttgctgtctttttccgaaaccctgctgggcactatgaggcgatcaaccggaactgctcaaactattatctgtctgaggaatctgttgccttattcacggagcaacactcgcagcacccagtgtacataatcgggcaaatcgttcatattgagcggcgcgtagcgcgtccagaccagatgggaggagctccacgccctgatagcagtggcggccatcggtcgcccgcatccatgctcaacccctacaacctacctgggggctgtgagtacttcgtggtgactgttgccatgctgcctgatgctgccagttaaaacaaaacaccttcctgatcctgcctgacaattggctgttgaaatgaagggagaaaactgtcaaagtgtcaactgtatatatactaaaatttattgccatttgactctcaattctcagttgattcctcaagtgttgtttgtatgtatggtcatattcactgtgtaaataaactcggctactaatgctaggcatctcttcgttcaaactatttattctcctcaatgccaaa

SEQ ID NO: 31919 - DNA, 704 bp, Zea Mays
gtcaaaatcatccctatcctctgacggactcagcgcgtcgcgaccactctgcgtttcggggagatccaccaatcgattaccccccacgcggactccacccgtggtgcataaaagccaagcctgagatcccctattcccctcatagaatacgacaccgagggcaatcgcagcgaaacagaaaggacgaaggagggagaaaagcttccaccaccaccacccaactttgccactaggtcgccctagccctcgaaaattgtatggtgcgagcagcgtgctcgcgttggtcccgaatccgggtggttgccggagcagccagcctcaggggccctagaatttctcgtcattgcggaactccgcccaaatctatgctccgtcatggactaccgtccctatgtgtcgatcgacggtaagacaactccaattgtttttgccttggtgtcctctgcgtgtaacactgatttttcatggggattttgcgctagtacgggtgatggccatccaccggcggagcaccaccgtaggtcgggttcgcgccgccgctctggaggtcaaagggtagaagcacgcctcggaccattggatcgtgcatcgacgattaatattagatcagtggataccgattcggtggggaatcggggcattgttgtgagatgtggtcgtggcagtcggatcggcgttggacgattaggattaaaacatatccc

SEQ ID NO: 31920 - DNA, 1821 bp, Zea Mays
cgcagcactaacacccagcccaacccaacagcagccagcaacctcgcaggctcgcaccaccacctcgtccgtcgcagcatcaggccagcagccggcggcgccgggcgccgtcgtgaattaccccaggacttgtcccctccagcaaacggagcgttcagtagagcacgcctcggcgatatcgcggcgacatctgctgcagcccgtggagcccaacgagagcagcatcagcagcagctcccgatcgctcctgctacccacggcctcgcccacgcctgcgtgcgcagcagcagaagcaaagtgattaaccatgattggcagtatagtatcagattcagagttcttcgtggcattctactctgcagctcatttgtagatatatggaattccttccctgagaaatgccgtcctctacaccaccatcagtacaacccacaccaagccttcaaccgttaccatctcctgcagtaagccagagtactcgtattgatgttcgtgagatcaagtccaagatttttaagacgattgggcctgaacgagcaaagaaatactttcagcacctggaaaggttcttatcttcaaaactgagcaagaatgaatttgagaagctttgtcttgttgcacttggccgtgataacctcccattgcacaaccaccttatccgttccatcctacataatgccagtcgagcttgtggcccacctgtaattaatgatcctaggctggtcagaggtgccaccacttctggccatgtgattgttcctcctgtctgggacaatggtggtccgttgaacctaaatgtcaaagagaacagaccattaagcagaagggaaaatctactaacccaaaagccatcactgaatcattgtgacgctattatgctggagaatggtgttcatcatttgagtgatctgaagagatgtacacaatttcaaaacagtgaccatgtggagccacttttcaagcgaccgcgaatggagaaggaaccattcagtttacataattctctgcagagcaatgggtctgctaaggcttcaagagaaaacctgggacaagaaattatacaccaacccgaaggtccagtgcaagcaccacttggcattcagttacgtcctggcaattttggtgtggcccgaatacccctttcttctgtgagttcaaaggatacctctgacacttgtatcgaagttggtgaactctgtgatactttgtcagtgaagaagaggttggacaaaatggcaggagcatctgggttggaaggggtctcgatagagtgtgccaatttgttgaataatggcattgatgttttcatgaagcagttgattggatcttgtgttgaattagttagagcaaggtctcgacatggcaaactaagacatgatgcattgaagcagcagatgtgccgaaaactaataaatggtgtatcagtacatacccatgtttctgggcagagttctattatacctccagagacaaattccatctccatgcaggacttaaaggcagtgatagagttaaacccttgtttgcttgggattaatgcatcactgttactagaaaagatcaattcatatgactagttggatggagctagttgtattcatctcatcacaagatcctatgaccttgatggtctgtcttgtttcatggctgttgtaatcaggccataattttactgacgggtagtggtgaagtactaaactcatttatttcctgcacctaaggaccactattgggctaaagtgcttcagagataactatgttgctggactccaaacaaattgagccatatcacagatttgatctagaacgatccggtcgaag

SEQ ID NO: 31921 - DNA, 150 bp, Zea Mays
ctagaacaaaggacaatggaaaaggtgttgagacctctactgctaatgtggtgcagaagagaaacttccgcaagttcaacaagaagaaaaaccataacaaacaagagaatacaaataaacctgttcaaacagcacaatttaaaaaaaaga

SEQ ID NO: 31922 - DNA, 3975 bp, Zea Mays
gggagaggccgcaaggcaccgagtcgagccgctgctcgagcagacagggacgcaaacgcaaggagacgatgaggcctggatcgacccccggaccatcttcgcgccggtgcatccatggctccgccgccgcgctcccaacgctgctgctgctgcttcttcttcttctggctgcatcgtccgcgcaagctcagcaaacgtcaaggatgaagaccgatccagtcgaagcggcggcggtgaacgcggtgttcgccaagctcggccaggcggctacgtcggcatggaacatcagtggcgacccctgcacaggcgccgccacggacggcacgaacatcgacaacgaccccactttcaacccggccatcaagtgcgagtgctccgtccagaacaaccgcaccgtctgccacgtcaccaagctgaagatatacgcactcaatgcatttggccccataccacaggaactgcagaacctcacgcgcttgaccaatctgaatttagcacaaaattacttaaccgggcctttgccatctttcctcgggaatttgactgctatgcagtacatgagtttgggcatcaatgcattgtctggatctgttccaaaggagcttgggaaccttgtgaatcttgtatctctaggcattggctcgaactacttaaatggttcccttccttcggagttgggaaacctggcaaaacttgagcaattgtatattgacagtgccggcctaagtggtcccctaccgtcatcgttttctagactaacaagaatgaagacactgtgggcatcagataatgattttactggggaaataccagattatattgggagctggactaatttaacagaactgcggtttcaaggcaattcatttcaaggtccacttccagccactctttctaatctcgtccaactaacaagcttacgaataggtgacattgtaaatggaagttcttcaatgatattcatcagtaacatgacatctttgaacacattaattttgaggaattgcaggatatctgatagcctggcatcagtgaacttttcacagtttgcaaagttaaacttattggatttgagttttaacaatatcacaggccaagttccagaagcccttgtgaaattgaattcactcagcttcttatttctcggtaataatagtctttcaggaagcctgccgagctctataggaacttctcttaaaaatttagatttttcttacaaccagctgtcaggcaactttccttcttggactactcagaacaatttgcaactgtgagtattgatttctgaaacttcaaatgaccaccttgtattaccttcagggctgtcgtgtcttcagagagacacaccctgttttcttggctctccacaatctgcctctcttgctgtggactgtgggagcagtagatctatatctgggtatcaacctgatgctgccagtcttggtgctgcatcctattatgttacaggagcacaaacgtggggtgttagcaatgtaggcaagttcatggaagcatcaaatggaagttacataatttacagcttacaccaatttcagaacactctagattcagaactattccagacagcaaggatgtcgccatcatctttgagatactacggtattggactcgagaatggaaactacacagtcacacttcaatttgcagagtttgactttgaagattcacaaacttggaagagtgttgggagaagggttttcgatatctatctccagggcgagcgtaaggagaagaactttgacataaggaaggcatcaggggggaaatcttacactgctgtcgagaagcagtatattgttcctgtcactagaaactttcttgagattcatcttttctgggctggcaagggcacttgttgcattcctgctcaaggctactacgggcctgcaatctcagctttgagtgcaactccaaattttacccctacagtgcgtaattctgcacagaagaagaacagtagtaaaacaggtgtaattgttggggttgtgattggtgcagcagttttaggagtactagcacttgctggaatctgtatgtggaggcagaaaaggagaaaactattattggagcaacaagagctttacagtattgttggaagacccaatgtatttgtttatggtgagctaaggaccgctactgaaaattttagttccaataaccttcttggtgaaggaggatatgggtcagtttataagggtaaattagctgatggaagggtggtggctgtaaaacagttatctgaaacatctcatcagggaaaacagcaatttgcagccgaaatagaaactatttctcgagtgcaacaccgtaatcttgtgaagttgtatggttgctgtcttgaaggaaataaaccactgttagtttatgagtacctagagaatggaagccttgataaagcattgtttggaaacgggaaactgaacctagactggccaacacgctttgagatatgcttaggcattgcaagaggcctcgcttatctccatgaagagtctagcatccgtgttgtgcatagggacataaaggctagcaatgtcttgcttgatgcaaatctcaaccctaagatctcggatttcgggctcgccaaactttacgatgacaagaagactcatgtcagcaccaaagttgcgggtacatttggttatcttgcacccgagtacgccatgaggggtcatatgaccgagaaagttgatgtgtttgcatttggagtggtcatattggagactctagctggaaggccaaactttgacaatacgcttgatgaagacaaggtttacattttagaatgggtctggcaactgtacgaagaaaaccaccctctggacatgctcgacccgaagctcgcagaattcaacagcgacgaggtgctccgtgccatccacgtggccctcctctgcacccagggctcgccgcaccagcgcccgtccatgtcacgggccgtgtcgattctggcgggagacgtggaggtgggccaggtggcgaacaaacccagctacatcaccgagtggcagatcaagggcggcaacaccagcagcttcatgagcagcaacgtcagtgggcagtcgggcgtggcgccgaggtcggcctcgcacgcctcgtcgcagttcctgggctctgtcatcgaagaaggccggtgatgatgagtagcaagttttctcaagcgacggactgttccttgtaattaaacgcacgcacgttacaaaaggctctcggattatctggttttgacctttttcgttttccttttgaaaattttcggtttgatttcgatttgtgcagttggaatttgtatgcaaatgatgatattggatggttaagtctatttgtaattttggatgttttgaggtgtgtgtgtatatatatgatgtgatctgcaagaactaagtcacaattagatattgttgttatattaattttcggtcacgcatagtattcatactgtagttagcgggaaaatcccaatttatacagttaaaatgcgcgttacatatttttttttgtgtgtggatggacaacacacaactgaccgaccgacagactgaagatcagctttatttgaacggtcgagctgagtgaggtactgaggtaggactaggagggtggaagcggaagatagagagagatgatgacgatgacgaggtgctcttgctgcgtccatggcgctgctgtgtcgacgtccatgccgctgctgttgtttcttgtactagtcgcattcgcaaccgccggggctcagcaagtatcaaccaagaggacagatccaaccgaaggtaatcgataagtccgtttcatcattcgttttcttttggttgcaaatgtaggagggagaggagaaagggcgaaaatataacaacgcgccagtgaaaggctttgatctaaatcaaagtttttaagaccttaaggactagtttggaaacctcaatttttcaagtaatttctatttttctacgagaaaat

SEQ ID NO: 31923 - DNA, 1156 bp, Zea Mays
caccactccaccgggcaggcatccagcgacggaccgggcaggcagagaaaagcagaccagacgagacgtcgtgcgtcgcgtcctccctgccgttccccttcttcagttctcccgctgctgctgccgctgccaccctccgtccgcgtccagatcccgccaccccaatcgatctgccggcctccagcatggcggcgggggcgggggcgagggcgaaggcagcgggagccctggcgctggcgctcgtgctcgcgctagcgggggccaactccgagggcgacgcgctctcggcgctgcgccgcagcctcagggaccccggcggcgtgctgcagagctgggaccccacgctcgtcaacccctgcacctggttccacgtcacctgcgaccgcgacaaccgcgtcacccgcctagatcttggtaatttgaacttatctggtcatctggtgcctgagcttgggaaattggagcatctgcagtacctggaactttacaagaacagcattcaaggaacaatcccttctgagcttggtaatttgaagaatctaataagcttggacttgtacaagaacaacatttcggggacaatacctccttcccttggaaagttgaaatcccttgtattcctgctatggtaggacaagcactgtgctgttcaggagtaggggtagtttgcgcatacgttgagctttaactgtggcggctcaatggcaatcatttgactgggccgatcccaagggaactttctggaatatctagtctcaaagttgtcgatgtttcaagcaatgatttatgtgggacgattcccacatctggaccatttgagcacattcctctgagcaactttgagaagaacccacgcttggaaggtccagagctacaaggcctggccatatatgacaccaactgctagagggggcaccacgaacaaaagaatcgctaggaagaaatgggcgaacaaggttaccaaaaagtgggcgacatagattattaggtctggttctgctgccactctgtaatcccccctgcatagctcttatttgtaacttgctgtctgcacgaaagttggtggatgttttagcagaatgctttctgcccgtgaaagtaaacttgaaactgcttattatgagtgaaatgatgatgttatttcccttgccatgag

SEQ ID NO: 31924 - DNA, 1394 bp, Zea Mays
gttcttgtttatgccgccgcccttcttcccgcaccttttatcttttttgccctactcttttattatacgtgctggttttttttttcccgcgcgcagcacgggcttgcctgctagtcccacaagccgccggcaccggcgcacggggagcagaggcagagcagcgctcgccgcagcaagcgtgccctgcacacaacagaccagccaacgctccagcggcagacgacggcagcaggtccggccaccttccgcgcctcgccccggccagtggcgttcacgccttccgccatgaaggccgccgcggtccactccgtcccgccgccgtccgccgtgacacttgtgtcagtggtggcgcggcgcgcgctggtgccggcggccctgcgcggcaacgcgcggcgtggcgcggcgctggtggcgtccgccgcgcccgatggccagatgaggaggagcccgggcccggcagtggcgaagttgaccgacgtgatgtcgcgccccgtgcaggtggccacgccggggcagcggctctcggaggtggacgacgccttcttcgccgcgcggcagtactccggcctgctgcccgtggtcgacgacgacggcagatggagtcaactgtagctgaagtcatgacatctcctgcgataacgctgacactctacaagactgtcttggaagctgcagcgctgatgctcaaggagaaggttcacaggataccggttgtgaatgagcagcagcacgtgatcggaatcgtgactcgctccgacgtgttccaggctcttgaggccaccagcaaagcatgggagtgagtcagtgaggtacggtaggcttgttctcgccagatgttaccccctttatttgtgtagtgatctcagcagagagtatagttatgctaccaatatggcgagaagaggacagaaaaagctaggtgtttatactggaatcgctgcaatacaagacaaataatggtgtaaatttatggagttactgaaacttatacgggctgattggttcgccggccgcgctaagccgggcgggtgcgagcctggccagccaggtaaccaaacatgtgattgcataaagtcaatgcatacgatggctcaggattaaatggtgcgggtaaccaatcacatggataaagaaggtatttatgaaggatgacgaactgttcgtcactacatgtaacacacaatagatagaatagattgtatgtcctttaggatttagacatgtacaagatacatcactatcggaattcggctctttgccgagtgtcaaatgttttatcgagtgttttttattttcgccactcggcaaaaaaagtgtcaaatgttctttaggttttgtaagagtttttcgacaaaaaataaataaataaaataaaagaaagtctttcaatccat

SEQ ID NO: 31925 - DNA, 183 bp, Zea Mays
gatttggcagataatcgaaaagaaggcaatctttctcaatgcgtcttataagtcagaaatgggcataaagcatcacaccatgagcagttagagttaggatgctcattcggcagcagtccttttcgtcgagcactcagggtgatgcggcagaacaccgaaagttctccaggatcaggtccacca

SEQ ID NO: 31926 - DNA, 2511 bp, Zea Mays
gtaagcttttgggattccttgcctgtgatgaggtgtcgaggtaagctttcttatgatgacgtagttctaggctacaacaacatgtgtgctgggctgctagcacatagctgtgtgctgggctgctgactgatagctgtgagcagcagtagattgcgttttgcgtgctgggttcgggtacacattttcggttgtgctccgccagacgtggagcctaggagggtttcagaagcttgcggagccaggcggccgagcttctagacatcattgctcaaacctagtctatctttttgacagaagaaatagatccttgcactccatgccgctatgatcagcgctggccgcagcaggcggcgggggcgggcaccggcgtccctgcccacgaccacgaccgctgcttcccgccggaccgagcactccatctcctgctgttattgtgactgcaagatatattccttaaacgacgccctcttcaatttggggtggaagtatgctagatatatgagagcatggttttctgtaggtgtttatctatctctcattgctttagtcagtatatccttgatgctattgtgggagtcaattggtgtgttttattttaggagtggattccttagtgcctggttacagaacctactgacttcaggtctcaacatatctattgtagacaccacaatcattataatgtcaacaatcctgtctattgtttttcatgagtttggacatgccattgcagctgcaaggtctttatgtcttaccttctcatttctatttttttctctcttacatgttgcgtgctttttgttcagttcacctggtactcaaaacatctgtaagcgaggaaaataggcggcaaatagtgggtttattatgagggaataaattactggattatataggcaaggatgttctagggttttagtttatagaaatgacaccaatcacagaggtccttgtgaccttgcctaccacaaaattgatatgtgtgtgtgcgcgcgcgcgtgtggtgtgtgtgtgtgtgtgggggggggggcacatgcacagcaataaggcccacagcctaaaccaattatctgtctaaaaactctcatgaattattttgtttcatattctgacacatcatttgctacttacacaacagtgagggactacagattgaatatgttgctatatttgtcgctgtactttttcctggggcatttgttgctctgaactatgacctactacaaaatatgcctctcttttccatgcttcggatttattgtgcagggatttggaataatgttatggtcatggaagtccctgaaatatctcctatgtcagaatacttgtccactcatgatgttattctttctgtggatggtctgaaaataaccagaactgatgattggatcaagattctgaaccaaggtactacagcgaaatctagggatcctgaattccttgaaggctctcatagatatgttgccactagttctaccaagggttattgcgtgcccgattcatggatagatgcaagcaaaaatctctggcagataagagacaagctgccttgcccagatgaactgatagccttcgaaaaagttatctgtaacgtctcaaccattttgacagagaagactagcataggtagtgaccagaaggaagttgagggaaaatattgtttgattgcgaaagatgtagtaaagcttagaagatgtggaaacggatggcacatgactgaagatgatgaaagtagctgtgcatgttttgaggatgagcactgtttggtacctgttctgaacccaggcttttcatggattgaggtctcctatgccaggccatactctttgagatgtttacaaaaaggaggaaatttgttatcatcacatactgcaaatagtaactttggacagagtccttgtgaaggatcttttgtttatgtgggtgatctgtcatcagcagcacgttcggttaggttatcccgctaccgacctcgatgggcacttctacttttcattgcagacatcccatatatcttggaaaatggtttaagtagcttgcttcatgcatctgcagcattggctgtaatcaattgcctaccggtgtattttctggatggtgaagcgattctggagactaccttaagctatgtagcttggtttaccccaagactgcaacgcagaattctaaaagtatgcagcgtggtgtggacgggtttattagtcattactttctcaagtatttgttattccacagtgctacattatggcgtatagcaaataacccatgtaattttgtcttgaacaaagagaagatcattttaatggaacatgccaactgtactctgtccattgtaaattataagttgttttgacttttatatatacataacttttgttaggctatcttcagtagactatccacgtactcatattcaagcttcactccttgaatagtgtagtctgtagtgtaaaatagtgttttaggtgactatatggataaactgttggatatgacgtatctacactaggt

SEQ ID NO: 31927 - DNA, 3367 bp, Zea Mays
ctcactcacttcgcctgtaaggaaggaagaaggaagggatacgattattattgcaattgaaagcgatggcatcaagcagcagcctcaatccctcctcctattcgtgcttcctcttcgtcaccgccgccgccgtcttcttcaccgcctccgatgctcaggtgcctggtgagttattgccttcagtgtggatatcgatcagttagcccaactgtgtagcacaaaacaaaaacaaatacgtaacgtactccacaggattcgtcagcatcgactgcggcggctccaccaactacacggacgagctgggcctgcagtggacgggcgacgccggctggttccccttcggccagacggccaccatctccgtgccctccgagaaacgcgcgcagtactccacgctgcgctacttcccatcaccgtccgccagcagcagcagcagcagcaagcactgctacacgctgcacgtccgcacccgcacacgctacctcgtccgcgccaccttcctgtacggcaacttcgacagcagcaacgtgttcccggagttcgatctttaccttggcgcctcccactggtccaccatcgtcatctacgacgactccaaggtggtcaccagggaggccgtcgtcctcgccgccgaccccgccctcagcgtctgcctgtcgtccacggggacggggacgcccttcatctccacgctggagctccggcagctgaacggctccctctactacaccgactacgaggcggacgccttcctggccctctccgccaggatcaacttcggcgcgcccaccgccgaccccgtcaggtacccggacgacccctacgacaggatctgggagtcggacatggtgaggagggccaactacctggtggacgtggccgccggcaccgtcaacgtctccaccgacaggcccgtcttcgtggccggcagcgagaggcccccgcagaaggtgatgcagacggcggtggtcgggtcgctgggcgagctcacctatcgcctcgacctcccaggcttcccgggcaacggctgggccttctcgtacctggctgagatcgaggagttcttggtcccggagacgcgcaagttcaagctctacatcccggggctggcggacgtgagcaagcccacggtggacatcggcgagaacgcgccgggcaagtaccggctctacgagccaggcttccccaacatctcgctgcctttcgtcctgtccttggcgctgaggaagaccaacgattcgtccaaggggccaattctcaacgccttggagatatacaagtacatgcacatggaactcggctcaccggatggacctgtgatggcgaccctgagcctggccctggcgtcgtcgtcgtcgtccttggctgatgttgcaatggaaggcggtgatccctgcctaccttcaccctggtcctgggtcaagtgcaattcagaagcgcaaccaagagtagtttccataaatctttcaggaaagaacttgacagggagcataccaccccaagtagcggatttgccctgcttagcagagatcggatttgctaataacatgttgacgggcccaattcctgatctcagtggctcctccaacctatccatcattcatcttgagaacaaccaactgaccggaactgttccttcctactttggcagcttgccaaaactgagcgagctgtaccttgagaacaaccggttgtctggacccattcccaaggctctgctaagtcgaagcattattttcaactactctgggaacgtgtaccttggaacagcagggaagcaaaagaagaagcatgtcatcatcattatatctgctctgcttggagcatccttgctacttgcagccgccctctgttgctatatgctgacacgcaaggccatgaattcatcatcctcaccacaagcacaagagaaggcgcttcctgcagagcagaacaagttgcagaaatacccaagcacgcagcagctgcagtcgatcgccaccgagacggctcatccctacagcctgtgtgagctggaagaggcgaccaacaagttcgcgagcaggatcggctcagggggtttcgggatagtgtactacgggaagctgagcgatggaaaggagatcgctgtgaaggtgcctagcaacgattcgtaccaggggaagaagcagttctcgaacgaggtggtcttgctctcgaggatacaccataggaacctagtggcgtttctaggctactgccatgaggatgggagaaacattctggtctacgagttcatgcacaatggaacgctcaaagagcagctgcataggcgcgacaagcacatcagttggatcaagcggcttgagattgccgaggatgctgcgaaaggcatcgagtatcttcacactggatgcacgccatcgatcatccacagagacatcaagacgagcaacatccttctggacaagcatatgagagccaaggtgtccgactttgggctatccaagttgctggcagcggagggcaaggactctcacgcgtcaaccaacgtgagagggacaatgggctacctggacccgcagtactacgtctctcagcagctgaccgagaagagcgacatgtacagcttcggcatcatcctgctggagctcatatccggctgtcctcccatctccaccatcgccttcggggacaacttccgcaacatcgggccgtgggccaagttctactacgagagcggcgacatcgaggccataatcgacccctccatctccacggcggccgagtaccaggacgtgcagtccgtctggaagatcgccgaggcggcggtccggtgcatcgacgcagagcctcggaagcggccctgcatgcctgaggtggttaaggagatccaggatgcattggcgctggagcgggcggcggcggagacgaccaccagcgacagggcgctcgcctgccctttctcccccgcggctgcgagcgtcaggtccggcgggacaatgaggtcgcacgacatggtcatggacaacctgctgctcttggacgatgacgacgactccaccttctccggttcgaccgtcaccaagctcaagtacccggagctacgatagctgtgatggaaccaagctcaagcaggattgcaattaattagtatagtagtagtcagcaattcatttgagttagactgttagagcagtggtgagatagcagattttaatttgcagttgttgttacgttacattacattacgaatgtgtttggttggctggcctaactcaggaccaggcccatttgatacatgcacattatgtttggttgtctggtctagtttggaagctggctgaggcgggcccaactgactccgtggcctggcccgatcgaaacatagataacttacttcgctggc

SEQ ID NO: 31928 - DNA, 1043 bp, Zea Mays
tgtccaaggttaaagaaaacattttcttctctataaaccatttcaataggcatgaactgaggataagagacatattctcaccactatgtcgacccgaaacatggaggaaattgataattctcttctgtatttcccaatcatcatcttcccaatgtactgtgacacacatgtagcctttattctgatttgatgtccacatgtccatagtagcactcatgcgacaattgagggttttgaaatacttatacaacacatccttttcatgcaagtagagttccagaatttctttcctaatagtgacacgtgacttcataggaaaggtaggcttcaatgatttaatgaattccacaaagtattcatgctcagcaatgttaaatggatactcatgcatgaataatagttgtataaaactttctcaaaactggtttcttcatcatatttatatggctggacaatgcatatacttgtgccatgatccttttctgccttgagctcctgttgccccttcacaatcttatgataatttttcaaatgagaccaaaatgcagttgttcctctactactttcagcactagctttgctagtcttgtttttgcatcccagatacttgcatttggcccaaacttgcttcacagatttgccattctcctctacgacaacatcatacttttcaaaatactgccaaacatttgaagtggacttctttgcttgcttcaactttgaaggatcatcctcatccaaattaattccttcttctggatttgcaccttgttcatgagatgttgcagcaggtgttgagttgtatttgcatgaggtgaggatgtcaagttctgactttgatgttcactaggtaactccaacaacatacgctttcgtagaggtgaagcttcaccttcactagccattagagcggatcacagtttttacctgcaattaaaaattacgacattagagtagccattagagctggactgctggtgcattacagattcgtgctggtgcattacagattacattagtgtgcgtctgtgcagtgtgccagt

SEQ ID NO: 31929 - DNA, 1844 bp, Zea Mays
cccccctccgctctctatcgcttgctctagccgatctatgtgcatggggctcaacgactggaacaaatcctcgtcgatgctcagggatggttttagggtagatggagcatcccctacatgtgtcttccatgggatggcccaactgcagatctgttcctgggatactacacaatgactacattgcatactcggagctgctcgacaggagcgtcgtcggcggtgctgtaaacatctcctagagtcctcgggcacaagaaggtcaggcggtgatgccaatgcagatcatccaatcagatccagaatgcctgccactgtatacttggagctgctcgacaggagcgccgttggcggcattgcaaacatctcctatagtcctcgggcacaacaagctcctgacatgcagttgtagcttggctcgaggcgggcatcagcgacgacaaacatcctgctcaatttgttgtatgataaatactgcgaaacaatgctggtgtttcataagatgaccgtgcagctcatgaaaatccagagggtggagtcgagcgagacgacgtggccggcgcggcgccaggtcgtggcgtgcgccgctgtttgctggtcgtggcgtgaggtcaccaaggaggtggtgaagacgctcaaggagtgcggcaggatcaccttccccatgtcccttaagcaggtcttcacctttgcagaggcttatgattttgaagatctagaatctatggttgaagaaatagccaaagcattcaagacaaagataatgtttatatatgttgacactgctgaagaaaaccttgcaaaaaccattcctcactctttatggcattgaatcagaaaaggcctactggtccagttcttgaaagggtgggaatgtgtccaagaagacaaaggcatcgacccgccaattcttcgctacaaattaaaacagcactagggtgagatcagtgggcttgagagtagcatcatccttcaaacatgatgatgggtttctagctgatggtgtctctatagctcactggtatccttcaaaaagaaacttcctggaaaaaatgtcttttgaagctaatcttgctccatacagctaatcttcacatctttcaaagcatttgctagggccccttcggtgagcaatagaatacgacttgcgctaccaaagcgtccataggttgaggacctccatgacacctatgttggtgtgggttgtgccgccccatcgtgaccgtcatcgattgggcctccgagtccaggagaagacctccgatgaagaaagagacatgctgcacatgcacgagggtacttgcagatagatgtcggctctatggacgaacactcgaccaagtcagatgaggagtatgagggcctagccatgcgagacatgatggctaccggtccaacaatgagcagcaagctgtgagttaaagatgaactcacctgtcctggagagcaacatccataggagtgaggcaaaatggcgggtaccaccacaacatggacccgttcctgaagatgtccaaggaggtggtagccgacaccataatgtcttgcgcgtcattgtgtcaccggccggcaacacgctgcgctggtaccggcgggtgttatgtttcttaggcgtatgtttctgtgctttgagctgtgctatagactggttgtgccaactactgattttaaaagaaaaaggtgagctgaaaatcattgttgaaaacaaacatgtaacggttcgttctcatcagttgtgccaactaccaatcatttcattgatcagaatctgtcgttgctcatgagaaccaaaagtaagacacttcttaataacattggatgcaaatttctgctagcttatcttcact

SEQ ID NO: 31930 - DNA, 3809 bp, Zea Mays
ggtgctgctcccaccgcgagcaaggtggtagctcgcgccactgcacaaacagagactagtccaaagcaccataacgagagagagggagagagagaaagagagaaaaaaaaacactcggaaacgatccgcgaactagtccaccggcgatttgttgttttgttcttcagtgcgtcagccaaccttaactgctacgatcggtcgatcaagggggaggaagtttctggagctctgcccatggcgtcggcgatgaagctgctggggagatcttccttggcgagccctgctgccgcggcgcccggacgggagcggcgaggcgggccctgcttcgccgcggtcggaagggaggggagcgcgcacaggaggaggtcgtcgctgaggtcgaccgcgccggtgggcgcgctggccgagcgggtcgtggtgacgccggcgccaccggagagggccggggcgggccccccggagccgcacccccagagcgtggccgcgcgggccgtggtcaccgtgcggcggaggcggaaggaggacgccaagcgccgggtcgccgagcagctggacgcgtacgccgaccgggttggccgcagtgtcctcctcgagctcatcagcacggagaccgacccaagtaagaaacagttccgtgattccaccatccccgtcgccgcccgccacgcgatggcatggaattccaagacgcatccggcgttgcgttgcatctttgaattgtactggcagtagcatagattgattccttctttctttctttcccttttcttcactcgccgctcttcttctccgttcgctccaccgccaccaccaccacgtaccttcatggaacccgcggcgagaatattccagctggtgcgccttgacgtctggtgcctttgtctccgagtcatcatttccaaatggaccatcacgtggagctgtctctcttgatttgaatatttgatttgtgcccaaagccgccgtctttaccatctcgtctgcgtcgaaacgaagatggagttagtacgcaattacgccaggcgaggcatcgatcttaccgaatcatcgttgaatcggtggcaggaaaggggggccccaagaagagcaggcgctcggcgctggtgggctggttcgagaagaaggacgtcaagacggagcgggtggtgtacacggcggacttcaccgttgacgggtccttcggcgagccgggcgcggtcaccgtgctcaaccggcaccagcgcgagttcttcatcgagagcatcgtggtggagggctttccctccggccccgcgcacttcacctgcaactcgtgggtgcagcccacccgcgtggaccgcaacccgcgcgtgttcttcaccaacaagccgtacctgccggccgagacgccgccgggcctgcaggagctccgccgccagcagctcagcgacctgaggggcgagggtgccgacaccggcgagcgcaggatcaccgaccgggtgtgggagtatgacgtgtacaacgacctcggcaacccggacaagggcgccgagttcgcgcgcccggtcctcggcggcgagcagcagctgccgtacccgcggcggatgcgaacgggccggcccaagaccatcacagacgaccgcgcggagagccgggtggagtacccggagcccatctacgtgtcccgggacgaggagttcgaggacgggaagaacgagatgctgtcggagggcgcgctcaaggcgctgctccataacttcatgccgctgctggtgagctccgtgtcgcctgacatccgcgacttcgccggcttccacgacgtggacaacctcttcaaggagggcctccgcctgaagcaggccctgcaggaccagctgttccagaagatccccttcgtgcgcaagatccaggagaacagcgagggcctcctccgctacgacactcccgacatcatcaagaaggacaagtttgcttggctgcgggacgacgagttcgcgaggcaggcgctggctggcatcaaccccgtcaacatcgaacgtcttcaggcgttcccgccgatgagcaagctggacccggccgtgtacggcccgccggagtcggccatcacggaggagcacatcatcggacagctcgacggcatgtcggtgcagcaggcgctgcaggacgacaggctgtacatgctggactaccacgacatcttcatgccgttcctggaccggatcaacgcgctggacgggcggaaggcctacggcacgcgcacgctcttcttcctgacggccgcgggcacgctgaagcccatcgcgatcgagctgtgcctgccgccgatgaccgacgggtgcgcgcgcgccaagcgggtgttcacgccgcccgccgatgccaccagcaactggctgtggcagctcgccaaggcacacgtctgctccaatgacgccggcgtccaccagctcatcaaccactggctgaggacgcacgcggccatggagccgttcatcatcgcggcgcaccggcacctgagcacgatgcaccccatcttcaagctgctcaagcctcacatgcggtacacgctcaagatcaacgcgctggcgcggcagatcctcatcaacggcgacggcgtcatcgagtccgggttcacccctggccgctactgcatggagatgagctcgttcgcgtaccgggagctctggcggctagaccaggagggcctccctgccgatctcatcagaagaggaatggccgtggaggacccgacgcagccgcacggtctccggctgctcatcgaggactacccgtacgccaccgacgggttgctgctctggtcggccatcaggcggtggtgcgacgcctacgtggccatgtactacccgtccgacgagtccgtgcagggcgacaccgagctgcagtcgtggtacagggaggccgtgcacacggggcacgcggacaagcgcgacgcgccgtggtggccgcgcctgtcgacgcccgcggacctggcgtcgctgctgacgacgctgctgtggctcacctcggcgcagcacgcggcgctcaacttcgggcagtacccgctgggcggctacatcccgaaccggccgccgctgatgcggcggctggtgcccgccgagggcgacccggagtacgcgcacctggtggccgacccgcaccgcttcttcctgtcggcgctgcccagcctgacgcagaccaccacgttcatgaccgtcatcgacacgctgtccacgcactccgccgacgagcagtacctcggggagcggcctgatgaggcgtggacggccgacccggcggcgttggcggccgcgcgcgagttcgcggacgaggtgcgccgcgccgaggaggagatcgaacggcgcaacgctgacactggccgccgcaaccggtgcggcgctggcgtgctgccgtacgagctcatggcgcccacgtcggggccgggcatcacctgccgcggcgtccccaacagcgttaccatttagcctctcagtaccgacagacagccatgggcgcatgacagagatgatctgaaaggagaatttttttccactcattatagtcgggtggggagaaatctaagcagaagcaaatgaattttgcattatttctccccccattgccaaattgccattgatttggtggtccgaacaggtaaaatttgatttttgactaggggcaagactgtgaggaactgaatgggtgtaaataatttgttatatacaaaaatcaatggaatataatcattatagagttctctggataaagcaatgtcgttatacagaaatgtttgctatgctttgtattgctcaacctgtgttttcttcaaatactacggcattcttaccggcgacatt

SEQ ID NO: 31931 - DNA, 230 bp, Zea Mays
caaaagtggtaaaacacattcatgacccagcaggaacaaaaaatgagataagtaactcagcccacccccaaaaaaacgctcaaccaacaagagaagctagaacatagtaattctctagacttgaccctccctgattaagaacattattaagtagtggttcctttattgaaggtgtagtggccgtgttgctacatccctcttttctcaaagcaaaaattaggtgcctgcat

SEQ ID NO: 31932 - DNA, 2413 bp, Zea Mays
tggcagtggcggggtgaggtgagagagagtgagactgtgagagtgagagaccactccatctctccttttactctcctctcccctcccgctcgcttttttcagcggggggagagaggccgcggcggcagcttgcagcaccagagagagagagagagcgagcgagcgagcaaaggccaacagatcacagctagctccgccccgccccgcctaccagagttttcaatttcaccgcgacgtcaaaagaaagcagcttttggtggtaatctcttggagcattgcagcggcgagcgagatctgccacgacgcgccagctcctgcagcggcccggcggccccggcctgccactgctactcatctgcgccgctggcagaggagctgccgctaccgctgccgccgcacccattgcctgcccctgcagcctgcccaagcagcaagcacaaagccccatcccgcatcaccctcaggctactccaaactactgcaccgtccactgtcgcccgcgcgcctcagccacgcagtcttatgcatcaatgcatgccctagcattctgcggcttcccccgtgcggcgcccaccgctggagagtagagacacgcggatagcaccaagaccagcgccggctacgtagctgctgctcggtgtctcttcagactcttcttactaggggggaaggaggaggaccaaggcaggcagtcggcagcgaggaggtgaaaagggcagcagctgcccgtgccgtaggagaggccgggcggcggccgcgtacgtccgttgcagcgcgcgcgcgcgcgctctggcctccgtgcgataccacgcgacgctgaatcgccgatcgacatgacgctggaggctctgtgcccgaccagcagcgacgtcctcgtctacgacaccttcaacgccgccgccgcatgcgccgctgcttctgcggggaccttccttttcggcaatgcaccaccggtggaggtgccggcggcggcggcggcccaggcgaacggggagaacagcgtgcagcaggggcggaggaagcggcggcgacggcagaggagcaccaagaacgccgaggacgccgagagccagcggatgacccacatcgccgtcgagcgcaaccgccgccgccagatgaacgagtacctcgccgcgctccgctcgctcatgccggactcctacgtccaccggagcgatcaggcgtccgtggtcagtggcgcaatcgatttcgtgaaggagctggagcagcagctgcaatccctggaggcccagaagctggcgctgaagcggcagctgcagcagcagcagcagcgcagcgtcacggccgcgatacgcgacgacgcggcgcagccggctcgaggccgtgatgacatcggcgcgggcgcgggcggggacgccgcggcgcgcagcgaggtgtcggcgccggagccagacccgcctccgttcgcgcggttcttccggtacccgcagtacgcgcggcggcacgcggcggcgcgggaggacgccggcgcggaggagacgagccgcgcctccgcggtggcggacgtggaggtgggcgtggtggtggacgcgcacgccagcctgcgcgtgatggcgccgcggaggcccgggcagcttctgcggatggtggccgggatgcaggcgctcggcctcgccgtgctgcacctcaacgtggccaccgccgcggtcgacgcgacggcgctctacacgctcagcctcaaggtacgacggcggcgcacactaccggacggatgggtagctagcaaagcgacggtccctttctccttccgtccacggacacggaccaaccgtcgtcgtcaaagcctcgttgcttgtcacacactggctcgttttcttgtgcctgaaatggtgctatcgccgtgctctaacatgcactttggtcaccaccggtgccactgcccctgagcaagtggaggaagggtgcgccctggcgacggcggaggagatcgccgcggcggtgcaccacgtcctatgcatcatcgacgccgaggcgacgccgcagaggctgctcgctgccggagcaccagggacagggcagccggacgtctagctagtcaggatgattcaggacgaggtcttcccggcgtaacggggcggcatgggctgcgcggggtgtctgcttccgtttcttgtaaagtgcagtggcgtgcgtgcgtggctggccagcacacgagagcctgatggcgtagcgtaggtacagagtatgtaacgggcaataacacgcaggttcgtgtctggacctgtggtctctcgttcgtgcatgcctatgcgtgcccttgtgtttgcgtgtgacgggaattggaattgaggacgggaagcaggaatgcaggaacagggaagggatcggacgttgttttcttcatgcgctcagcacaactgcgcaagggaaggggagccgtgctgaatcttgc

SEQ ID NO: 31933 - DNA, 7707 bp, Zea Mays
agatgaactgtgagaattagctatggaggcagttggagctgctgaaacacgacatggagagtggtcagtaacaagattacgttctgctgcacatggcactgcttatattgagagcttaagtttgggtgttggaccaaggggtgggcttggagaacagggcgattctgtctcttgtctgcttgttcttacaagcacttcacttgttgaaagacgtccagagaactatgaggtagaaattttgtcctcaattttatatgaattgttaaaactcttctccctcgagctattggcaatccaagacatgatatcaattttgagtaccaacaccctacccccgcctaacacaaacacacacaaaagagagcatatggctgtcatagtacgaccactctcagcagtaagtgctcttgttcgatttgtagaagaaccacagatatttgcatttgaattcaatgatggctgcccaattcatgtatatgcaagcacttcccgtgataatctacttgcaacagttcttgatgttttagaaacccagagacagtgtgcaattccagtgctaccaaggttaacaatgtctggtcatcgcatagatccgccttgtggggtagcacatcttgagatgccctatcatggttctgttgacatggagtcagcttccatgcacacaaaacatttggccgcaattgctaaagaggctgtagtgtcatctgacactgttcctggagcaaaaatcagattgtggcgtagaataagggagtttaatgcatgtgtaccatacactggagtgcccgtcaatattgaagtacctgaagtggtcgtactggccttgatcagtcttcttccaaccataccacatagccttcctgctgatgctcctcctcttctgcctccatctccaaaagcagcagcaacaataatgggttttgttgcatgcttacgcaggctacttacatcaagaagtgtggcatcacatgtgatgtcgtttcctgtcgctgttgggagaataatgggtttgcttaggaatggttcggaaggagtagcagctgaagctgctggacttgtggctatgctaattggtggtggtcccggtgattcatccatcttaatggatgcaaggggagaatcccatgccacctacatgcatgcaaagtctgtactgttctcgcaaccaatgtatgttccgatccttgttaacaggttgaggccaatatcggtgtcaccgttgttatctttgtctgttgtggaagtccttgaagctatgctttgtgaaccccatggtgaaacaacccaacatgctacatttgttgagctactgcgtcaagttgctggtttgcgccgtcgtttgtttgcattatttgcacatccagctgaaagtgtgcgagagactatttctgttataatgcggacaattgctgaggaagatgcaatagcagcagagttcatgcgtgatgctgccttgaaggatggtgctcttctgaggcatttactaaatgctttcttcttgcctgctggagaacagcgtgatgttagtcggcaacttgttgctctttgggctgattcctatcaacctgcacttgatttgctatcaagaatacttcctcctggacttgttgcttacctccatacacgttcagatgaagaatcacagagccagtatgatgaagcaccgttgagcagaaggcagagacgaatacttcagcagaggagggtccgtggtagtaaaagtatgtcagtacaagaacaaggggtaccccccaatggtgttgaggatggggaacccttcaggcacaccagtgcgggcacttatggagtagcagatgttcatcagaggcatgttggcccatactcttccacccactctcctttgccaggtataagcattgatccttcttgtgcagttacagtgccacatggttttgtacctgaggccctttctgaaaataatcatcaaattggggaaccacagctggattcacatgtttattcagtggactccaatgccaatggtgatcttgtgagctcatcgcattcagatttttcagtccctgcacaggttgtggtggaaaacactcctgtgggatctggcaggctcctgtgcaattggtatggattttggagggcattcagtctagatcacaacagagcagatttgatatggaatgaacgcaccagacaggaactgagggaagcattgcaagctgaagttcataacctggatgtcgagaaagcaagaacaaatgatattgtccctggaagttcagtcactgaggacgctggtggtagtgacaacttacctcgaatgtcatggaattatgctgaatttttagtgagctacccaagcttgtccaaagaagtctgtgtggggcaatactatttgcgactgctgcttgaaattggaagcaactatcgagcacacaattttccactacgagatccggttgccttttttagggctctgtaccatcaatttttgtgtgatgcagatattggtcttactgtggatggtgcagtacctgacgagttgggatcatctgatgattggtgtgacattgggagattagatggctttggtggtggtggagggtcttctgtaagagaactctgttcaagggcaatgactatagtttatgagcaacattataaagttattggggcttttgatggcactccacatattactgtcctcttagaccgaaccgatgatagggttttgaggcatcgtttgttactacttttaaaggtcttgatgaatgacctttcaaatgttgaagcatgtgttttggttggaggctgtgttttggctgttgatttgcttactgttgcacatgaaacatctgagcggactgctattcctttgcaatctaacctcatcgcggcaactgcatttatggaaccttcaaaagaatggatgtacattgataaagatggcacacaagttgggccacttgaaaaagatgcaataagaaggctgtggtcaaagaagtcaattgattggacaacaaaatgttgggcttctggcatgtcagactggaaagggctacgggatatacgggaactgcgatgggcactttctgtaagagtgcctgttttgactcccactcagattggggatgctgcattatctatattacacagtatgacatctgcacggtccgatcttgatgatgcaggtgaaatagtaactccaactcctagggtgaaacgtatattgtcaagtccaagatgccttcctcatgtggcccaggttatgcttactggggaaccaagcattgttgaagcagctgcctcattgcttatggctattgttacaagaaaccctaaagctatgattcgattatacattactggtgccttttactttgcattggcatatcctggttcaaatctcctatcaattgcacatttgttttcggccacacatactcatcaagcttttcatggtggtgaagaggcagcactatcttcatctttgcctttggcaaagcgtagtgtactgggtggactcctcccagaatctttgctgtatgtcttggagcgcagtggcccttctgcttttgccggtgcaatggtgtctgattctgacacaccagaaattatatggacccacaagatgcgagcagaaaaccttatttgtcaggttctgcagcatctcggtgaatttcctcagaaattggcacagcattgccattcattgtatgattatgctcctatgccacctgtgacttacccgaatctgaaagatgagatgtggtgccatcgttactacctccgcaacctatgtgatgagattaggtttcctaactggcccattgtagaacatgtggagtttttgcagtcattgttggtgatgtggcgtgaagagttaactcgtcgtccaatggatttatctgaagaagaagtctgtaagatactcgagatttctcttgatgatcttgtgcttggtgagaacggtagcatcaagcagtcatctgacttaagtttggctaattccggaaacaaaattgaaaacattgatgaggagaagcttaagcgccaataccgaaagctagcaataaaatatcatccagacaagaaccctgaaggaagggagaaatttgttgctgtgcaaaaggcttatgagcgattgcaggctagtatgcagggattgcagggaccacaagtctggaggctgctactcttgctgaaggcacaacgcatcttgtacaagagatatggagatgtcttgggaccattcaaatatgctggttatcctatgttgctaaatgcagttactgtagataaagatgacagcaattttctttcatttgataggacccctcttctgatagctgcttcggagctaatttggttgacatgtgcatcatcttcattaaatggagaagaacttataagggatggtggtatccccttgttggcaacacttctttctcgctgtatgtgtgttgttcagccaactacaccagcaaatgaaccagctgcaagaatagtcaccaacataatgcataccttctctgttctcagtcagtttgaatcaggaagagttgagattcttaagtttggtggccttgccgatggcattgtgcattgcacagaacttgagtttgttccctcagctgtggatgctgcgctgctgacagctgcgaatgttttggtttcatctgagttgcaaaatgctctgctcagggctggatttttatggtatgtgctacccctgctgcttcaatacgattcgacagcagaagagaatgagacatgtgaagcacatggtgttggggcaagggtgcagattgccaaaaatctgcatgctgttcatgcaactcaagctttgtctaagctttgtggtctcagtggcgatgatatcctgtacccagataacaaacctgcatacaatgcactgaaggctcttcttactccaaagcttgctgacatgctgagaaaccacccacctaaagagttattatcaaatctaaattcaaatttggaatcaccagagatcatatggaattcatccaccagaggggagcttctcaaatttgttgaccagcagcgtgctagtcaaggccctgatggttcatatgatttgacagaatcacattctttcacctatgaagctttatctaaagaattgaacgttggtaatgtatacttgagagtttacaacaaccaaccggattttgaaataagtgaccaggaggaattttgcattgccctgcttaagtttatagtagagttagtactacagtggaattccattaatttggagacgattcatcaacatggttcagttactgaagcatctatgtctggaaatgatgaagtcagtgattcaactattgaaggaaaaatggataattcatcaggaaaacaaagtacagatggagattctgaagttattataaacctccaaagtggactaacatcacttcagaatcttcttacaagtaatccaggcttagctgctgtttttgcttccaaggagcgtctgattcctctttttgaatgccttgcactgcatgttccttctgaaagcaccagcccacaaatctgtttaagtgttctttctctgttgactaagcatgcttcttgtttggaggctatggttgcagaaaggatgagcctgattttgctatttcagatactccactgcaatcccccttgcagggacggagctcttgctgtactgtattctttagccagcacaccagagcttgcctgggcagctgccaagcatggtggtgttgtttacattcttgaacttatgttgccacttcaagaggaaatccctgtgcagcaaagagctgtagctgcatctttattgggcaaacttgttgggcaaccaatgcatggccccagggtagcaatcacccttgccaggttcctgcctgatggtttggtttctgccattaaagatggacctggtgaagcggttgtttcttctcttgagctgacaactgaaactcctgaactagtatggacacccgcaatggcagcttctctttctgcacagttggcaacaatggcatcagacctctatcaagagcagatgaaaggacgtgttgttgattgggatgtacctgaacaagcttccggacaacatgtaatgaaggatgaaccacaggttggtggaatttatgtaagactttttcttaaggatcccaagtttccactgagaaaccctaaaagattccttgaagggctcctagatcagtatgtctcctctgttgctgctacacatcatgaagcaattgctacagatccagagcttcctttgctactgtccgcggcattggtttccttactacgagttcatccagtgcttgctgaccatgttggctacctcggttatgttccaaagcttgttgcagctatggcttatgagggacaaagggaaactatggcatctgggcaggcttccagtggatcgcaggcagaacctggtgaacatgacaattcatctcactctgaggccactgtgcagactccacaagaacgtgtccgccttagttgtttgcgtgttctgcatcagcttgcgtctagcacaacctgtgcagaagctatggcatcaacaagtgcaggaactcctcaggtcataccactgcttatgaaagcaattggatggcaaggtggaagtatactggcattggagacattaaagcgtgtagtcggtgctggtaatcgggctcgtgatgctcttgttgcacaggggcttaaggttggtcttgttgaagtgctccttggtattcttgactggcgtgctggtggaagacagggactccgtaataaaatgaagtggaacgaatcagaggcttcaattgggcgtgttttggctgtggaggtgcttcatgcttttgcaaccgaaggtgcacactgtgctagagttcgtgaagtcctgaattcctctgatgtatggagtgcttacaaagaccagaagcacgaccttttccttccatccagtgcacaatcttctgctgctggagttgctgggctcattgagagctcgtcaagattcacttacgccctcgccgcaccgccatcttcttctctctctccaccatcagctccagcaaaccctagtggacggcaatattatcagcattcgtagtggaaaacgaaacacttaatctctgctccttggagtatgaccatgaaggcaccaccatggtaacgatttgtagagtgaggccaccttgagtgggcttgttactgtcaccaaatacagctcgtgtctccattcccaccaatgagcagctgatcagttgcccgcatttcagtacatagcatagcatagcataccattgtacagttttccattacataagggtcggggtcggttttgtgtgtgtgttttttttttgtaaagcatatgattttttttgggtaccatagatgtccatagaatacgcgagctgaatattgtatccattcattactgggttgatgcactcccttgttcggatcacacgacttacttgtgacgagagaaataaatgttttttttgcctttgtttgatgagcattttctggtgtcagttaaccttttacagtcatattgtcgtgtatgaccaccgagtgtgtgtaggttttatatagcctgtccgtcactacttttggttagagtttgctatttcatttgtaatgaagttgtttgctgacacctttgcgtgtaacaaaagaaaagcacacaaaaaataacatgctccctcagcc

SEQ ID NO: 31934 - DNA, 4041 bp, Zea Mays
cggggatgttccagcgcgtcgtcgtcgtccgattctgtctccctcaggtcgagattcgagagttcccgtgttcgtccatccgcgctgtgaggttctccgatggccgagaagtcacccagctccgcgccgcagggtggttctggtgggaatgaatcattcgataatcttgtaattcaagctccacagcttatgagggaggattacatacagaatgctgtgaagtttctttcacatccgaaagtgaagggttctccagtatttcacaggcgttccttcctggaaaagaaaggccttacaagtgaagaaattgatgaggccttttgtagagttcctgaccctaagccaaatggaacagatgctgtagctgctggtaggcaacaagcaaacaatcccagtcaatctgttgtgctgcaaccttatacagaagttcaaccacaagcagctactgcctctgccactgctggaccaattgttccacatacaaaggcacagttgagctgggtaaacacactccttggtgcaggtctttttcttggtttaggggctagtgctgccataaccctaaagaaattggtcatccctagtctgaaatcttggactcgtagagtcgttgctgaaggagatgaaaatgcaaagagtgaacatacttccaaactttgtgaagaaattagggaagccataaaagtttctgcatcagccttttctgatattgctaaaataaaccaagaagtgcttgcttcaaaagatgaagataggaaggtactcatgaagttaacagaagcattcgagtcacaagaaaatgtgtttaaatcattgagtgagaccttaaatcgtatcagggagaatcagctttcggattgcaatttcagaaattttgggctgctcaattcagccctcattacccttttgccaaagcttgagggtgcagcccttgtgaaggacttccgtccgatcagcctcatacatagcttcgccaagctggtaacaaagatgatggcaaataggctggctggacacttgggtgcaatggtttcacccaatcagacggcttttatcaaaaaaaggttcattcttgacaacttcatattggtgcagcgtacggccagatatctccatcaacaaagacaggctcgtatcctcttcaagttagacatttctaaggcttttgattcggtgtcatggccgtttctcattgaggttttgaggaaaatggggtttgggcagatttggtgtgatgttgtgtgtggactgttggcttcttcctccacaagaattttgctaaatggcgttcctggggagatcatttcacaccagaggggccttaggcaaggagacccactatcccctttgttgttcattttggttatggatgttctgaacttgctcattcaaaaggcttccgatgaagggttacttcagcagctatcttctgggactttacatcacaggctttctctctacgcggatgacgcggtggtttttcttaggccggtggcttcagacatcagcttggtcctggagatccttcggctttttggggaagcctcggggctcaagaccaatgtcctgaaaagtagtgtgttccccattcgttgtaccgaagatgatttgatgcgggtccaagcttctctcccctgccccatttctgattttccgtgtcaatatcttggactgcccctgtccttgggaaagctttcaaaggcccagttacaggcattggtggacaaggcagctagtgttctcccaggttggaaggccgacctgatgacaaaggcgggtcgtgctgtttatgttcagtttgttctcacggcaaaaatgatttatgctgcgatggctttggacctccctatttggaccatcaaagctattgacaagataagaagaggtttcctttggaaaggaagaaaacaagccaatggtggtcactgtttagtggcgtggggcaaggtcactaggcctaaagttctgggcggccttgggatcactgatctttggcttttgagcgtggcgcttcgagctaggtggccttggctccagagaaccgatcactctaagccttggtcggttctccctgttcaggcatgtggtgcggtggaagccttgatcaatgttgcagttgtgtctcaattgggtgatggacaggatatcctcttttggaaggatcggtggctgaatggtagaagaatcagtgaggtggcacctgaggttcttgagcatgtacctaagtgtgttgtttccaaaaggctggtaaaagatgctttaacaaatctgaattgggtggctgatataaggggtgcgctttcagttagggcgcttgcacaggttttggatctctgtgacttgctggagggcttagttcttcaacctgggattcctgataagcattcttggaagttcagcgcgtcgggggattactcctctagttctgcctaccaggttcttctccttggagctgttgaatttaggccggctgaacggatttggaagacctgggcaccaaggaaatgcaaattttttatgtggctggttgtgcatgatagatgttggacagctgacaggttggcaaaaaggggaatggatcatcccgtctgctgtccgctttgtgaccaggcggatgaaactattaatcacttattggtcgagtgcagctttgcgaagcagttttggttccttttccttcggtctggggacttccaggtgctctgtccctctacaggggatggctgctttgactcttggtgggagaagagtgccgaggtggtgggcaagcctttgtcgggtggtttcaactcgctggtcatattgggtgcgtggtcgatctggaaacacaggaataggtgtgtgtttgatggttgtagcccgaatgttgaggtcgccctttcggcagctagggaggagttgatgtgctggcgtttggctggcgctaaaactctctctttcttccatttagaggagctgtcttaggcgttaatggtggtgtgagtttgtaaaactgttgtttctgttttggggttccccccttttttcttcttaatataaaaatacgcagacctcctgcgtattcaagaaaaaaacaacacagcctattggaagagcatgttcagccttcatcatggaacgggccaattgactatcaagggagagcttttcagcaaactaatatgtatgcaacaccaccaaacaacagttttgacacagggaggaactcattcatgccattagctgctgaatcttcttatggaccatttccaggatcctactctgagcagcgggtgcagaggcctggtggatacggattccagcaacagacaagcagcgaccgattgaatgttgttggcccacggagcagctaccaagggggttcttctaatcaccatgctggtagtaatgccatggatgacccggcagcggttgcagcagaattgcagcgccgctgggttcccccacagccaccaggcgtcatcatgccagaggctgcggccgccatccgacaggccaggtcggttccgaggcagctgccaagcggcgatgggcgcctgggcgctgatgtcccgagacagcctgagcctgccattgccatggcgacaacagagcacgtgaacgttgcccctgaagcacctggcggggagttgccaagcgatggtggtggtgccatgactgctgatgccagcaacggtggtgggagtggagagcagcaggagcaggaagcctcttgagtgaagctttttggacgccctttgatttggttctttgagaggatctagcttgcacctgtacctgtgtgtgtagcatatgcatatgcatctgcataggtttgtgacataatgtgcctcgtgttcgaaactgcagctgtattgtagatatataaactgatcaactttacacgtgtgttacctgtgtgttctgtcataagtgtatcagctatgaggacgtatttgcttcggcccatgctaaaatattcgcaaagtttgggccaagcatgggctgaactgagcattctaatcagcaatggcccaattttgagccatgtgctttcagata

SEQ ID NO: 31935 - DNA, 6762 bp, Zea Mays
cgcattcgcatcgcacgcgcggcgcgccaggggagatcattcacaggggcaaggctaccactggagggggcctacgcagcagtgagaggcttctacagctcgtcgtacccactcctcttttctcactctactactagactggtgtctctctcaccccaaggagagtcgcagcgacccagccttctccctccctctctctcctctctctctcttcttgcgccgcttttccttcgctgctccgcgcggctccggcgggcggtgcgggaggaagaggagggggcggaggggccggaagttttccggccgaggagcccagcgggaggatcgaagaggaggcactggtccggggctgtccactgcatcgggttcttcgaagttggggggaccacgggactcgaagggagcgcccgatctgctccgccggcgaggtgaagtcagctgatatgatgtacctcatttggataacaatttgactggcaccagattttacagaaatatgcaggaggggctagggcaaaggatgcatgtacctcatggtatcaatctgtgtatcgcaacttcttccatgccctttcaggcgcaatctttcattgagcccagtaccggacaagtgaaccctcctgtaacatctgaaaacttatctgctaactcacaagctgttaatgatgctggagcagttgaaggtactgacatgaacgaaaaatcggttcaaaaacctaagaggaaaaaacataggccaaaggtcattaaagaaggacaatcagcaaagctgcagaagcctaaaactcccaagcctcccaaggaaaatgggaatcagcctactggaaaaagaaagtatgtcaggaggaagggactaagtgcaccagctgaacaaattccactatgtgctgatacacacactagagctaaaccaggagtagtccaaagatgtttggactttgatgtggaggaccagcatggacatttggatctggtaccgcaaacccaggaaacagagatacagactggtcctgcggacacacaaccatcaatatctggagttgaaagaagtaatgttcaaatatcataccattggggtggtacaagcagttctattagttcagttgacccaatagctggtatacacggattacaggcagactgcaattctaaaagagtcagttttgatctgaacaattctatagtaagtcagctgccaaccaattattctagtccaatggacagctctgaacaatttttcaattttgatttaagagaagaagttcgaacaaaccagttattgcctcatctaaccagctcggtagatcacacacgacacccctcggtcaattttgaccaatacataagcacatctcaagattgtccagaaaaatcacccagacattatcagatggtcagtagttatagaattctagaaaatatgacaacagcttctcagtataccgaaagggtgtctatggggggcaatttcaaccctgaagcttgtatgggcgaagatgcaataatcaaacaaatggcccaaagctatagacctctagaaagtccatttgtacctcccaatcataatgaaagggatatgatgaacggaaatctgaacgagtttcctgtgaagaatgattacttgaagttttctaccaatagtaactaccaaactggagcaggttttgatcattgttctccagactattcagatgttcttgcaatgggtacaaaaagagaacatgatgctatcagtggccatcagatttctcttggcattgactttattaactcaaatagaacaaggaagttctgtagtgatgaccccctttccactagctctcaaacatcttactgtcctcaatcatgcaaaaggatgaggccagaggatcatagcaatcagctccatggaactatgggtaagctttcttccgcatcagcattttctgatggtttgaacacaaataaagtttcagctatgaaccctagaattggtaccttggctgacgtacaattgttgatggcccttgagaaatcaaaagcttcacaacaaatgtttgagtttgactatgttacgtcacaaaataacatgatccatgaacgtactgggcttgctctgcaaaatattgctgacaaaggatttattgctctacctaataaacagttcccaagcttcgctgcacagaacatacctttgcctggcagtactgtgaaccaattgggagaaagtaataccttgaggaatggagtgcatcaaattcaaccttgggaaattacatataggctacatgactctagagacaatttttctttaccagggaacacacagttctcgaatggcacagtgaatccatcctcagaaaactatattcagagtaatgctattcatgaacatcaatgcttagaaaacgttgtggctaaggtgccagttttgtctgaaacacaaaatacttccactcaagagggccataaccactgcactgctgctactactgatgagcatatcagaactacaagtgatgaagttgttagatccctcacccgacgtgcaagccaaccaactacaaatgggaactacaatattaaatcttctagagtaactgcagaagcaaactgcactgagaagccaagaaaaaggggtcgtccaagaaaagtagtaaaccccaatggggagccaaaagaaagaggtactaaagggaaacaaaatgttggtcatgcagaacttatatcaccaaaaggttcatgtgctgactttttaaaaactaatggtattacttatgcttctgaatcttccactggaattactcctaggatgtcaactgtggagttgaaaagttctgaccaagataaggagattcatggaggtgccatgcctcaagctacagcagcatcagttgatcctttagatggcataattgaaaagattaagctcttaaccataaacggaccagacaagggtgtgtcagaggtacctaaaaatgctcttgttccttatgaaggtgaatttagtgcactgattgcatttgaggggaaggcaaagaaaagccgtcctcgggccaaagtgaacatcgatccagtcaccactatgatgtggaacttattaatggggccagatatgggtgatgatgccgaagggttagacaaggataaagagaagtggcttgatgaagaaagaagagtgttcagaggacgggttgattcattcattgctcgtatgcatctagttcagggggataggcgtttctctcgatggaaaggatcagtcgtggattcagtcgtgggtgtatttcttacccagaatgtttcagatcatctttctagttctgctttcatggcggttgctgccaaatttcctgttaagatagaggtccctaaaaaacctgtggctgagatgtctcatactcctgaacagaaggatagttgttctggactgtttggtgattctatcaaattgcagggcaatatatacattgaagagataagtgacattaaatcgttaattactacagaagataatgaagaaagtaataataacgaattgattggaaactctgctgggaatggagtaaactgtgcaactggaggatgccatgtctcttatagtaagtcactaactggatcccatggaaatgggctatcaggatctgtttttccaactaccggcttttcaggtgtggtagaaactgaagatggatcactggaggatgttatttcttctcaaaattctgctgtttcttcccagaattccccagattatgttgttcgtagaaccgatccaataggttctagttcgttacaaaatttcactgaagagggctgtattatgagaaatatgtccaatgggactggcatctctactgactatacattgtttctgccaattcaagatccaaaaggcatgctcggattatcagaatattgtggacttaatcctcttccagtttcaggtgtgaacaaggacatgttgcttgatctaaacagatcatatcagccattacatacttatatgccctatgatcagaatagtgagtctgatttcacaggtgtgtcatgtttgaaccatatgggtaaatcattccacacaggccctgataaagtgaatctttccagtgttacacagtctgaggctagtctttaccctattgatcctttagaacaaggcgacttttcaccactaattaaacaaaacttccaaccattacatagttcagacgaagtgccatttttcaaggagcactcttcatgtaatgattttttgaggaacaaaactgaagctcattttctggaaccacttgtctgttcaaatcctcaagaggtgtacacaacctcaacagatcaaatgggtgctgaacaatctcaatcaggatgtggccaaaagtacaatgatgccagagttcagacagcatcacatgaaaggcatcagtcttcaaccttgtgtgataaccagaactcttgttcggtggtgttgcaaggagttgcttcagactcaacacagaagttcgttgatactcaaaaggggccgtcaaaagctcgacaaaatggatcaaaagctaaggtacggggccgacctaaaaagaaaactgatgactgggacagtttacggaaaaaagtgctttctaatggtggggacaaacaaagaagtcatgatgcaagggatactgttgattgggaggcagttaggcaagcagaagtacgggaaatatctgaaaccatcagagagagaggaatgaataatatgctagcagaacggataaaggaattcttgaaccgattggtgacagaccatggaagcattgatcttgaatggctaagagatgttcaaccagacaaagcaaaggacttccttctaagcattagagggcttggactcaaaagtgttgagtgtgttcgcctcttgacactacatcatatggcttttccagtggacacaaatgttggtcggatatgtgtgaggcttggatgggtgccacttcaaccactgccagagtctcttcagttgcacctcttggaaatgtatcccatgctggagcacatacagaagtacctctggcctcgactatgcaaactagatcaacgtacattgtatgagcttcactaccaaatgattacttttggaaaggttttctgcacaaaaagtaagcctaattgcaattcatgtccaatgagagctgaatgtaagcactttgctagtgcatttgcaagtgctaggcttgctcttcctgcacctgaagaaaaatgtttggttacattggaagatccaaatgttgtagagttttctcaccaaacatacataaactcagggagtgttggccaacttgagtggagtgcaaattatcctaaacatgctgtttctggtaatcatcagccaatcatcgaggaaccactgagcccagaatgtgaaactgaaaatatagaggcacatgagggtgcaattgaggatttcttttgtgaagaatctgatgaaattcctaccattaatcttaatatcgaggagttcacacaaaacttgaaggactatatgcaagcaaacaatgttgagattgaatatgctgacatgtcaaaggcattggttgccatcacgcctgatgctgcttccattccaactccaaagctcaagaatgtcaatcgtctgaggacagaacaccaagtttatgaactgccagattcacaccctcttctggaaggattcgaacagagagaaccagatgatccctgtccatatcttctttccatatggaccccaggtgaaactgcacaatcgatcgatgcccccaagacattctgtgattcaggggagacgggtagactatgtggaagttcaacatgctttagttgcaacaatatacgagaaatgcaggctcagaaagtcagaggaacacttttgataccatgccgaacagcaatgagaggaagcttcccacttaatgggacgtattttcaagttaatgaggtatttgctgaccattgctcaagtcaaaatccaattgatgtcccacgaagttggatttgggacctcccaagacgaactgtttactttggaacctcagttcctacaatattcagaggtttaacgactgaagagatacaacgatgcttttggagaggatttgtttgcgtgaggggctttgataggacagtgagggcaccaaggcccctttatgcaaggttgcattttcctgtcagcaaggttgttagaggcaaaaagcctggagcagcaagagcagaagaataatagtacattgaagaaatataggggtgctaaccagacgaggatggatagcccgaaatgagatgctgacccaataggtcgccaaatcacctccaaattctaacccaatgacttccatctgtaatgaatggcaataccttgaaaacctgtgatggagatgttttgtggcgacatgatctcttaaattagattccgtctttggtaacagcctagctgttcttgttgagtcgcatattctttattctgaagatcaatatagcaaatgggagaaaaaacatagtgcacagtcgagctgttctaattgtacctcttgtgagtggaatcagttgttgtacaacaggaagatggacctatctgtacaatggtcgtacatgttctttgatcatagtataaacaatgtaagcctcatcagccgttatttgattgtttcaaaacaaaggaaaagcattttcaattcatctgttcaaagactatttccttttccccccttctatcttgagatggaaactgactaattttttacttgtggggatctgacagtgaatatatcaaaa

SEQ ID NO: 31936 - DNA, 190 bp, Zea Mays
atgcctctaccgttttcattttcatatttaacttgcgggacgaaaacgaaaacgggatatatcggtaacgaaaacgaacgggataaatacggtaatcgaaaaccgatacgatccggtcgggttaaagccgaaatcggacgggaaccggtatttttgttcgataaaatcataccatgaaaacatatattcc

SEQ ID NO: 31937 - DNA, 667 bp, Zea Mays
aactggtccatggtgatttgagtgaatacaatattctatattttgagctttggactttctgaaggaagattgcttgcatgtttctgacttctttaaaaaacgtggtgttcctgtcatgacagtaaccgatttgtttaattttgttattgatcaaagcatttctgatgaaggtgttgatgattatctggaaaaggctcagcaaaagattttggaaaacggtggtgcggttccaaatgatgatgaaattactccaacagtcatggtgcagacgttggactacgtgaagcaatgtgaggcagatattgtcaacatgtcaataatgcaacgttcatcctctggctatgagccaaccgcagataagctttatgaccagccattgttaggatttgtgcggactaaaaacacacacactgaaaaggagcaaggacaaccggcacgaaacttagttgaggttgaagaagacgagagcgaatcttgctcgagttctgatgaagatgattcgtggcacgaggatgatcctaaggtgggacccgaggaaaggaaggctgctcggaaggaaaacaagaagaaagtgaaggaagagaagagggaggcccgcaagaccaagatcccaaaagctgagaagaagaagaggaagaaaatggcaaaggcaaaatgcaagcggtag

SEQ ID NO: 31938 - DNA, 1464 bp, Zea Mays
cgcagcagcacagctcgccgcctcgccgtctcttagctgaggcgtccgacgccaccgcccccaatccggtggcgctcctccgtccggccctgcgcggcggccgtggagcaggagggcggcgccgcgggggaggccccgcggctggtgctgcacgactccctcgactccgtgggggtggccaccgcgcacgctagggcggcgcgggaggggttcgtggcgcaggtggggcggctcacccgggtaagtgcggggagcagcatcgccatcagccgcggccctgacctcgcccgcgcagcgctctgcgtcgctgccgaggacgactcgctcgtctcccactcctcggtcccgctccccgtagatgccttcatcgcgcgcctcgacgacctctccacgggcttctgcgccggcgggaacttcccgccctcgggtgcgccgcccgaggtcttcttcgattaccttaaccgctacctctacgtccataaggggtttcggagaacaaatggagtgtcagatgtgcggattatgtaccttcactcggtcttgacatgccgttctggatcagctctaatgcttgcgttaatatattcagagatattgaagactgtacgaacatatggcttactggattttgatgcagagattttctttccaaatgatctcaatagcctccctaggggctatgacaaacaaaaaagcaaattggtcgatgagccacatattatgacttcaaagtcacttttggttgagcgtggccctggtactttaggtgataaccaagcgaggtcatatgggaacacaagtgccattgagatggctgctgctaaagctgctcagcatagattgatgcgtggagtatggactaatgctcgttttggtgatatgcgtcgtgctttagcagcttgtgagcgactgatactactgcatcacgatccgcatgaactgagggattatgcagcccttctgtaccactgtgggtactatgaagactgcctacactacttatcattgtaccaaactgcaaagtctgggaaatccccaaccaatcgattggagatcttggaggacgaagctgtgaatactctcaaagcgcggttaatgcttattttagcagaggatggctggagcagatgtagacctgtggcaaggtactggaccaagaactctgagccgtggtaattagagctggccaacgttgcggctgaagcaaataactacagattgtacatagcattttcaactgtggatatgttgtacagtcacttggtaatccatgcgggatgtgaatcaaattcctaattttatacaacaccgcgttgttgctttatctgagattcgcagggcttttttatatttttgaataaatttgatacaatacaacaacatcctcaaatctgtatctacattttttagtcaaacaatattatgttacagaactatcagttttccgtaagttctttcaggcac

SEQ ID NO: 31939 - DNA, 574 bp, Zea Mays
ggtctaaaaatggggacaagatagctcactctttaaggccttagtctagctcctgcgcaagctccacattcttggaacggttccaaagataccctatacgctatatatttgcagttatattgcatactgttcgggattcgatgagtacatgaacttggtcctcgaagacgctgaggaaatcaacgtcaagaaaaacactaggaaatcacttggccggatactcctcaaaggtgacaatataactttgatgatgaacagtggcaagtgaagattcttatggcaggaacgatgtttggtgctcgcttcgattatctgtgacacaatgtactccatccatccgtccagacttaaatgatgtatcatgtcattgtggtttagtgagagttgtataactacctgaggaaactcacgtgttactatatgctaagatgctgtgacggtgagctattcagtgctcacttgtgttccaaagattagcccgacttgtgtgtgccatgctgacatcttttctggtttcatactcagctttacgtaaagctttgctctgctcacgcttgccttttggaagctggga

SEQ ID NO: 31940 - DNA, 1387 bp, Zea Mays
gttccctacagcctttcccctgaaaaaaaaattaccccccggacctcctcctccgatcggcttcctcctcccagtcccgaaccgcacgcgctcgatttcccgcaccccctctagcctctagcggccatgtcgcccgccgccgccaccacaaccttcgtcgcaatctccatcgccgtccccaaccctaccgctccatcccgcggtcgcgtgcgccttccgctaggcggggtccccgctgctccacgccgcgccgtcgcctctatggcagtgtccgcccccaggtccggcgccgccacctcgtttctcgagcgccgcgagtcggagcgcgctctccactttgtcaaataccagggcctcggcaacgacttcataatggtggacaacagggattcgtcggtgccgaaggtgacgcccgaggaggctgcgaagctgtgcgaccgaaacttcggcattggcgccgacggtgttatcttcgtcatgccgggggtcaatggtgccgactacaccatgagaatcttcaactctgatggcagcgaaccagagatgtgtggtaatggagtccgttgcttcgctcggtttatagccgagattgaaaatctgcaggggacaaatagattcactattcatactggtgctggaaagatcgttcctgaaatacaaagtgatgggcaggtaaaggttgatatgggcgagcctatcctttctggactagacatccccacaaaactgctagctaccaagaacaaagctgttgttcaagctgaattggcagttgagggcttaacatggcatgtcacatgtgttagcatgggaaaccctcactgtgtcacatttggtgcaaatgagttaaaggtcgacgatttaaaacttagcgaaattgggcctaaatttgagcatcatgaaatgtttcctgctcgcacaaacacagaattcgtacaggttttgtctcgctcacacctcaaaatgcgggtctgggaacgtggtgctggagcaactcttgcctgtggtactggtgcttgtgcagtggttgttgcagctgttcttgagggtcgagctgagcggaaatgtgtagttgatttgcctggcgggccattggaaattgagtggagggaggatgacaatcatgtttacatgactggtcctgcagaggtcgtcttttatggatctgttgttcactagctggtcacaggtgaaacgacgagcgggcagcgtctaaagcatcatttcatggatcgtcctctttgaacgttcggtggtgtcaggtcaggctgaagcacaagatgtcctccatcacgtacccctccaaactggtaaaccgtctctagattatggtttctcgattaagaaacgatttgactctctctcgagatgttggcacgcgtgctag

SEQ ID NO: 31941 - DNA, 1480 bp, Zea Mays
atttgtgcagctccaagtgtgcacttgtctccaagatatgttgggggagagtttcggactactaccaatttgatgatttgctgactgatgaagagaaggcactcaggaagaaggtccgaggtatcatggaaaaggaaatcgcgcccattatgactgagtactgggagaaggctgaattcccattccatgccattcccagccttgccagtcttggtttagctggtggtacaataaaggggtatgggtgccctggactctcgcttacagctagtgctatttcgatagcagaggttgcacgggtcgatgcgagctgctccacatttattctagtgcactcctcgttggctatgtccactattgccctttgtggatctgaggctcaaaagcagaaatacttaccatctcttacccagttcaaaactattggttgctgggcattgacagagccagattatggaagtgatgcaagctccctaaggactgcagcaaccaaggtacctggtggttggcatttagatggacaaaaacgctggataggtaacagcacttttgcagatgtcctcatcattttggctaggaatgcagatacaaaccaactaaatggatttattgtaaagaaaggagctcctggtctaaaagccacaaaaattgaaaataaaattggactcagaatggttcaaaatggagacataattctaaataaagtatttgtccctgaggaagacagattaacaggcatcaattcatttcaggatataaacaaggtcctcgctatgtctcgaattatggtggcatggcaaccaataggcatatcaatgggagtttatgacatctgccatcggtatttgaaagaaagaaagcaatttggagctccactggcagcttttcagctcaatcaagaaaagcttgtccgcatgcttggcaacattcaggctatgcttctcgttggatggcgactgtgcaagctgtatgagtcaggcaaaatgacaccaggccggtctagtttaggcaaggcatggacgtccaagaaggccagggaggtggtttctcttgggcgagagctactgggtggcaatggcattttggttgattttcttgtcgccaaggcattttgtgacgtggaacccattttctcgtacgagggcacctatgacattaatagcctggtggctggcagagagatcaccgggatcgcgagcttcaagcctgctgtgtcagcaaaatcacgcctgtgaaagttgtttttttctttgttcccgaagacagtagaaatcaaccttgtacattcagatgattgggaataagaacggtaggaaagctgtaaaactcgacgtgcttcctcgtatgtactgttctgtttcaaattattcgacgttttgtcggaacggaacggaggacctgtatggctgtatatgatactcatcctatatatcacgcagcttttgaagattttgtaaaaaaacaaccataataaaaacaa

SEQ ID NO: 31942 - DNA, 2320 bp, Zea Mays
aatgtaagaaatacacacaaaaaaaaagtcaaatcttaaaatggcgaacatgcgagcccctagaaacgatgacaaccaagagagtgcctcctgtcctcctaacatcgattttcctccggaatcgtaacctcagaaagccaaatctcattctccggcgctcaggcccacccaagcgtcgactctcccgatccaatcggtacctcctagttcctcgccggcggtagcggcgtcgggcgaacagcggtgacttggcgagggcgcttggccggcgacaatcatccactaggatggaaggtgaggcagagaccgtggttggttcttgttctaaaccatgtgggcctctggaggactactacattccagattacattctgaagccaggtgcccaacaagtacttgttgatcatgcggcaccctgccccgttgtagtgttcatcaactcaagatctggaggccaacttggaagtagtttaatcaaaacatatcgtgagcttctcaatgaagcacaggtttttgatctctcaaaagaggctccagataaggtattgcatcgtttatatgccaaccttgaaaggctgaagatggaaggagacattcttgcagttcaaatttggaggacactgaggctaattgttgcaggcggtgatggtacagctagctggctgcttggggtagtcagtgaccttaagctttcccacccacctccagtggcaactgttcctctgggaaccggaaataacctccccttttcatttggatggggaaagaagaatccttctactgaccaagaggctgtaaaatcattcctcgggctagtaaagcatgcaaaagaaattaagattgatagttggcacatcattttgagaatgcgagttccagaggaaggtccatgtgatcctattgctccattagatttgcctcattcattgcatgcgttccatcgtgtctcaagtagtgattctctcaatatggcatttggttaatggatttaattcaaagcttccatgatcattcttgattacttcaggaaggttaccacacattccgtggaggattttggaattactttagtatgggtaaggcttcaatgttgttctcatctttattgttacacaaatgcggcaagaccattatgtacctatactatccagttgtttatttatattttttatcttgatatgtgatcctgggtagtagttcatgctacaaaggctagtgtttcgccaacccactaaggaaagtagtgcaagtctagtgagattattgttatggcatcattctctttttaattaaatctatatctgggatggatgcagaagtgtcttatgcatttcattctgaaaggaagaagaatccagagaagttcaagaatcagctgacaaatcagggtacatacgctaagcttggacttaaacaaggatggttttgtgcttctcttagtcagccatcatcaaggaaccttgctcaaattgcaaaagtaaagatcatgaaaagagctggtagcctctgggaggaacttcacattcatcacagcattcggtccatcgtgtgtctgaatttgcctagtttttctggaggtttgaatccttggggcacacctggcacgaggagagcagaagatagggagttcactgcaccttttgtcgacgatggacttcttgaggttgttggcttccgtgacgcctggcacgggctggtcctgctggcccctaatggacacggcactcgcattgcccaggcccataggatccgctttgaattccacaaaggcgcagcagagcacacgttcatgagggttgacggagagccctggaagcagccccttcccaaggacgatgacacggttgtggtggaaatctctcaccttgggcaggtcaccatgctagcaaatgagccgtgcaggtccaagagcgtcaacgaccagtcgtcactgtcgccggcgcacgacagtcatggtgattacaatgatatcgctgaggaggacgaagacgagtgggaggacggcaggaggaagtttggggcggcagatacatttaagattcctgacgagattgacattgctcatttcagttgagctttgactagtgcatcgtcgtgtgcgttctgatcatacgagtatggtttggtttataaccatctcctttcttttgatttcatatatttgcgatatgattgttgcagccatgtgtaagtgaatcctaggtaaccaagtgctgcgttgctatatatgaccaatgtatgtatagattcagtggaacggtaaaaacacgcgaactctacggttttctccttaaaaataaaaaagaaaataaaataaaaa

SEQ ID NO: 31943 - DNA, 4583 bp, Zea Mays
atgcctggaacaagcagtactacttcgttgacatataaataccttgagcaagttggtgttgattttgatgataaaaatagctgggagtatcttttcaagttatattggttggatctgaaagggaagcatttactaacgattgaagagctaaaaagtgcaaagaactattggactgttcctactactgctggtaggagagagaaagaggagtcatctgatgaactatatgatgcaagcaatgaccaagatgctacgtttgacatttcctcaaagaaacaaagacagaataactcttcaggaaaaagaggacaaaaacgtaaaaaagatggtggcattacttcaaggaagcgtggaatctcaattaatagtgctggaagcttaccgaatggatcaacaggtgaagggatgtccttggcaggtgacacaaaatgggcatcatctgagttattggaattcattggtcacatgagaaatggtgatagttcttatatttcccagtttgatgtccaggttcttttgctcgaatatataaagcaaaataacctctctgatcctcgcagaaaaagtcagattatctgtgatgcaaggcttagcaatttgtttagaaaaccacgtgttggtcattttgagatgttaaagcttttggagatgcattatcttgtgaaacaggttccaacattgaatgcagatagtgaaagagcatttgattcatactcggcccaagtaaatcatggaggatataatgagttgtccgataaattaggttctgataagaggaggaaggctcatatgaagattgaaagagaatcgacaattaatccagaggattatgctgccattgacatgcacaatatcaatctgatttacttgcgccgcagtgttatggaggatcttattgatgaggttgctgttttctctgacaaaattgctggggcttttgtgaggataagaatttccggtcttggcaacaagcaagatatgtaccgactggtgaaagttctcggtacacataaagttgcagagcgatacactgttggaggaatgcaagcggttacgccagagtatgaagtttggtctaactgcccggttaaaagtgagggatgtctatgataaagctaaaatcttccaatctctgcaatttaaagattggttggaaaatgagaaacagaggctgagccgtcttcgtgatcgtgctagtgaaaccggacgccgaaaagaattgagagagtgtgtagaaaagttgcagcttctgaacactcctgaagaaacagagcgcatgattaatgaagctcctgaagtacatgttgatccccagatggatccaagttatgaatccgctgaagaacccgattataagaaagctgttgattggaccatgcatcggaacggaccagatctattatttccaggaagaaaagggacaaaattgaattctgtggagaatcatacacaaaatagtctggatgcaagcggtcacattagcagtctacctacagaggatgtggaccatagattaggtgctggaagtaacattaatttaaacaatatggcaccagagcctgcatcacttggagttttatcaaatgacactgagccagaaaaagtttggcactacaaagaccctaatggaaatgttcagggaccgtttactcttttgcagttatccaattgggcaagttttttcccacgtgacctgagaatatggcttacatttgagagtgaggagaactcactactgttgactgaagtgctcccaaagcagcagaaagattttattcagccttcaacagttactaccagtgataaatcaatatgggcaggctctggtcaagatagaattaactcaaatgcaaataactcttcctcccctagcttgtctgctgagtgctatgatccaacaaaatatctaaagcctctaggtggaacgtcaccatcaagatctctgaaagattctcatgctttgcatgaggtccagaatcaggttaacgattcatccacaattctttcttcagctggttcatatgtaccaaccagttctcatgatgaaagggtctcaagagacagggttgatgagtggaacagtagtcaggacaatggtggcatttggaatccaaccatgaatcatagtcggaagagtaatgcacagcaacatcctgacggttttacagggaaggaccaaatgctaactgaatctaaatgtagttcacatatggtctcagttcttaccccacaacaatctgagagagaccctgccacttctcttagtactacaagtcgtccggagtgcaaaaccatgtgccggcaggaaggttcttcatggagttcagctacaaatgctggagttcatgaccttcagttaactattgctttaacaaagccagagacatgttctccaacaaatcctgttgaagacagagattcgagttctgcttctgcggtgtcttgtcagtcaggggctcctgcctgcattccccaacccgatccaacatctacatgtaattcaagtaagattgaggcaaccatggatctgcataaaacatgccagcctgacacatcaaatgaatcattcggccggcttcctgaacctcaaagtggctcactcttttccttgaaaactctaaatcttgagtccgagcaccctagttctacgccaaaactggaggggaaggaaacttccatgaaccagtcaggatcaacatcagtagcacatgagaatttagctacaaagacacgtgtccgcccacctaccagtaaaattgatagcttgcaaccacttaaggaaagatcatgtccaacagaaagggactcaatcactcaattagagcatctgtttgaagagaatgtggtaaagagaaataacgaagtggtcaatcctgtatctgatgctgaagggattgctgtatcagatgtgttggaatcgttaacagaacaagattgtgaaaaatacagtacacatggagcagattgtgaaaaatacagtacacatggagcagcgcctttacaaaatttggtgccagcttcagccgaggaagaacaaccacaatgctccagtcctattgcattgtccccttggggggaaccaagttactatcagggtgaagctgttgattctgctctatggggcgtccaggatggtaatgacatgtggtcaatgccttcaccaacacctggtctccagccttcatcagctgatggaaaaaacgcttcatgcatcatagaggaggcgagagcggaccatggagatggtgcatttgtcgaaacattaccaagacaaggggacgaaaagacggaacatgcaaactcaagtgtctcaggttctggagtgccagaacaggtaaaaccaaaagcaagcactgcatcaggtccatctctagatgggagcacaaaagctttgggttggcaactgctgggctcatctctagaggggagtgcaaaagcttcaggctggaaaccgccagctttatcgattgaagggattgctaatgcctcaggttcgcaagcattgtatcctacgcaagggagcacaaaatcttcaggttgtcagcgatcaagttcatccccagatgggagtagaaaagcctcaggttggcaacagtcaagtacatcaccggtggggagtggaaaagctcatggctggcaacgatcaggttcttttacccagggtggtacaaaagctgcaggctggcaaccctctggttcttctacagatcggagtgcaaaagttgatggctggcaacgaacaagttcatctccggagggaaacagaaaagcttcaggctggcattcatcaggtcgtgagagctcaaagatcacatatggtgccagtgaaaaccgtaaatcattttctagccaccaagcgacgacaccaacagggagacactctttggcaaggaggcagggaagcagcgacaagggtgctgctggttgggaagagagtctaggaaacacttgggaagcatcaaagagacaacagagaaacagcgacaagaatgcaggctgcggagaggctctcggaagcaacaggacctggcacccatcgtctggtaaccccagtcggagcagccaggggaatcaccaacatgacaggcattctcacggcagtgattcgcggcggggtagctcaaactaccctcggaggtccgaccatcgtcatgaccatggcagtggtggttcgtcaagaccctcgtcaagagggcagccccagaggggggtttgtaaatactacgagaatggccactgctggaagggctcgaaatgccagtacctgcaccgatgactgccgtgaccgtgggaagcggaacgccctcacatttttgtatagcagcatatggtctcgtcgtagtcagtaaaaggaggaactgtgtcggcgggaccactagttcgtagtagtacatatccttcagagcaggagcatgactaaagattctccgctttggtgcaggaatgcgccccttttgttcagttaaacggaggtgtgggcatttgcaaacatggattttctccataagccagggtgttgtgcaatcgtacggaataactactgaagagctgcacgtccgattgagaatgacactacggaagag

SEQ ID NO: 31944 - DNA, 789 bp, Zea Mays
catagaccattttcctatccaggaagtccattgaacatgttaaggtgtgctgtaatcatctgtgtcaagtatgatgccaacatgccataaacatgttaaggtagagaggttacactagctgacattgtcagataatcaacatggctgaactcaaaaatggttggcattggccacaattttcaactgaatgcaactggatggaagtggaagctttctacttgcctggggggagatggtgtgtctcagataagaaacaagtcaaaactcagcttgttcccagggtttgatttgaggattggatggaaagcagagtatgtgcttcctgagattcatggggctgttggcacaggagaaccagccttcagtatgaactatggaaggttgcatgcatcgatagatcgggtcgaggctatcgttactcagtcagatcagtattgatcttccagtgcggaaaggcaagggagtttcttgatcaataacaaacacgttgagtagatcccagggttacaagaagcattctgaagctccgtgcctgatgtacagcaaataccaaagtttaggaccacgctttgagaagctgtttgagttctccaaagcttttgactttgagcggcttctgttgcttctgaaagcgtaactataaataatgtttatcctgcttgtgtacgaaacaccagagtatcagtaattcagtatagtgagcgacgtcaaagcatgatctctatgcatcaagatttgtcttctaagctattcggaagtacgcttaaaccctgcataagtggccgcagt

SEQ ID NO: 31945 - DNA, 253 bp, Zea Mays
ccggtcatttcatgttcggcgccgcagccatcgaccgccccgacaacaacacctcatccgccaggcccttttgatccaacttctacttcgccagctgctctttaatttgcttgttattcgtcagatcaacaacaaaagctacgcgcttatcttattaatttttactactgctcattttttgagaggtgaatcgtcatatcaaatccaaattacaagctatctctatctatctatctatgttccacagttccac

SEQ ID NO: 31946 - DNA, 1328 bp, Zea Mays
gcgcccctcctccgtgcgtgccccgcccccgtccttcgctcacccgatgccctgccacctccgccgcgatagcctcccccacgaaatgcccccgtgatgttcgccccgctgcgaacccctccccctagatggaataagcagaggtccaatgcggatccgcggcccccgaccctccaccttggtgtgacagtcgcggctccgtggaggcaacttgctccctcgctcccacctcccacgccgccactgttgtcgccttcagcacgctgcccagcccacgccccccccccccccccgcctccaaatgtggatctgccaccccggccctccaccttggtgtgccttcagcacgccaccactgctgtttgattccttctcctttttgtttaggacgtcgccaaattccatccatctctcagcgccgtggtctcccgatgtggatgggggaaggtacataatgcgctcgaccacattaattttgtcgttaagagtcaaacgatggtttgtgttcacaactgaaaccattggattttgtttttgacatcctcaaggaggaattaaccgagagcttgctgccgcaaagaaggttgctttgctacttctatgaatcttcggacttaagttcatacaagttcaaaaataaggacttaagttcataccacatctttttctggatgtgcactggcaattctggcagatttctcacatctgagatcgggagaagaaagcattttcaaggagaatagccgatctgttgatgtgcttggccttaagactgcttttgcaaccttcatgggtaaggttccagagaagaaagcgagggaatggtgcgcctccaagggcgatattccatacttcgagacctctgcgaaggaggaccacaacgtcgacactgctttcctatgcatcgctaggctcgctttggagcatgagcatgaccaagacatttacttcaagacagttgtggaacaagtcccggacactgaacagacaagcggatgtgcttgctaggagccagccatttcctggaaggctggaactacgtggatgttactgaaggactggcccccgatatgtttccctcccattttttcttttgagctccagtaactttattactattctgtgttgctctcactggattttagcacttctgtaagttgtcatcttttaaagttaagaatttttacataagtcttacacatcgaacaaatccaccatgtacattaagatgcaatgcttatcgaacactcaagtattatgctcttgtaacctaaattaatcaaaattgggcaatgatcagcaaccgacttgtgctaaggtagaaaaat

SEQ ID NO: 31947 - DNA, 1768 bp, Zea Mays
atttaacaaagatgtcaattgtacttgggtggaaattagaccacctttcctcatcgcttaatgataagtgggagcttttctcaagtacggaaagcactgttagcagtttcaacctgcctccaagataatcctaggccagacacacataatattccgattggaagaccatttgggcttccaggtagtggtactggatgtccccctggcatggatcctcattctcaaagaagttatttaccaccacacatacctgattaccacacaaggaattatccaagtaatgctggcccccctggtcctagattcttttttgaacaagagatagtgttcaggatgataattctgaatgagatggtgggaagcataattggaaaaggtggttccactattcgggcattgcaaagtgaaactggtgcttgtataaagatcttagagccagttgctgattcagatgagcgtgttgttgcgataactgcacgtgagcgcaagatgcagttgttcgggtgtactctaggatctcagaggcatctattgatagaagttctcatacacctgcaaggcttctcgttccatcacaacatattggttgcctgctaggaaaaggtggatccattatttcagagatgagaaagattacaggagctaacattcgaattttcgggaatgaacaaattccaagatgcgcacagcgaaatgatgagatggttcaggtcactggtagcttccaatccattcaggatgcattacttcatattactggaaggattagggatgtcatccttcccaagccacaccccagtggaggcatgcctccatatcctcctgttggaaacatcccagttcaccaatcaagacaagaacaacctcctccgcacctccatcccagtgggggtatgccaccataccctatgcatcctttcagacctgatgctcctatgggccactttgaaatgggtgatcatcggccacctcctgtacattcgatggaatatatgggtgctgatagaatgccatacttgtatggtgttgaacaaggaggtcctcgcccttttctagaacagccttcgccaagaacctgccctcctgaggcaccaaggacaaacagtgaagttcccagaaacatgtctgatgcagtgccagctacagatttcagaaagggaccagtggcaattgaaaaccaagtggctacaccaacaggcacaactgaagttatcattccttgcaattatataggctttgtctgtggaaacaatggcagtgaaattgaagaaatagagaagatgtcaggtgcttcaattacagttcatgatcctaaagctggcgacgcaaactcaaaagttgttatatgcggggatccccgaagaaacaaagaaggcacagagcctgattcatgccttcatattctgtggtctgtatcaaacataattgatgacttgatcactgtgcagtaccatcgtcgtttatgttcttgaatctagagtagttcccatgggcagatttcagcccttgattggatgtacatgtaccgtcgctaccggggtggatgtaggtagggctgatgcatgccttgtacaaacaacgccgatgtacatttctgtagtcctgtgttttagtttgggggaatggcaccatggaatgtgatgggttggctgcacggacctctgtggaatgtttaaccccatgccatcattggttttcatgatttcatctcttgtttgggaggcagccctgtgtgattgagattcgtaatttccaggcatgctatctg

SEQ ID NO: 31948 - DNA, 2961 bp, Zea Mays
gaattgaagtgctaaagtttagtttcaattatcaccattagctctcatgtttagattataaatggctaaaagtagctaaaaaatagctgctaaagtttatctcgcgagattggaacagggcctaactattagttttagtgtattcaaacaccccctgagagtcgtaatctggcaaggatgaaaataacgtgaacaaattctaccaactacgctgtgcttatcgcctctggcggcggcgagttcgctcacgtcccggcgacccctcgccggtggccacgggccgtgacactccggcatgccgcgcgccccacgccggcagtccgacgaggcgcgccgtggcgcctacaagccgcgcgtcgacttcagccgctcgcgccgccgccgcgaggacggcctcctcgccctccgccgcctcaaccgcgacacgggactcttcaagcgccgccgcgacgagcccgctcccgccgtccctgcctccgatctgactcctacacgcgccgaagcagccccattcgcaggaatcacccgtccggcattcactccctcctcaccgcccgacgtagcggctccccgggatgctgctgagtcagagttagcttgaaggcctgtcagagctggtcgacaaactatgttcagatgacaccaccagtcagctcgaagccacaatccagttcaggaaacttctttcagatgagaagaactcaactgtgataaaaatcatccgagcggatgtcctgcccagatttgccgagtttctttcaagacatgggcttccccagctccaaatggaggcagcctgggttcttaccaacatagctgcatctgattatacactgctggttgcagaatgcggtgctgttccaaggttggtggaactattaggatcactaaatgcaaacatcaggcatcaggctatctggtgtcttgggaatatagctgcagacttacctagctgcagaggcattctcttcgatcatggtgctcttacacctttactttctcaatttagagaaggcatgaagattccagttctgagaactgctatgtgggcactgtcaaatctttgttttggaaaattgccagccgaagtgcaagtgaaaccaatactagaaattatcagccagcttattcactctgctgacgagaagatactggcagatgcatgctggactgtttactacatatgtggcgataaaggtgatgctgtccaagatgtattagatgctggggtctgccctcaacttgtaaatcttttgatgcatgcatcagctaatgttcttctccctgtcattatggcactcgcaagaatttctgcgggagatgataagcaagttgaggtagctttatagctgtgtattctttgtgtcctcaccctttattttactggtgcagattcccagtgatctgcagtcactagaacgtagaatgtaatggccgaagaaccgagtatggactatggagatgctgcttgttgtcagtaataatgctctgatctttttaagacccaaaaccatatatctcggcctgcagtaacattttatcgccacaattgcagctattattacactgctgaagttctatatacattttttttgcattgtcagcctttttcataccttccaagttcatatcatgggccttgtgtattgtccttgatccagtgaattcttggaggggctcagcaagctttcgctgcaaaacactcgtgtgtctacaattgctgttaaaggcagacctagtgctgggggctccccacatgagtgggatctcagagcctctggcactgtgtctgcgtttaataacaattatagatacatgagtgttttacagtgaaagttctcacttttcagttgctgttatagggaaacttaatataaaagttttcatgtagctcaataagtttttataccaagtcaacacatagcgaattagttgtacattctgctttgtcccccccaccccaacctttgaattacaacacaacaatattttgcaggtcttaatagagaatgacattctcaattgcttaggacagttggtagcacgaaattacccaaagaacatcaagaaacaagcgtgtctaattgtttctaatatcgctgctggtagcaaggatcagattcaggctgtaatcgatgcagacattataacctctctcattgtcttgctaagaacgtcagagccggatgttaaaaaggaggctgcttgggctatatcaactgctgcgtccggtggttcaagtgatcaaattcagtatttggtcagccggggatgtttagagcccctctgcagcgtcctcacccacaacgatcctgaccttgtatacacgtgtcttgaaggtcttgagaacatactccacgcaggtgaggcggggaagaagggcgaggaatcagggacgaacccatacgccgagtttattctagagtgcggaggtctggagaaactggaggatctgcaggacgtggacagcgacaggatctacgagctagccatgaagctgctacagagctactgggaggaggaagtaagcgagagtgatgatccgaacatcccaggttcgaatgactcgtcagatactgtggaagcaacgtccgaagatgctgctgctgctgtgcagccaccaccagtaccgccgccgccgtccgccgcagatgaagccgagtgatggtagatgttgtattgtagattgtatttcaggagaggaaagcctggttccttttcttagtggcactggcatattgtatgatacttactatgatcaggtcgatgtagagaggaacgtgtgaaggtgtggtagccgttatgtgcagaattttcgcatcacgtttctgtaggcgacattggagcattttgaatggaggatttgggccaagagaaaaagaggtatgggggttatttggcgcgtgctgctgaaaggttaaagattgggctggctgttgaaatggagctccgcagaccgca

SEQ ID NO: 31949 - DNA, 3354 bp, Zea Mays
atccccagccacccccagcgcgcttgctacgagggaggggagtggtcggctggttgcaccgcacagcaatggtggcgactactcgtcgagctctgttcctctcctgcttccacggcggctcagagatgagcccccgcctctccctgcgcccgcggtacccgtcaatgccgcggcggccgaagggagtggcggctgctggcggcggaggaaacggcgacctggaggccgcagtcggtacgggggacgacgaggaggagaaggtggcggtgttctccgtgtcggggatgacctgcgctgcgtgcgcggggtcggtggagaaggccgtgaagcggctccccggcatccacgacgccgccgtcgacgtcctctggggccgcgcgcaggagaacaaaattaccgaagccattgaggatgttggttttgaagcaaaattgattgatgaggaggtcaaggaaaagaacattctactatgcaggctacatataaaaggaatggcctgcaagtattgcacaagcacagttgaatttgccttgcaagcttctcctggggttcaaagagcttcagttgcattggctactgaagaggctgagatccgttacgatcgcaggataatttctgctagccagctaatccaagcagtggaagaaactggctttgaagctttactagtgaccgcaggagaagaccagagcaggatagacctcaaaatggatggtgttctcgatgagaggttgataatgatcttgaaaagctctatacaggcccttcctggtgtggaaaacgttaaattcaactctgaactacacaaggtcaccgtctcatacaatcctgaccacacaggcccccgggacctcattgaagtcatcaaggcagccacatttggtcatgtcaatgcatcaatatatctggaagcagatggaagggaccagcataggtatggggaaataaaacaatacagacagtcgttcttgtggagcttaatattcaccattccagtttttctcacctccatggtgttcatgtatatcccttggctgaaggatgggctggaaaaaaaagttgtcaacatgatgagcattggtgaactacttcggtggattttgtcaacaccggtccaatttgttatcggtcgcaaattttatactggtgcttacaaggcaatgtgccgtggctcaccaaacatggatgtccttattgctctagggacaaacacggcttacttgtactcggtttactcagttcttcgagcagctacctccgggaattacatgtcaactgatttttttgagactagttccatgctcatttcatttattcttcttggaaagtaccttgagatcttggcaaaaggaaaaacatctgaggctattgccaagctgatggatcttgcgccagaaactgcaacactgttagtgtatgactatgaaggaaatgtggtaggagaaaaggagattgacagcaggctgattcagaaaaatgatgtgatcaaagtagtcccgggtggaaaagttgcttccgatggatttgttatttggggccagagccatgtgaatgaaagcatgattactggcgaatcacagccagtagcaaagagaaagggtgacactgtaattggaggtacagtgaatgagaatggtgtgcttcatgttcgggctacatttgtgggatcagagagtgcattggcgcagattgtaaggctagttgagtcggcgcaaatggcaaaggctcctgtccagaagttcgctgaccatatatctagagtctttgttcccctggtgattctgctttcaatggttacttggctcgcatggtttgtcgcggggaggctccatagctaccctcagtcatggataccacgattcatggatagcttccagctcgctcttcagtttgggatatcagttatggtgattgcctgtccttgcgccctagggctggctaccccaactgctgtgatggttgcgactggagttggtgcctcacatggtgttctgatcaagggtgggcaagctctggagagtgcacagaaggtcgactgcatcgtttttgacaagacagggacgctaactattgggaagcctgtcgttgttgacacaaggcttctcaaaaatatggtcttgcgtgaattctatgactatgctgctgctgcagaagtcaacagtgagcaccccctggcaaaagcgatagtggagcatgccaaaaagttgcgtccagaaggaaaccacatgtggccggaagcaagggaatttatttcagtaaccgggcaaggcgtcaaggcggaggttagtggcaagagtgtcatcgtggggaacaaaggcctcatgctgtcctctggcattggtatccccttggaagcttcagaaatcctcgtggaagaggaggggaaggcaaggacagggattatcgtggcagtggaccgagaagtggcgggcgtaatctctgtatccgatccgacaaaaccaaacgccctccaagtgatatcgtacctcaagtccatgaacgtggagagcataatggtgaccggcgacaactgggggacggctaatgctatcggccgagaggttggcatcgagaagataatcgctgaagcgaaaccggagcagaaggccgagagggtgaaggaactccagctgtctggaaggaccgtggcgatggttggcgacgggatcaacgactcccccgcgctcgtctcggccgacgtggggctggcgataggcgcggggacggacgtcgccatcgaggctgcggacatcgtgctcatgaagagcaacctggaggacgtggtgaccgccatcgacctgtccaggaaggccttcttccgcatacggatgaactacgtctgggcgctcgggtacaacgtcgtcggcatcccgatcgctgcgggggtgctcttcccgtccaccgggttccgcctgccgccgtgggtcgccggcgctgcgatggcggcctcgtccgtcagcgtcgtctgctggtccctgctgctgaggtactacaaggctccgaagattgccggcacagctaaagaaattggaattactaccctgtaggcaggtatcactggcactgctgctggaacgggaaggttgtggctggctgctaagtgctaacaatcgctgaaacagaagtctaaaaagaatcgctggaacaagcaagctgtacatatgtgttacaagtatatatacggcgatgctaagtgaagtggtggtgtaacgtaagtactgctactgatctgccatcgttgcatggatgtataccgttttcttttcctctcgaaatgaaaagtggtcctatggcacactactgctatgatggggcctgaataattttgaatcaatatcgcatgaccagcacgag

SEQ ID NO: 31950 - DNA, 6078 bp, Zea Mays
gggataagaccacgcttctctccgtctccatggcatggccatccaccgcagcaatctctctagacgcttcaagatctcaaggatctggcatcaatcggagcaatatcgcgccaaatccttcgcctcctcatctccaacgagcgagactacacccctcaaggtcctaaccgggctcctgcgcgacgcctattcgctgaaatgcctcagggagttgcacgcgcatctcgccgtcgcgggtgcgatccaggacacattcgtcgtcacaggtcttgtcgaaaggtatgtttattttgggaaggccgcgtctgcggcgttgctatttgccgaaacctaccgcagccgccccgctgtgtactcactgaatctcgcggtccggtgcttctcggaccatggcttccaccgggagcttcttcatctttaccgggagctatgttgctttggctcggacaacttcaccttccctccggtcatcagggcgtgcacagctgtctcttgccttcggctggggagggagatgcactgcagggttcttcgtacaggtcatggtggcaatgttggcgtgcagactgcgctccttgacctgtatgctaaggctggccagattgatgtgtcaaggagagtctttgactgcatggtgctgagggacttgatttcttggaatgctatggtctcagggtactcactcaatgaatgcttccgagaagctgttgagatgttgcaggagatgcagcagggtggcatgaggccgaatgcaagcacttttgttggcatagttggcatgtgcggaagtgtcggagacagggatgttggtgattcgctgcatgcatttgcactgaaaggtggagtgattaatgacgaatctcttacatccgcattaatcacaatgtatgctgcatttgatgatctttcctcatctcgaatggtattcgatctgcatcctgtgaaagatttggtatctttcaattccatgatatcagcatacatgcagcaccacatttggaaggaagcttttgagatctttcgattgatgcattgtgtagctgtacggcctaacctggtcacagtggtgtctgtccttccttcttgcagtgatttctttggtataaaccatggggagtctgtgcacggcatgattatcaaacttggccttgcagagcacgtttctgttgctagcgctcttgtgtccatgtattcgaagcttgggaaattggactcatcgttgctccttttctgctgttgtgttgctccagatgctacaactatcatgaatgtaatatctggatgtagatacacaaaagatttacacatggcaaagtcaatacatgcatatgctgttagaaataaatttgaatcatatcatagcgttatgaatgcactcctagccatgtacgcagactgcagagatatatcaacatcccatacattattccagaaaatggaagtgcggatgttgatatcttggaacactatgatatctggttttgctgaaattggagattcagatacttgtctaatattattctgccagatgttccacgaagaagtgcaatttgatctagttactctgattggtcttatcagtagcttttcagtacccggggatgccatagttggagaatcagttcattctttagcaatcaaaagtggatgtaattcagatgtttctcttactaatgccctcattaccatgtacgccaactgtggtattgttgaagcaggtcagcaactttttgacagttgctgttctaggaatacaattacttacaatgctttgatgagtggatatcgcaaaaacaacatatctgcgaagatattgccattgttttaccaaatggtcgagaatgacgagaaaccgaaccttgtaaccttactgaatttattgcctgtttgtcagagccagttgcaggggaagtgtatacacagctatgcagtacgtaatttcaccaggttggaaacacccctcttcacatcagccatgggtatgtatagtaggttcaataatatagaatactgcagcaaaattttcagtttgatcggtgcaagaaaccttatagtatggaatgccttcttatctgcatgtgttcaatgcaagcaagctgatatggtagttgattgctttaagcatatgctcttccttaatgtcagacctgatgcagtaactatgctggcactcatctcagcatgttcacaacttggaaatgcatattttgctgcatgtattatggctgtcatacttcagaagggctttagcacgaatattttggttcttaatgctcttattgacacacattcgaggtgcggaagcatatcacttgcaagggagctctttgatagctcagtggagaaagattcagtcacttggggtgcaatgatcaacgcatacagtatgcatgggaatggtgaggctgcccttgatcttttctcaatgatgatagattcaggagtggatccagatgatataacttttgttagtatattatcggcctgcgctcataatggactcgtagagcaaggaagaacattgttcaaatcgctacaggcagactatggcattacaccgcgaatggagcattatgcatgtatggtggatctattgggccgaactggccacttggatgaagcatatgatgttgttaggtcaatgccattcaggccatcagataacttgcttgaatcattgcttggagcatgcagattccatggtaattataaaattggcgagtctataggaaaattactcatcaaatctgagtatggcaagtcaaggtcttatgttatgctctcgaacatatatgcttcagctggcaaatggagtgattgcgagcagctaagattagacatggaagcaaaaggattgcggaaaaatgtgggggttagctctattgggatgacatagccctgatgcaacaatgttatagagtttttcagaagttttttcccccacacattacagtttcgggaaatgccttcagagtaatttgaacttcaaaattagtatcaaatttgttgagctgtggcttgagaagatgccagacaagaagatcgaaggggctgattcatctcacattgtctcttcaacaaaatctttggaaagttcagtagggcctaatctaattgaaagtactgatggagattattgtaataaccttcacaagacagcagttgccaattttgtggcatcaatgctgcaagaacatcctatgagccttatattggctgagaacaaaagcaatttgcaagaaatttcagttgaacagaagattcctatctttgtttctatcaacctttcaccaaaagtggatggcagtgaattgccatgccccattgaagttcatgatggtattacatcttcctctagcaaaactaacgaaccaatggaagcccaagattattcgaacacaatgaaatcaaacacagctagttgcatgttcgaggcatcaaagcggcaagaatgccctataagcctcatattggcagacaagaaaggcagtttgcaagaagtttcagttgaacaaaatgttccttgtggtgattatgttgccctttcacaaaaagcagacggtagtgaattgacatcaacccgtgaagctcctgaaggctttctaacttcctctagcaaagtttatgtattaaaggaagcccaagatggttctatcacaacggaagcttctaaagtaaatgtttgtgcagcttcacactccatgcttaggttaattgaaggagtccaggatgaggcttcttgtattgattctgataaggttacttgtgaaacaccacctgccatcctgaaaaagttgaaagaagataagccactggtcgtccatagatttcataagcaccaaatgagcctaggagacacacatcaaaaggtgcctgcacctgtgagcagatcaaacaccagcaaatacttaagaatggataaaaacattgttgatactacgactcccattgaatcagtaaaggctgttgcatcaaaatttggtggcagcatgaactggaaaactcgcaagacacagacagcacaggtgagtgaccgtatcgtacttgagcttgataagctgaagaacgaaatttcagaatgtaaacatcaagcagaagctgcagaggctgcaaagttatcagtattaaaagagctggagagaacaaagaagcttatcgacgaaatgaaacacgtcctggagagggaacaagctgaggaggtggatgccaaggatgacttggagttatttcaaattatattacaagcgatggagggagttgactgtaatgatagtgttgtggttagagagaagctgaataatattcaagaacgacacaaagcattggatgccaaagtgatttcagtgaaatatgtgttgggaaaagtgcaggaggattatgattctttgttgatcggaactgatatttccattaacaaagctcaggcagccttcacaatgtccaaaggtgcagagaaagaagtagaggagctcaccatagagctccaaagactaaaggaagtgtttgatttggctaacgccaaattccaggacgtggaagaacgcaagaacacgttgatggcacgtgatgaggatcgtcttgcatgggaagaggatctcaggcaatcagacaaagagctgaatcagatcagcatggacctttgttcttttcaagaattgcaatcaaagcatgatacgtcagccaccatgttgctcaatctgaagaatgaggtagccaattatttggaggcaaagcgaatcgaggaagcacgagaacaagaaagtggaactcataaacccgtgcaagaagtcatcattatgttaaagagcgagctcgtggagcagaggaagagcatagcgagggtgacggatgaattatgtgttctgaaagccacagctgaattgctaaaatcgcaattgaagaaagagaaagcagcacttgctgccgctcagcagatggaagtgatggcatccatgtccactcagtctctcaagatggacatcaaactgtcacagcaggaacttgaagcacttcatgccaaggcaaaggagtgccgagatagatcgggcaaggctctgcaagatgcgtcccatgaagctgacgaggcgaaggttattgctaccaaggctcagggggagctaaaaaagacagaggaagaagtggcgcaagcgaaggctgctctgagcactgtggaatccaagctcgaagcagttctgagggacatacaggcagcgaaagcgtccgagaggctggcgctcgatactctgacgacgacgacactggaggagcacagcaaggtcggcgctcgatactctgagacggtcacgcttgacctggatgagtacacgtctctggttcagaggtcacgtcaggcagaagaggctgcgcacgagaagacaacagctgcttccaccgcagaggttgaggcggcaaaggagtccgcggcgcgcaccatatccagactgaacgagatcttgcaggccttggaagagcagaagcaggcactggcagccgccaccgagcgggcgggcagggcgagcgaaggcaagctggccatggagcaggagctgaggcaacggagagaggaggagaacgggaagcgccgccgcatggccagtgaagctccaaagcctgtaaccgggcctcggagcgctgcagagatcgcgggtagagtcgacatgacgttgacgtgcacgggcaaaggagatagtagctgtcccgccgcgtcggtccatccggtgtcggacgcgtccgggaccgggaccgggaggagcagccccagcgatgcggccctgccagtgccagtgccagcgaagacgaagaaggcaaagaagctgccgttcttcactcgcgtcgtcatgttcctggggggcaggaggaggaggaggctcagagctgccaggtgattttccgtttccttgtgttccttatctgtgtgcccgtgtcgcgtgtggtgtttgtcagtgctgggagcgtgtaaacttcactggtttttactcgattgcacgttgttcgtgctggatgtgttcgaagattgtgtgagattgcatggggtgttcggtttgctggacaagacaagatggttctgtaacacggttg

SEQ ID NO: 31951 - DNA, 759 bp, Zea Mays
caacgattctcgtggatgccgcacatgttctgcaagacgctcatggcctccgacaccagcatgcacgtcggcttctctgtgctgcgccgctccgccgaggactgcttcccgcctctggactacagccagcagcgatcgtcgcaggagcttgtggccaaggatttgcacggaaccgagtggaggttccgccacatttatcgagggcagccccacagacaccttttaaccactggatggagtgcctttgtcaacaagaagcttgtctcaagggacgccgtactatttttgaggggtgataatggggagctaagacttggagtgcgccgtgcagctcagcttaaaaatggatctgcttttccagctctttataaccagtgctcaaatcttggttcactacctaatgttgcacatgctgtggccaccaaaagtgtgttccacatctactacaaccccaggtggctcctccaatataggattagtccatttttctacagatggggtgatagcatgcacattctagcatacacatgcccttggcctgccgatcatccgaaggctaatgaatattaccctgacccaagattagtagcatatgttgtaccctatgcacctatcctatcgtgtacggatgctgcaaaaaattccctgaggagaaaggttgaaatcttaaaattgaagcctcattggtccaaagcttacttctatttgtgggatgaggtaattgaactgccagtctgccactttgctggtgtggtataa

SEQ ID NO: 31952 - DNA, 2671 bp, Zea Mays
atgccccccgcctccatagtccctgtcatcggcgacctcagatccaacaggttggtctgcttgcgccgtgatcgcggaagctaccgcgccttcgtctccgtggatgaggtcctggatttgtgtgtcactggcgcggaatatgagggatcgagggcggcgcaggcggcgagctcgtgggcggaacagactggtgagagcaagaggatggatcaggagcttgagccccaggtacaaagactaacatcagcttctactgtactaaggagggtgttggataatccagcactccaggactatcaagagaataatggatttggagacttgaactgtccggccgcgtgtaccgcgtcaccttcaccaaccggctcaacggggccgcaggcgcggtgccgtgaagcagatacggaccgccgggaaactgtacctccacaagtaaaatatttatttagccctctgtctttgtttttttccatattctaagtttatacctaataacacatttgcacatacttgatgcatttgtctatggtattttctttttataaagtgaatcatcttgacaatgaaatagtgcatttatcagttttgtaatgggacatcactcctcaagtatccagaaggtaaactagatgtatttctcatacatcaattgggcaagtctgagagatagctgtcccaatttgtccagaaatttatttacctgtacctccacaagtaaaatatgtatttagccctctatctttgtttttttccatattctaagtttatacccgatgtataaatctacagatactttcttacctttgtttagttacgataaactttatccatcaattattttgtatacttttctaacctatgtaaatttagaggttaatttggactgtttaatatttaaatgttgtgggtggattaaggggttatttagtgttttaagtacaaacagaggaggacaattcatgcacatactttagctttttattgcaatgatagataatttatatgaagtttaggacttattttggatataatatgtcagaatgacagagattcacctgataggcgagcatgagttctcgctaaaatgtagcattgagtattgactgcagttcagtaagtaaattaaagcatgatagtattgttgatccagtgaacccttcatcctatattctctttgagctaatcttcttgcaccttgatgtaaaccttgacatatctgatggttctgctcagtgcttgtgtcttagattattgcactgacgtaattggaaaatgagtaatctgccaggaagcaacatattgtgttttactgaagtacagttagtcctgctgtcgcacaactttgctctgatgtttgaaagcataaagtatgttttcctaccatgggagaggtccaactgatattgcatctggatcttttgtgaaacatgatagcacttagcaacgctaggcagaagatgcacttttgaaatgtagtgttgcaccgttgctgtcgcaatcgttagttacacatatgttctctatatgctgtcagatatccatatctcttaatggtcgtacctaccaatttgattctgataaaaatcaatcaatctattagttacagaacaagcagagaactcactgtacacggtctcttcttgtactgaactggtattcaacttcattcaaagagttctggtaaagtataaattgtgctagaacttttgagctccttaattttcatgtagtatttttgttacttgatttttcgcctatcttgcaatagcaactttaacactgaaaaagattgcttatggccactggcaagtatgaattgatcaaattctcaaaacatatcatttgctgatttgatgaagcacgattcttaccttatttgtatctaatttgttacattcactgtttacagcttctcttgtaacattggatataatgacgctgctacatgactattattttgacatcataacctacatataaagattagagactaatctgttttttttctgaactaaggaaatgaacttccatcagacttgatagacacactactaaagtggatcccaagcaatgatgaggagcttaggcttcgactgtcctcccgtagcaccgccacaccgcacgcgtccgtggcggtcgaacatgcattttggagagaccaacttgaatgtgcggagcagtcgatcacacaatattttcataatgttgaatggaagcgataactaaatcaaggatgttctatttatatcggtctcagttgcatggaagcaataactgaatcaagaatgctctatttatttcgatctcagccattttggaggacgaacgagcaccggggagagtccaggaggaggcagatactgctgggacatgtccaagccagtggagatgcagtggagatggagatcaacattggcatggagaagctgtgaaacccaccgcagcagaaccccacccagaggaagatcaacgcgcccgcctccgccatcaacgctctctctaccctctctctaccagtggagcagatggcgcgctggtcaaccgccgcggcttgcgccacggggggcgctgctatcaccagcgtcggggctggcgagggagctggagcgggcggttcctcgccgcgcttcaagatccagacctcctccatgacaagcagccccaccctcct

SEQ ID NO: 31953 - DNA, 2297 bp, Zea Mays
gcgcgcacaagtggactgactactgagcaagcaaccaagttccaaccatacatcgcgcgcgcgcgcggccgaatgcagtcgacggcggccatgcggagcggcggcggcggcaataagcgcagcctgctgctgctgctgtcggcgtggtggctactcctcggcagcctcgtcgcccagctcccggcggcccgcggcggcagcggccacgtcgtcacgcgcatgcccgggttcgacgggcccctcccgttccacctcgagacagggtacgtggaggtggacgagcagctcggcgtgcagctcttctactacttcgtgcggtcggagaaggacgaccccggcgaggacccgctgctgctgtggctgtccggcggccctggctgctccggcctctccggcctcgcctacgagataggtggccactcggctaagctgttctgcatgctaccacagcgtttggtttggcccttccattttgatgctcgagggtacaggggcgggtttcctacccttctctaccgacccgagacgtggaccaaggtgagcaacatcatatttatggattctccggtggggactgggttctcgtacgccacgtcggatgaggggctcaagtccagtgacactcaggctgtcaggcagctagccatttttctcagaaagtggcttgaagagcatcccgagttcctgccgaacccgctctacatcggtggagattcatacggcggcatgattgttcctgctcttgcactacaaatacacacaagtacagaactcggtgaaaacccatccttcaacctcaagggctacgttactggcaacccggtgacggatagccagttcgacacggacggcgtggttccgttccttcacggcatgggactgataccatacgagttttatgagaacgctcgcgagatgtgtggtggaaagtacagtgatgcagccagtgttgcgtgcgcggaggtcacccgagctatagccaacatcacgtcggctgtcaaccgggaacacgtcctggagcctgcttgcccggacgacgacgacgacgagctgttcggccccaaaactaccatggcggagacagatggcggcacgagtcgtaggctgatgctgcagtcggcagactatttcctgccagctgggttcaaatgtagaagagcttcgtacgtcctatcccgcgtctgggcaaacgacgaaacggttcaggagagcctcggtgtccgcaaggtatagcagtcctacgtgctcgatcgtgcatgcacgcacagttttttttttctctctctctttttcttgaggaaacaaaagccaagattttcagtaaatttggtatcgaacacacactgaacatccctgcaacttttgttgttaagaggttgtttgtttaggactataatctgtctagattatataatccaacaaataatgtgttatttgctggattatataatctggacagattatattctcaaacaaacacccgctaattcttccaggggacaatcggagcgtggaaacgatgcaaccaggacatactttacaaccagaacgtccaaagtgtagtgccgtaccattcgaggctagccgcgaaagggtacagggcgctgatatacagcggcgatcacgatcgtatcgtacccttcgttggcacacaagcatggattaggtatctcaacttgaccgttgtagatgactggcgaccatggtatgttggtggccaagttgccggattcacaaggaactcaggcaacctaatatatgcaactgtgaagggcgctgggcatactgcaccggagtacaagcccacggagtgccaaacgatgtttaggaaatgggtttcacgggatcctctctgatattacgtcgtctgagagaattacgtacgtgtcgctcctatgagtgtaggccggacgtacgtggtatgccctactgcaggccggagatcaaaataaaggagattttccattttcatgtagaaaaaatgagtgtccatggtgtctacttgttccctgtattaaaaataaatgcaatttttatactgcatgtagccactctgtcggagaagaaatctccccggccaggtggcggattgcacccgccctagatcctaaaaagaggaggggtctaaacgttttgtttgttacgagactggtggatcagcacacgggagcatgcaagggtttagagtggttcgagccgccggagcgtaataccctactccactgtgtgatgtattgctttgggagcttgtatgaacttgtgagtgtgtgcctaagattgtctgtcttataacgccg

SEQ ID NO: 31954 - DNA, 7218 bp, Zea Mays
ctgggcccaccgccgccggtgaagccctcacagctgcgggcaccgcctcggcccttgcggctgtggcggatgcaattcccgcgggtgttgccggtccggaggaccctccctcgccaattcccccgtcgatggtcgtcgatcagccgcctcctccaccggtcgcccacccaggatacaccggcgccgccctcactgctgcccgtgcggagcacgctgcgcgacaggccagtttgcgggaagcggccctcgtgtgggagcgcgaggccgccgacgctatcgctgctcagattgccgcggcggaatagctcctcgcctcgcctgcgacccacgatggcggggccacctcctctgacaccgtgggcggcgtgtacggtgtcccgaccgtcggaaccaggccccgcaccatccccacggtgctctagcatgacacggttgacccgctcgtggctcggctccaccttcaggctggaagtgtctagaactttcgcctgatggttcttgtcgtcctggagcccgagtcgccgtcatacgcacgctggcgggacttactcctcatccatcgccgctacgctctggatgaacacgtcctctttgaccccaccggcgtggcgccgactgccgcgtgggtgcgccttgacagcatcgtgctcacctggatcgtggggacgatctccgttgacctccacagcctcctccgcaaccttcctcacgctcgggctgtttggcttgccatcgagggccagttcatgggcaacgccgaggcccgggctcttcgcctcgacgctgcttttcgcaccttcatccagggggacctcagtgtcagtgcgtactaccgcaagatgaagaccatggcggactcacttggtgatctgggctgccccgtggaggaccgcatcctagtcctcaacgtcctccgcggcctcggcaatcgctacacccacctccggtcgttgatcatgcgccagcgcccctttcctaccttcctccaggtccgcgacgacctcgccctcgaggagatcactctgggtgctcaggctgtctcgatctccggcatggggtcctcgtcctcttcgacagcactggcggctttcaccccgacccgtccacctactccgtctcagtctgcccttggccctcgccctctcgggccaagcatgggcggcgggggcggtggtggtcgtcgccgccgtgatggccgtggtggtggtgcccgtggcaacgcaccgacgccgggaccccagcagggtgcgccttggcccactttccaccacccgtggtcagggcacatctccatgtggccgttccaggggccaggctctgaggctcgtctcccggcggccatgttcgctggtgcgcagccagggttcgccttcgcctcttcgtcgccctggacctcgacacctgccgcttcgtcgtggcccacgctgccggctactccaccgtccgggctggttggttgggacgcggccgccctggctgccttccagactcccactctgactccgccgatgggtcccgagtggatcgcggacaccggtgctacctaccacaccaccccgaccctggtatactcacctctgttcgccctccttcctctctcccttcgtccatcatggtggcgaatgacttgtgtcttcctgttacatctgtgggtgccgccggccctcccggctcttttcgcattcccgatgttcttgtcgctccttctttggtccacaatcttctttctattcgtcggtttactgctgataattcttgttctgtcgagtttgactcttctggtcttactgtgaaggactcggcaactcggcgccccctactcagatgtgacagcaccgaccccctctacacccttcggcttccacacgccacatcttcgtcttcgtcacctgacacagctgctgtttttgctgccgtcacgttttctaccacctgacatcgtcgccttggtcaccccggacgcgatgccttgatgcaacttactcgtagtgccactatcccatgtactagatcacatgatgagcatctttgtcatgcgtgccagttaggccgccatgttcgtcttcctttttcttcttcctcgcatgctactcatgcatttgatcttgtacacttcgatttgtggacttcacctattaccagtatgtcaggctacaaatactatcttatggtgcttgatgatttttctcattatgtgtggacttttcctttgcgtgtcaagtttgagactttctcgccctccgccacttcttcgcttgggtgtccactcagtttggcctcaccattaaggccgttcagtgtgacaatggtcaggagtttgataactccacctcccgcgacttctttctctcccacgggatgcagttgcggatgtcttgcccgtatacctcctcccagaacggcaaggatgagcgcatgatccgcacgaccaacgacaccatccgcactcttcttctcgaggcgcacctaccggcacgtttctggactgaggccctccacacctctacctacctcctcaaccgtctcccttccactgcgtgcccggcccccactcctcaccaggcactcttcggtatccctcctcgctatgaccacctccgtgtcttcgggtgtgcttgctacccgaacaccgctgccactgctcctcacaaactagcaccctgttccaccctctgtgtgtttctcaggtactccccggaccacaaaggctaccgctgctttgacctctgctctcgccgggtcctcatctctcgccatgtgttgtttgatgagtccgtatttccctactccaccaccacaccaccctcctccgacccttaccttgacgtcttcactctctttccgactgacgcggtggtcgagccacctatccttcctctctctgcaggtactcgatcaccgcctgtcggtcctactctcggcccggtgccttgctcgggtccggcagtgtcgcctacggtggtgttgcctctccgtggagccccgtctccgaccgcccccaggccgagcgagggtggtgggactgcaccgcctacggggccgtcggtaccgacccctccggcccgcttcgcccagccggtgcaggtctaccagcgccggctgtcgccgtcggggtttgcatcaccaccgccgccgtcgccacctctgccgctgtccccatcagtgccctctcctccggcgacactgccggtggcccaatccccgccagggacacctacacctctgccgtggcccgtgtcgagacgccggtgtaccacccaccgctccttcaccacgacccacgacacgtccacccgatggtgacgcggcacgcggctggtaccctgctgcctcgagtcctggcggccacgaccggagacttgcaggtttctccggtaccctcctctgttcgcaccgccctgctaaacccccactggcgtcgggcgatggaggaggagtacgcggcgctcgtcgccaaccagacgtgggatctggtgccccgtccgcccggcaccaacgtcgtcaccggcaagtggatctggacgcacaagcggcagaccgatggtaccctggagcggtacaaggctcgctgggttcttcggggcttcactcagcgccctggagtcgattacgatgagaccttcagcccggttgtgaatccggccaccgtccgcacggtgctattgctatggctagcccttgctcgctcctggccagttcactagctcgacgtcaagaacgtcttcctgcacggcgccctcaccgagaccgtctactgctgtcagccagcgaggttcgtggactcctctcgtcctgacatggtctaccgactcagcaggtccctctatggcctcaagcagccccccccgggcgtggcactccagattggctacgttcctggtgacactgggcttcgtggaggccaagtcagacacgtctctgttcgtccaccatcatgaagcagagattgcctacttgctcctctacgtggatgacattgtcctcaccgcctccagtcagtcactccttcgccgcctcgtcgacgcgcttcagcgggagtttccggtcaaggatctgtgtgtgcttcaccatttcctgggggtcactgctgagcctcgcccctcaggactccttcaccagcggcagtacactcttgacattctggagcgggccaagatgattaactgcaagccctgctctaccccagtcgacaagcaggcgaagctctctgaggccatgggtgacccagtcgaggaccccatcgggtataggagtcttgccggtgcccttcagtacctcaccttcactaggccagacatctcctacgctgtgcagcaggtctgtctccatatgcacgacccccgagagccccacctcgcggctctcaagcgcctcctctgctacctccggggcaccgtcgactacgagctgcttcttcacaggtctacctcctccgagctggtcgtctacaccgacgctgactgggccgggtgcccggacactcggcgctccacctccggctacgccgtcttcttaggcggtaacctggtgtcctggtcgtcgaagcgccagctggtcgtctcccgctcgagcgtcgcggcggagtaccgtgccgtggtcaacgacgtggcggaggctgcgtggctccggtagctcctcgccgagctccacagtcccctctccaagagcacgttggtctactgcgacaacgtcagcgccgtctacctctccaccaacccggtgcagcaccaacggaccaagcatgtggagatcgatctacacttcgtccgagatctggtcgctgttggtgatgttcgtgtcctccacgtcccgaccacctcccagtttgccgacatcttcaccaagggtattccgtcctcgaccttcgccgagtttcgctccagcctcaacatcagtagtggctagttgagtctgtggggggatcctagtccagtctgtaaactccgctgcgacggaagttcagactgcggggggtgttagagtatagggttaggcccatgtggcccatgtacaaacactatatagctaccctctggggttagccctaataatatacaattattacctgtaacagtttttggttgtaaatgcttcattcttaacaagaaagtcaagagccctaataatatacaattattacctctaggggtagcctgaattcctcatggatttgtttctttatgcttgtttctggcctccgtaaggagcgtcttttgtattatgttttttccctcttcttaatataattaaaggcgcagttcccctgcgctttcgagaaaaaaagagctcgaagtttgctcctagaatggacgagggtttcttgcttggttatgcatcaaatgcgcatggatatcgcattttcaacaataccaccggtcttgttgaaactgcgatagacatgacatttgatgaatctaatggctcgcaagggcatgtttctaatgatattgcaggaaatgatatcccacctaatgaagccatcaagaagcttgcaataggtgaagtgaagccacaagaaaaggacgatgatgaagggagaatttgatacaattttgacatcatgggaaaatacattcagaggcttcttgatttggcttctcttactaatcaacgcactattgagactctcatggagctcaacgtttgtcttcgtggcattgatagcgaacatcttgtggttcctactcgctatcgtcacaatgttggtagtctggtctacctttgtgttgctcgctctgatatctcgtatcttgtgcatattccgagtcagtttatatctgctcccactcagcttcttacagccccatgcctactgtgatgcgatttggctagtgattcttcgatcgtcggttttttttctgcccattgtgtttttcttggtggttcccttattgcttggaagactaaaaagcagttagcagtttcacgttcaagtacaaaggcatagttgcgtgctacaacttttgcgacgtcaaaggtgacttggctacgatggttgcttgcagatttcggtgtttgtctataacgattactcttttgtctgatagtgtgctattagtattgctcatgatccgataaagctcgagcttactaattatattggtgttgatgattcttatactcgaactcaagctcaagatgatgtcattgatcttcttatgtgccttcaggaatagttggctgatttcttcaccaaggcgcagaccagagctcaacatcgcttctctctctccaaactcgctgtcttgggccgtttacctggcactactgtgtacaggaatacattgcagtaccctgaggcttatacgtataatgggatagtagtggttcgaattgatgcaccgatctactttgccaacattagctacatcaaagacaggttgcgtgagtatgagctcaatcttccaagttcaaacaagggacttgatgttggaagggtgtattttgtgatcctcgagatgtcccctgttacatatattgattcgagtgctgttcaagctcttaaagacttgcaccaagaatacaaagcacgccatattcagattgccatagctaacccgaaccggcaagtgtaccttctgttgtcaagatcgggcatcattgacttggtaggagctgggtggtgctttgtgcgagtgcatgacgccgtgcaagtgtgcctacagcacgtgcagaattcatcttcaaatgcgttgaagctacccgtgcaggcatcaggcgtgttgaccgattctgtttcgactcctaaaccagagcagcagcatcaaaagcagcacggcctcttcaaggacctatggaaggcacaggacagtaacgcggatgctggtggtgaggtgcagccactgctccggcaaaaccttgtgtaatactcctacaaaatacggagtacttcctgggatggactcacgccctcgctggcctatacatatacgtgtttatttatttgtctatgttgttgttaacatggtatcgtggtgaacaaaagaaactgaacatgccattgttactgtggtgtggcgttttttgtacacttttgatacctaaatggaactcctatgatttgggtctggaaagggtgtgtgaagatgttttgttccaggttttggagttccgctcccagattggcttgacaagcatgttaattccatgaactctcttccacaaaaacagtacagctgattatcagttttatgtttagaatgagaaaatagccctggc

SEQ ID NO: 31955 - DNA, 2774 bp, Zea Mays
  misc_feature (1)..(2): n is a, c, g, or t
nnagcgttccagcggtatgacatgatcccacagaacgctttgagagtagcagaggaaggaggaacgaggaagggtttatagtttggattatatgattggatgatcggatggttagtagtttggattggaagattggatcacatcgcgtagtccacctctcctctccagtttccacgagaaaaaaagtggatcctctttcccaccaagtcaaggtttgtgaattcgggagtgctagaatcttgatcttccacaagagaatgtctccagaagcaatggataggcttctagaaaaagataaagtgccaaacccatgctatagagtatagactgagtttcaacattggaaggctcaactaaatataccagttccggatacacactacaggacaaaggtgcacagcacccgatagcgcgctgccttttttagtgtagaactagaaaaccaacgcacaacacaaaccagagagttctccatggacgtcggtggcggcgccaccggcacacgctgccgagaccccaccgctgacccctcgtcccagttcttcgttgacgctggccatccatacgcagtcgctgcagccactgcgctcacctcccaccgcaccaagtccaagtggtcccacctctcttcggtccccgtcccctcccccttcctggcctccgccgccgccggcgtgctcctcctcctccgccaccgaccgcacaccgcgctccgcttccatgccttcgccatccgccgcctccttccctcccgctcccctccccctctcgtcttctctgccgccgcagcccacgtcgcggcggcctcccgccttcggggccctgccctctccatccttgcctctgcctcccgccactgctcaccggcccagatcttcaatgccctcgctgccacctaccgctgctttgcctccgccccattcatcttcgacctcctcctcctcgcctaccttcgctcccgccgcgacgtcctcgctgcggcctccgtcgcccgccgcatcctcgctgccggcgcacggccgctcccctccactgcggcagctcttcttcgttcactcccttccgccaccgcggccctcgacatgtatcatcaaatctacacgcatccaagtccacggagcaatcacctcctcctgccgactgttcacaccttcaattccctcctccttgctttccaccgcgaaggcaagtgtgatgaattcaagattgtgctccaggaaatggacaaatattcctgcaagcacaacgtgtgcacctacagcatcaggatgtctgggtactgcaatggcgggcatgtggataaggcgcgaacactatgggatgagatgattcaggaagggatccagcctgatataactgcgtacaacacaatgattagtgggtattgccattctggggaggtaggggtggcagaggagatgtttaaaaatatgttgatgggtgggattgattcaagtgccacgacgttcgaatggttggtcagagggcattgtatggcacgggatgtcgaggcagcaatgcttgtgcgtgcagacatgaaaaggaaggggtttgggttggcgccagaggttgttgaggaattgctggatggattatgtcaaaatgggagggttgaggatggcttgagtgttttgcgagaggagatgaagagggaagaatttgtgccaacccggaggagttacgaggtgttgattatggggttttgtgatggagggaaggtggaggtggcaatcagactccaagcagagatggctggaaaaggattcactgctggcagcgaggtgtactatgcatttattagtgcttatgagaagtctgaaaattatgagatggtcgagaagttgaggaaggaaatgtcggcgatgggcacttagagcatgtctagcagctcaccaataattcatccctaataaaatggtattggtggtcaccaatagtgctttttttggaatattggggagactctatagtagattaccaataatctttcccaatacatgggacccacatgtcagaatagaggatgtgggaggaagaagatgacgacagttgttgtggtcccaacacctatagagggagatgcaactccccttttatttgaggggagatgggagatttgttttggtgaccaccaaaaaaagggagagctattggggagctgttggagcaatggaattgcctcatctcccccaatatgacagttttatggggatgagggatggtattggagagctactggatgctctatcggatctgatatttggcttggatattgcacagtgatgcatggatatcaacctcacctaattgcagttgagaactatgagtggtgcaacaaattctgaattggttgaaggagttctctcctagcactatcctggagacggatgttggagaaatatgactgctggatctgcaataggataatgtcttttagtcgatcccttttgtgcttgtttggtgaacttgtgtccccaatctgttgaactctgtaaacatttgctttccataaaagcagagatattctccttaaaaactcagtccagaatggtgatatatgaatgatccctgagagtttataaggtacaaccgtacaagtccaggtgctagagacttctcaatttgctggaaaatgctgtagtattttgtgttgacttgctgtttgatatatgctcagtacctcactgtaaaatgtggttctcttgtttgcctcttaacaaaatcctgagaaatgacatgagaacaaattgagaattagtagatcagtacttaac

SEQ ID NO: 31956 - DNA, 2471 bp, Zea Mays
gaaaggaatagataccagagaaattcctggcgtgaaccacgggtgttgttcacatttggtaccagagccaatactggatcctccacacgggtactggacgagatcgcaatcgaagttgggcggcatggcgccagcgaagacggacgatcctttgtcccagcttctggcgaagatcgaggagggaaacaaggagactcaccgacgcatggaggcgattcagggggcggtgggaaatatggaggcggcggtcaaggtggtgatgacggagcacggagatcttcagaagtggaaaccggaggtggaagcgaaagtgacggagatttctgatgctctaaaggcgatccagatccagatgggaaagatggagaagaagccgctcggtttcgggtcgagacaggaagaagaaggagaagacggatttctgaagccgccaccatctgattcttcgaatttggagtttcgtcgtgaagaagggcggacccaattctcgcatggaggtgccggaggaagttctggagtccaggcttcttcgtaaagggggtaaggtgatttcgcagttgctcattaagtggtccaattggccggtgtcactgtcaacctgggaggatgaagaggccattaagcagaaatttccacaagcaccagcttggggtcaagctgtcgttaaagaagggggaaatgtcagcagagcagatcacatggaccatgcagaggagcggactcaagcagtgcaacagaaggcacagacagagggagtcaaggaagacaatcagagcccgcgcagccgtcgtgtaccaaagccaaataccaagtacatcggtgcagagtggcgcgtataggtatacggagttatacgtattgatgagggcaggtgtgccggtataaataatattgtaatcgtttctaaactcagtctggaacatgttattgccgagtcggcaagaaaggaatagataccagagaaattcctggcgtgaaccacgggtgttgttcacactcgctgtccctgcctgactcttaaaaagggcggcgtgtcaccgcctggttactcacagtcatagattcacgccgcggaacgcggattccaagaacccaagtgaatcgcggctcctcgagtccggcggtgccgtccggagaggtagagctagactgctagagcacagccccgccatggcggccgcggcgcgcgcgatcatctgcgagctggcgccgcagaaggtgtcgtcgacggcgtcggggcccgcggcgccgaagaagcgtgacgccgggacgaaggtggtgctgcagccccgcctctgcacgctccggtcgtacggcgccggcagcggcgtggtgacgcggaggattctggccggggaggaggacggcagcggggccgccgactcgggcggctccgcggcgttgccgttcttcgcctcgctcgctgactacatcgagagctcccgcaagagccaggacttcgagaccatctccggccgcctcgccatggtgagtgactgatgagggcccgctctgctctgctctgctctgctgtctgctctactcctccctgtacacagagtacacgtcggatccacggcacggctgaattaaacctcgcgctgccggtgctgctacgtacgtacgtacatgcaggtggcgttcgcggcggcggtggccgtggagacgacgacgggcagctccctgttcaagaagctggacaccatggagatcgaggaggcggcgggggtgtgcgtggcggtggtcgccagcgccgcggcgttcgcatgggcctccagcgcgcgcaataggatcgggcagatgttcacgctgggctgcaacgccttcgtcgactccctgatcgacaatatcgtcgaggcgctcttctccgagggcgagctgcaggactggtccgatgacatatgaacatgcacatgcatatatagagactaatagtagacagacagtaatacagtatacgtacatacatagagtcaactattaacagtaagacactaggtagatgaagttgttaagtgagttccatgcattttcgcaagcttcgtcatcgctgcacaacggcaaggctgaatatttcagagatggatcgttgattagagctccgcattctgcgtaggaacacacaagcagggatgtctttcagaagtgaggcggctcttaaagccttcaaggttgtgaaatatgtagatctcttctcttgggagaaatagtggtatcctactatcctaggctctggaaagattggcccccagaattaactgtacctgctactagtactactagctataccgagtgtatttagagaatgaatcatgtaatcaaatccatgtaatatatgccaagtgtagtcagagtcaaatctggagtattgattcttgacattgtaccacatggagtggaaatgagagcctatacaccgcgtttctctagcctatctccagctacccaaacgcctgtgcatactcattttt

SEQ ID NO: 31957 - DNA, 1725 bp, Zea Mays
attgcccactaaggcatcattccgccaaagacccaaagtggcaaacgcccaaatcgacaaaccctaatgacctaatccccaacccccagccggcagccgccgagcaaaccagctcatccggtcggtcatccactcatcctcatcccctgcccatctgatccgatcggtcatctcatcctcatcccctacccgatcggatcccctgctcatccgccgagcaccaccaggcagcaggctccagtcatcgagcaccagcaggagcacggcgcgctgcccagtaggagcacggccaagaggatgacgcccgcatcctgcctcttctcctctgctactggagcctctactgctaggagcacggctaggaggacaacacccgcatccagcaggagcaccagcaggaggaggacgcccatgctgctgccgttgagcgatgatctgatgcgcccccatcatggctcttctcctccctcacggcctcgcctcgatctgctgctgccggtgatctgctgctgccggatccgagcgccgtgcccacgggtcacggccagcgatatgcagggatcaagaatccaactttgagaaaaattgctcgagatgtaaatggcgccgccggagtaccagcagtacctcgtgcaggtgaccaagtaccaggccgcacagaactgcaaggtacgtatgcacacatggttacatttactatagaactggaattatattttgatgcaaaggctgccaggtcatggtgatttcacgtccgttaggctcgagaggtggactcaaacatgacatccaagttttgcaagttttgatgttggatgttaaatttctatgctcacccctcgtttggttattgatgtactatttccatctcatgtcacaaatttggcataaggaatgggtattggtggctactgactgtgtttgtttccacgtattatacatgtacaatggaacagttgataatagttttgcatgaactattggtgttggctatctaaaggacagaaaggcagacatgagcaacagatcccgctccatgggctgaaactgggattcgtgatggcagaaagtgctactgtcgctctcaattgtagcggtgtggtactgggatccttgccaataaggctaggggattgaagaagcacttgaagaggctcaatgcgcccaagcattggatgctcgacaagcttggcggagcttttttcatgctctgcaaggtgaggtctgttcagtttggccagaaaggtatcccctacctgaacacctacgatgatcgcaccatccgctaccccgacccgctcatcaaggccaacgacaccatcaagatcgatctagagaccaacaagatcatggacttcatcaagtttgacgtcggcaacgtggtcatggtgaccggcgggaggaacaccgggcgtgtaggagtgatcaagaacagggagaagcacaagggcagcttcgagaccatccacgtgctgcttggagctttttgctatgtctagttttttcctatttgttgtacaagaaaacataaaatggaattcaactttggtggccgcaaaagtttagagacttgatttcatataaagttaggctgaacattactgcaaacagttgtattttagtttagatttagagtacacttatgtatgtgttgtttgacaatgcttatttatgatatattgaatggtacttatttatattatattaattataatgttgttcaat

SEQ ID NO: 31958 - DNA, 2240 bp, Zea Mays
ttcccgccatcccccagcccaacacggtgccgcctccctcccgcaccccggccttctctgcctcccactcactcgacgcctccgccgccgccgccgccgggatgaagaaccccgacttcactgcagacaaagcgctcgccaaggacttcctgtccaacttcgtcggccctcacggcgaccccaagtacctgaacatcctgcaagatgtcgccaacaggaagatacgcgcggtccagatcgagctggacgacctgtttcatcacaaggacgtcgatgaggagttcctgcagcgtgtcactgagaacacgcggcgctacgtcggcatcttcgcggaggccatggacgagatcatgccggagcccactgaggcgtacaccgtcgacgaggaccgggacatcctgatgacgcagcgtgtggacgagggggtggacggcggcgcggacggcacggacccgctgcagagaatgccaccagatatcaaacggttctttgaggtttacatcaagacattctcaaaggcaactccactcaccattagacaagtaaaggcatccaacattgggcagcttgtgaaaatatctgggattgttactcgctgctcggatgtgaagcccttgatgcaggttgctgtttatacatgtgaagaatgtggctttgagatataccaggaagtgactgctagagtgtttatgcccctcattgaatgtccatctcaacgatgcaagctgaacaaagcaaaggggaatctaatccttcaattgcgtgcatcgaagtttttgaaatttcaggaggtgaagcttcaagagttagcagagcatgtacccaagggccacattcctcgttctctgactgttcatctaagaggagagctgactagaaaggttgcacctggagatgtggttgagatgtcaggaatttttctccctatgccttactatgggtttagagcaatgcgtgcaggattagttgctgatacttacttggaagcaatgtctgtcacacatttcaagaaaaaatatgaggagtatgatctcaaaggtgatgaacaagaacaaattgacagattggctgaggacggtgatatctacagtaagttggcaaggtccttggcacctgaaatatttggccatgaagacgtcaaaaaagcactgctgttactacttgttggtgcaccccataggaagctcgcagatggcatgaagatcagaggcgacctgcatatatgcatgatgggagatcctggtgttgcaaagagtcaacttctgaagcatattatcaatgttgcaccaagaggagtgtacaccactggacgtgggagcagtggtgttggtcttaccgctgccgtccaaaaggatccagtaacaaatgagtttgtcctcgagggtggagcactggtactggcagatatgggcatttgtgctatagatgagtttgacaagatggaagagtcagaccggacagcaatccatgaggtaatggagcagcaaacagttagcattgccaaggctggcatcaccacctctctcaatgcgagaactgcaattctggctgctgcaaatccagcatggggaaggtacgacatgaggaggactccagcagaaaatataaatctacctccggcactcctgtcccgtttcgacctgctttggttgatcctggatcgcgcggacatggaaaccgatctcgaaatggcgaggcacattgttcatgttcatcaaaaccttgaatcgccggcgctggggttcacaccactcgagccatctgtgctcagggcatacatatctgcagctagaagagtgattccttccgttcctagagagctcgaggaatacattgcgactgcatattccagcatccgccaagaggaggcgaagtcgaacgcgccaacctcctacacaaccatcaggacgcttctgagcatactccgtatctctatcgccttggcaaggcttaggttctcagaaaccgtggcccagagcgacgtcgacgaagcactgcggctgatgcagatgtccaagtactcgttgtactcggacgaccgccagcggtctggcctcgatgcgatatctgacatatattccatcctgagagacgaggccgcgaggacgagcagcatggacgtgagatatgctcatgctcttaacttgatctccagaaagctgatataagagatgtgtattcttttggctaccaaggacattgaagattatttttttcaaaaaaacggagggactttttag

SEQ ID NO: 31959 - DNA, 968 bp, Zea Mays
ttgcgtatttactgatctaagtctcagttttcacacttatttcttccttgagtatatttaaactgatattctgagcaagcataagcattcagacaaatatatacttttaagcatggcattggttaagatgaaatcccttttgggattttttgtcagatctggaaataatgcgattttttgtaacccttgctggttggccattgaatcataaataacccaggattgatttttgaagatggaaaaaatatggctctggactcgttcaacacggctgtggtttctcctgtatactacgtgatgttcaccattcttaccattgttgcaaacatgatcatgtacaaggactgggcctcgcagactgcaacgcagatcgcaacacagctatgtgggtttgtgaccattgtcgcggggacttttctgcttcacaagactagggatatgggaaatccaccaccaccaccacctgaccaaatgtgcctgcaagaagccggggaatgtgctccacggtcaatgaccagttctagctgaacacactaagatgtcaaaatctcacagcctctatggactgaattggaattttgagctatatggtgacctttgtagatatattaggaaggagtaaagattggagtgcccagcagttggacataccgatgaagttttacgtttctgcaaaagaaagaatgaactgtatgaaggcatcggaatcttgtgaagacatgagattcaaactagctacctaactttggtaaatagcttgttatgccattttaaaacgatcatgatgctcaagaggcagggcgaattaggcttctctatactttttgtgataattaaaccctagttacaaatttaactttacccgagtgtccaatatatgtacaaaagctttaaaccttaatttcaactgtacgttgccatggcaagccgagttacccacctttatggatgatccttgcactttgatc

SEQ ID NO: 31960 - DNA, 3183 bp, Zea Mays
gcttccgtcgccagattcctccgcaccgccatggatgaccttgagcatgtcatccttcttgcctccgactcacctgctgccgcagcggcgtccccatctatccgcgcggaggctctcgccttctgcgcccgcgcccgcgacgagtccccgccgtcgtcgctcctccgcctctgcctgtccggcatcgcctcctccccgcacgctcaagtccacttttggtgcctccagtccctccacgacgcgctcctccgccgccggctcgtgctccccgacgacctcgcgttgctccgctcctccctcctctcgctggcggtttcctctcacgccggatcgccaccgttcctccgcaacaagctcgcgcagcttgttgcgctcctcatccgcctcgagtacccccatgtttacccctcttacttcattgatctcctcccgcccgcaccgccgcagcctggccccacggacatgttcgcgcgggttctaatctctctcgacgacgacctgctctcccaggagtacccccgcaattctggcgaagccgccgacgctatgcgggtgaaggattccatgcgcgcacagtgcgtgtcccagatcgccagccactggcacgccgccgccgtgactctccgtacagccgaccctgcggctgcggcggtggcccttgacgcggcgcgcaggtgcatctcgtggattgatgtcggactggtcgccaatgatgtcttcgttcctctattctttgacattgcgatgtcccctggaagcgcgtctccactcgctgctgcagcggtggggtgcctttctggtgtggcgtcgaagaggatggactcaagggcgaaggtgggattgctgaggtcactcctggctgcacagcaggggcttggtagcccagacaatgggttgaaaatggcacctttggtgatagcatatgctgcagaggctctcgaatgtcatagcaggcttggccctagtgatgctgatggagctgcagcattggagatgctggaagaggtgctaccagctgtatttgcagctgcagagagcggtaacgatgaagatgtggattctggttccgtgcttgagttcttatctggctatgtgagcacaatgaaggcaccatctgagaagcagttggggcacttgggacggatcttggaggtggtgcgggtacagatgtcatttgatccagtatatagggggcatcttgatgtgcttgacaagatagggaaggaggaggaggacctcatggcagagcaacggaaagatttgatcgtattattccggagcatttgtcgtgttgcaccagctgcagctcagctattcataagtgggctgattgtgacagctctctcatctgcagaagctagtgtggaggatgttgaggttgctcttaccctgttcttccggcttggagaagctgtgggtgaggaggagattcggactggggcagggctgataggccagcttgtgcccatgctcctaactgcgaggttctcgtgtcacacacaccgcttagttgcattggtgtacctggagacagtaacccgctacatgaagttcatgcaggagcatgtgcagtatgtaccacacctgcttggcgtgttcttggataaccgtggaatacaccatcagaatgcccacgtgagccgtcgtgcaggatacttattcatgagggcagtcaagtcattgaaggcaaagctagtgccttacctggataccatactgcaggctgttggattactgataggcattgaagaggtatcaccagagaagcaggctcagttcttgaccgctcttctaaatcctctctgtcatcaggttgagtcacttgttatggatgccaaagcacgagggcttgaggaatcatcaccaatggctattagccttcaacaaattattgttgcattgaatatggtcagcaagggcttcaatgagcgtcttgtgatggtaaataggccagctattgggatcatgtttaagaaaacccttgatgtagttttgcaagtccttgtttcatttcctagcgtgagacctctgcgatctaaggtcatatcgtttctgcatcgtatgatcgagatattaggctaaagatatggtggaatttctcgtattggtaaaccaaataatctgcaaatttaaatcgtcagctagcgccatattggaggaaatatttcctactattgcaagtcgtttgtctgcgatattatcacaagatgcattttcagctggtcctgcaagcaatactgaggaaatgcgagaactgcaagagctgcagaggacattatacacattcttgcatgctatggcaacacatgatctttctgcagttctccttactcctagctctagggagtatctggagaccataatgcagttgcttttatttacctcatacaaacatagagatatactactgcgcaaggcatgtgtacaaatttttgtgaatcttgtaaaagactggtgctctaactctgaagataaggttccaggcttccgagtatttatgattgagaagtttgctactaattgctgtttatacagcgtccttgataaatcatttgatttacgcgatgcaaactcgcttgtcctttttggtgaaattgtgctggcccagaagattatgtatgaaagatttgggggggatttcattgtgaactttatagcaaaaggtctttctggagttcactgcccaccggacctagctgaacagtactaccagaagttaaagggaaatgatatcaaggcattcaggtcattttatcaatcgcttgttgagagaataagaccgcaggggaatgggagtcttgttttcagatagcatcatcctttcattttcaatatgttttccaccaaaagatacctcaactgtgttatttaattatatttataggctagttgtgccgtcaatgtacatagagctaccatttctgcgatcggaagacgtattactgcggcattatctttaccaagtctggcaaccatggttgtgcccttattcattgtattctatctgaggtgcaggggaattcatcctgcaatagtttgtactaggaaggaatcacagggttccattttcttattttgcctatatccccaaatcataggctgttctgctgtctgggcctgaaattttgcaaggtacttccagtgaactactgcctccgttctcgaatatttgttgcccgctag

SEQ ID NO: 31961 - DNA, 1900 bp, Zea Mays
ctgaaaagtctgacacgttcgccaccctcattcacttcttcgcctgggtctccacctagtttcgtcgcccggttcgcgcccttcagtgtgataacggccgcgagttcgacaactacgcctctcgctccttcctcgcccacgacgttcagttgcagctctcgcatagttgttaaagcggcaaggcgaggctacattagcgctgcaattggtgatggtccaggatgtttgtcattgcgatgccctgatccatcttgtagtgctatggttcttcaagggatgattaatgaattagctaaagatgaggatagaaaaaaatatgcacgatttctcttacgcgcatatgttgaaggtagcaagaagactaaatggtgtccagctcctgactgcacatgtgctgtggagttccttggtgatgaaaactatgatgtttcatgcaattgcatgttcagcttttgttggaattgcactgaggaagctcatcgaccagtgaactgtgagactgtttctaagtggatattaaaaaacagtgcagaatctgaaaacatgaactggatactggctaattctaagccctgtccaaagtgcaaacggccaatagagaaaaaccagggatgcatgcatatgacatgcacccctccttgtaaattcgaattttgctggttatgtctgggtgcatggtcagatcacggagagagaacaggtggcttttatgcttgcaatcgttatgaatcagcaaagaaagagggagtttacgacgagactgatgcaaggagggaaagagctaaaaactctcttgagagatatatgcattactatgagcgctgggcatccaatcagacatcgaggcagaaggcccaagcagatctgctaaaagcggaaaaggaccagattgcaaatttaactgacattttcgggataccagagacccagcttaagttcataatcgaagcttggtcacagattatagaatgcaggcgagtgttgaaatggacatatgcttatggctactatctggatgataagatcaagagtgaattttttgagtatctgcaaggtgaggctgagtctggtttggaacgcctgcatcagtgcgctgagaaagacttgcaaatttttttgccgtctgtgaaatctgacagcactgaaacaacgacacctacagtggctgaatttggtgaattccgcgtgaagcttgctggacttacaagcgtgactcggaattactttgagaaccttgttcaagctttggaagctgggttggaggatgtccgtgccacaggccaggctgctggtacatccagcactgccaccagctccaagaaaggaggaactaaatccaagaagaagcagcacactgcaccatcatctgaccacactgatgatgggtggccctgcgagcgctgcacatttcttaaccctcctacagtggatgcatgcagcgtctgcgaaaagagtaggtactagatgatggaatagctcaaagggagccagggaggcatcccaagaaaacctcaaagctcgtgagaagcatgcatgcatcggatgctgagaagaagagcttccagctgccgcaatgttgtacagagagttattttagggcctcggttggaaacggtgtggaggctcaagtggtcacatgtttgtgggggtcatttggttttctagttcttttctgttgttccttgtaaatatatttgttgtgatgtggtgacctgtgtttatgtgatgagtttttgtttctgacaaactgtgaaattaaactttaacaaaactgatgagaggtagctctgtttattccctcctaattgcgggcagggtctttgtctattcttccacattatttatctacggttacttgccaagtaaccatctgctagtgctggtcaatgttacttcaaag

SEQ ID NO: 31962 - DNA, 1608 bp, Zea Mays
tccaattttaaagaaattatgtctcagaattaatggttgctgctggtgacacattgcttggtttgtatgagaaagagcggttaggcctgttgcagtatgccgacgacgagtctaaagaagagaggtactgggaaaccttggatgctgatttgcgttactggaccagatccctgcgcccagtgcagtggtatcctggtcatattgcaaaaacagagaaagaattgaaggaacaattgaggctcatggatgtcgtcatagagatccgtgatgctaggattcccttgtccaccagccatcctaagatggactcatggctaggcaaccggaaaaggatcatagtcttgaatcgcaaggacatgatctcaactgaggatatgaatgcatgggctacttactttggtaatcagggcatcaaagttgttttctccaatggccagctgggtatgggtacaatgaaattaggtaggatggcgaaatcagtagcatctgttgcgaacacaaagagaaaggagaagggattgcttcctcgtccggttcgagctggaatagttggatatccaaatgttggcaaatcttccttgattaatcgcttgctaaaacgaagaatgtgcccagcagcacctaggccaggtgtcacaagagagctgaagtgggttcgttttggaacagacctagagttgttagattcacctggaattttacctatgcgaattagtgaccagacatctgcaatcaagctcgctatatgtgatgatattggagaaaggtcatacgattttgctgatgtggcggcgattcttgtgcagatgttgataagacatcctgcagtaggttctgaagcatttcgaagacgatataagattgatgtagatagtgagtgcggtaaaacgtatgctttgactgatcctctcttctttatccaaaaaatgttattctgacatagtactaggagttaattttctgatgaagttttctataagctgcaggtttgtcacaaagctctctgttcacttgttcaatggagacacaagccaggcagctttccgcatattgtctgactacaggaaaggcaaatttggatgggtagcgctggagagacctccaacatgaacaagcgggatatcatagatccttagataaaagacatgtgcttgttcatgtagtatcacacaatttagtgtcgttcattggaccactctcgacagttttcactggacctgcacatatacgaggaattaattcagaatagctgtccatctgatgatctaaagacaaaacttaagaaatgctcctgctgttatcagacagtccagagcaaacgagctgatttgtatgatctattgaatgagctcaactatgtttctatgtaacggaattaggtttgagaaatgaaagattgtatgtctcctaatttagttgctcatgtactttgttcttttaggaaaagttgctcctgtacttctggatgattcattagattcgggaactggtgtaacattttaggcccagacaatagacatccctctacaaattcagtttccctgcttttaagttttctgcaaaaaaatattttctcccttctaaactataagtcgttttggcttttct

SEQ ID NO: 31963 - DNA, 4963 bp, Zea Mays
gtggtgcacggttctgcctttgttccgcgcccctgcgtccggaaatctcgccgcgcccctgcgtccggaaatctcgccgcgcccctacgcaatcacctcctcctctcccctcactacgccgccacctcctcctctccccctcactgcgtcgccctcctctcccactcactgcgtcgtcccctggatcctcgccccagcctctccaaccgcctccgcgctgtcccctggatctcgcgtcgcgcgtctgcagcacgcccgccacacacgccgcgattggagattggtggaaagcggtccgcggcttcaactccgacatctccggcgagctcgagcgcctcgctgcaacgacgggggcgacgctcagatccgacgtgccggacgcggccgccgtggatctgaacgacctcgagtccatggatctgtcggcggacgctgctccgctggagcacatggagccgttcgtgctggcatgcgcgcgggtgctgggcccgacgccgggccggacgcgtggcgtcgccgacggccgggtcgtcttctgggacggcaagcggtgggtcccattcgcgacggcctctccgcgctggacgcaggagctctgcggcgggcccaaggcctcgccgctggagtatctccccacgcccggcgatggcgccctgcacctcacgcccgtgctccgcccccacacccagcaggcaggcatggatctcgcagggcagggatctcgcggatcacgccgtgcggggatctcgcggatcacgccgggcggggatctcggccaagcctgatcagaagtttggggccctatcaaagcgattcgcagaagtggaggctgggggatcgaagcggaggtggtggagatgacggaggcgctgaagtccgtctggaatccggtgacacagaaaaagatcagagtttctccttctacttcgtcgggtgaagtcccggtggtggacaacacctcgacgctgatccctctggaagctgcggcaggcattgctggtgccgatgcaacccacatttggcattcccactccaatcgaagggtttttggtgtcgctgaacaggacactaggcttctgctctgcttactaatccattggtttcaagatgacagaagccgtcatcaaactgaatacttcttctaactgaatacttcttcccagctgacagatcagatcaaacttgacgtgtgttaggtatcagagaaaaaaaccaaggcatggtgcacttctaaagagcacatctgcagctgcccgctcgggctccgtttcgataagactagggacctgtacatcgccgacgcctacttcagcttgctcaaagttggccccgagggcaggctggagagttgctgtgaaaactctcaagtgagggaacatgatcatgtgcacgcaagatcctgatgactgttggcagaatcaagtcatagttaaataaacaggcccccacccgacggcgcgagcgaggcacgcggccctcccggcggggtggacgcggcccctggctgtgaggcgacgatggggctggaggctgcgatggcgctgggcgacccgccggcggactacgcatccatcgcgacggtggggctgttcgtggcattcatgtgcgtctgcatcgtcgtcgggcacctcctcgaggagaaccgctggatgaacgagtccatcaccatgctcttcatcggctttgggaccttgatgttgcaatgctgtatgttggggattgcaggggctgggaactagagcagtcatcctgttcgcgtcgagcgagaagcattcacgtgtgctggtgttcagtgaggacctcttatttatttacctgctgccgctgatcatattcaatgcagggttccaagtgaagaagaaacagttctttcgaaacttcattactattacactgtttggtgcagttggcaccttgatctcttttactgtaatatcccttggcgctctaggactaatatcaaggcttaatatcggcgcacttgaactgggagactatcttgcacttggggcaatattctcggccacagactcggtttgtaccttgcaggtgttaagccaagatgagacaccattcttgtacagcctcgtgtttggtgaaggtgttgtcaatgacacaacttctgttgtgttgttcaatgcaatccagaactttgatcatggaaatatcagcggtgccaaattactgaacttcattggcagtttcctttatctgttcggctccagcaccattcttggagtagcttctggacttcttagtgcttataccattaagaagttgtactttggcaggcattcaaccgatcatgaagtttccattatgatgctaatggcttatttatcttacatgctagctgaattgctcgatttgagtggcattctcactgtgtttttctgtggtatcgtaatgtcacactatacttggcaaaatgtaacagaaagttcgagggtcacaaccaagcatgcctttgcaacattgtcgtttatcttcgagacttttctgtttctttatgttggtatggatgcattggatatagagaagtggaagattgtcggtcaaacttataggcatactctctccctctttctctctcttcattgctcaactagaagatctttcttctggatctgtattttctatcatgtgcagcccggtaaagtctatcgctttgagcagcaccattttagccttggtgctggtttcaagagctgcttttgttttcccactatcctttctatcaaatttgaccaaaaaactccaaatggaaagatatcttttaggcagcaggttattgtttggtgggcgggtctcatgagaggtgttgtgtctattgtgttggcttacaataaggttaatcttgtgtttggtctatctggtttgagctttggtctggaattatgttactgcttttgtttcctctatccattccaaaacataggacattttttgttgtcgtaagtcaaaaattctctaactttgacagagtttatagaaaaacaaaccaacatcaacagccttcatttcttaatcttatatagaagttgcagtattttagtctaatagatggacatgttttaaattttgaggcattgaaacaatttgcatcatgaaggcgttcgacttaatgtttccaaggttctgtggcagtgcgaggcattttgggaggtggtgagcgcctcgcttggcaccttcattttcgtgatgatgctgtccttcaggctgcagtgccacacaagttcgtttggtgtaggtgctgcttgatttttggcggtgcatgccgggtgttcgacaatgtttctgaggttttgtggcagtgcgaggcattttgggagggacatcatcatgcccaacttgaagtcgtccgtgaccacaacagcgagcgcggtggagtacatggatgaagtattgaaggcgttgtcgccaggtagtaccttcttcccactcatgacactacctcgtagacaacacaagtctagatgttgctggtgcagctgttcaacacgggcaaggtgctgttttccaatgtggtcgtcgacggcggcatgttcgtcttggccctcctcacctaccgcagcttcttcgcggcgccatcattctccctgtccgtctgattttctatcaggttgctcgatcgtcgtcaatataatccgtgtcaacaaattttaatcttggttcataagtaaagaacagaaaaggaaaacctagatgtctataattatacgtacatcaaatctaatgattttaggtacatattttctgtttgccattgcaaaatctaatcacgtgaattttatagttccaatcggggctatgtctatgtactcttatttttgtccagaacccttatgtaaggggaagtggaaagaaatggattggcacactgctggatggatcttcctcaatacgtttatcgaccgccgccgccgacgacggaggagcagcacctctcgtctgtccaccgctgaccgctcgtttgtcagcctagcaccggggtgcatgaacgcccagtatatgctacagcaccgccgcccctggccctgccgcctgcgccggtcgttgccctgtgcactccgcgggcctcgggaatggccaaccaggacatttatcggcctgtgcttgtgcagaatgcaccaaggacaagactggatgcagggacatgggggacgatggggattggattggggtactgtattgcagctgcagtagctgaacctgaatgactcgtggttgctgtggagggcgattctggatttggcttcggtgcaatggaggttgaggtacgaatacaaacatgacagcttcactttgaaagactaatctctactactctataagtctgcatgggttgctttatagtttgctcttagagttattggtcaagctgcttcttgtatctctggaatgcgatattatattggttaatataacaacatgcaccccttgaattttaaggtgaacaggggcttcaacagtgatgctgttttagcaatggagacgatccattccctgtcagcttcaaaatcaagttacccaatggctgatctcacccaactcttcatgacagctactcaagaagggaaaagatcagaatcgcaaggccagattcttagggtggaatgctatagcttaatgccctaatctttatatgcctcttcttatatctgcacttccatgggcaccgggcgacactaaattcacaagataccccctccacctcaaggtgtaagaccatagcttccatcgctctttacgttatgtaatatatttgtagtatgctaatttgattcaccataatccttaccattcatactattatgcttgtttttctctcttcagtaatcgtcgaaaatggttcattgttcatagctcaagccaacttaattttaacgcaaaaatgtagcagtacttaaagtttcatctgtaatttatcaatggataagtgagttagaaatagtatttatca

SEQ ID NO: 31964 - DNA, 234 bp, Zea Mays
ttttggcttttttagtttctgactatcaaaaaaagtgcagactgtcaaacgctcagctttttaacctgcttatagaatcaacatgaacatagaatcgagcgagttgttgtaatagtagaaatctatcactttctagatcatgaactctatagatatcttcatctttctccgcacttaatccacgcgatacttagattctccctatagtcaaattctcgccacaaacagatcctc

SEQ ID NO: 31965 - DNA, 2391 bp, Zea Mays
tgctgtttgcctgttctgcaacaaagattgataattttaggagctatgataccgtgagcaaagatgtaattcaaaggtggacatatcctatggtgcctgatgtagtatccagtcgtgattcctcggagagtagacttcataggcagggaatatacaaggcatcagatgtaacattgtcaccttctgcacaaatcggtgcaaattctgttgttggtagtgtgactagtattgcaggtcactgcaaagttttaaattcagttattggacaaggctgcaagattgggaaaaatgttctgattaacggctcatttatatgggacaatgtcataattgaagatggatgcaaagttagtaactctttagtctgtgatggtgtccatctaagagctggtgctgttgttgaacctggttgtgtactgtcatttaaggttgaagttggaaagaatgttgttgttcctgcccactcaaaagtttcattacttcctcagccttcaaatgaagatagcgatgaagaacttgagtatgctgacactaactctggaattgcagatagtccaccattttccagtatgaggagtaatggtgatcaagcaactgttccttcagaagaagatgagttgggaacatccgagactggcacctgtggtgttgtcggttacatatggacaagtgttgatagtgggatcatggaagaatggagacaatcaattgcccctattcctaaagaaaagcttgaagagctgcagcatgctgtgcctgatgatgataggtcagaagatgaatccaacaatccaactctaccagataaagatgattcttcagacagtctggttgaggatgatgatcatatttctaagtttgagaaagaggtggaagagacattccaacgagctctgggtggcggcgttaatcgagataatttgatactagagattaatggcctaaggttagcctacagccttcaacatgcagattgtgctggagctgtgttctattctgtcatgaagagtgcattactggctgcacaatctagtaatgatactcttttgaagacaactgctgatgcacttggcaagtggaaggatcttttgcgcaattacaccaagacagttgatgaagagatggagatacttttaaagtttgaggaaatgtgtcaagagaccacaaaagatttttctccgctgtttccaaagatcttgccatacctctatgatacggaggtagtaagtgaagatgcaattttgagatgggcggaagagaaagaacatgctgatgagtctgataaagtttttgttaaacagtcagaggcttttattcagtggctcaaggaagcggaagaggaggatgacgaagaagaggaataaccctggagttgagctggcactcgaattctttcatgcattgtgagcgcaggatctgatttgagtgggtctctcggtgagttctcgcgagcagcaagttttgcaacctgtaattgcctgtacatcaacacaacacaattttgtccctaaccgcaactggtggagagtagcaaggagcgatttggcgtgaatgaaccaaaatgatcccagtgtagatgacatgctataactgtgctatctttgcttggttgacgcttgggcgaagtcttcgccacatttgtttaactggccatcacctgtttcttggcacccagccggcactcgcacagatctttaataaaagcttgtttagatatggcccccctttttttatcttctttctggtgagaaatgtagtgggaaagaaacaatggaggcttcttctccgaaaggtcccagtggatcatgtgggttgcgtagatcaggcactaatcttacctcaaaaggggcacagtttgcttaaagcacgctcttttgccccgaaaacctttgatgtttctttattttttttcgccctagttccctgatagccctgcttgctttgtgaaacaactgaacaatgggcagcaaaaatcgaaggacgatgaaaaaaccagaagggccctgggggccaaaagaagaggaaaaagccggcaggagtagcagtggaaggttgcacttgcactgctgggctaagcaatctcgctgtgcgttcgcacatcttctgcagcatgtgctgtttcgagtttataagctgcatactgtgactagtgtgcattgtttaatgttggtgatggttttactatgaccatgagaagagaaagcatgcagttttcctaatactgtttgacctttgtaatcttctggtcgtaaagagttaccgcggaatcacactggacaattcgtcgataagaggaatcgcattttggacttgggatgtgttctgtgcggataagaggaatccatctttagttctggttctgacctcacagccacgctggtcgatcgagat

SEQ ID NO: 31966 - DNA, 304 bp, Zea Mays
ccgcaatgcaatgcatatgacaaattgaatttagttccataaattaatcatgtgagggtcaaagctgctcatgaccgtgagcacggctgatataccagttttacactctgcagaggttgcacatctttacccacaagttgtgttacccatttgccacggggttgatcggaccccatacacctctaccaaggaagcgaggcagggtagcactacgaggactttacaaagatccactagcttcagaaaaacccgctatagtttctaggacgctccaatacagggacccctcgcctgaccgccatcg

SEQ ID NO: 31967 - DNA, 3792 bp, Zea Mays
tgcatctagaggtggaacctactagagacgtggtaccggggcgagggaagggtgagcatgtttgtagatcttgcccataggggaccagtcgtcccgagttgtaataggaaattagtgtaggggtgagttttttgtgtgaatcccgctggctataaaggaggatgtgaaacaaggaagtctatcgattgaaatttgagacaaagaaaggcaaaggtaacgggtgactcctcgcgtcttcgaggagcgtgcgacctcaccgccgccgtccatgcccccaccctgcccttgccccctagcttacaccatatgtgtctagcggcttctgctgctttgtcgcgccacccgcctcctcccccaacctctcgaccactccatccccaatcatctgcatcgtgacgtcggcgccctcaatgtcgcacaactgtcatctgccaccgtactggtagacgacgacccctccgcccttcccgactctccggcttgttgtctcgtccgtccgtcacctctgtatcacggccgccgtcgcgaatccctcttctagcgccgccggatgccgtcgtcatcgtcttcggtgccgcccaggccggagaatgtccaggacgtcacggctgatgcgatcaacggattccctgtgctcaattctggcagcggcgccggaggccatgggcatgggcacgcgactgccggaacgtatgtgcggccctccctggccgccccattgccttcgccgacggcgcgcgccatcgccggctacggctacggctacgcagccaacaccggcttcaacgccgcgaacgcaatggcggcacgttctcccggtcccggtggagaaccagggacaaactcgctggagctgctcatgcacttggccggatggaataaccacccgccatgggcacagagctatgcgggcatgtccccgcggggccagccgctagtcctctctccctccgccacgtcccccgggtgggcaccgtcgtcgttcgcccccggggctctggcgggaacaagtggcggcagcagcagcagttttggcggccgtggcgctgtcgccgtccaaagcggcgccgtggcccgtaggtacgatctcggtcccggcagttggagcgcgggccgcggcaaaccaccaaacgtgagtcagctacagattactgcggccgcaaccgccgccaccggatcatgctcaaccagcaagacgaagtcgtcgccacttggaggcggcaacacagaacaagaacgcctgacccccgtgcttgcaatgccgactacccaggggaaggttgccgcggcgaggattggccgcgtcaggaagcgcgcgcccaagaatggcatcatcgacagcagtgcggcgccgtccaggaacctgaggcacagggccgccaacaagcagcgaacggccaaagacgcagccgccggcgttgacgagagccccgccgccaacgccaggcgcgtcgacaaccagcctgctggcggcccggcaaaatccgccgcaagcgcggacgcgcgaaacaacgatattcagatcgtcccttctccgccgccggcacgcaatggcaggaagaggaagcagaacgcttccgctgcgtcatcgagatgcagcagcctggccaccaggaggagcggcacggacgcggtggcgccagcgacgaagaagcacaccatcctgacgtggctcatcgacggcggcttcgtgtccgacggagagacggtgttgtatgttccaggaggggacggcggcgcgggcgcggagaaggtggtgtcgggcgcggtgacccgggccggcgtccactgcagctgctgcgacggcgtggtgccgctgccggtgttcgaggcccacgccggggcgcggcggcgcgacccgggccccgggcagcggcagccgtgggagaagctcctgctcgtgtccggcaactccctcctgcggtgcatgcaggaggcgtgggagatggagaaagtgaggaccttccatgcgcaggccaaggtgagggccgcgctggagcaggaggaggacaagtgctcgcaggccaagaggaggctcctcgccaagcatctgaagaagggggtggtcgtcgagaggatcatgtctcctaggatggagaagataaaggcaggcgagaaggactccagcgacgacgcctgcggcgtctgcgccgacggcggggagctcctctgctgcgactcctgcacctccaccttccacccggagtgcctcgccatcaaggtaccagagggctcgtggtcgtgccactactgccggtgcgtgctgtgcatgtcaaacgatgacctgcagggcctgtccacatgccagcagtgtgctcgcaagtaccacgagagctgccgtccattgccggggaacgggtgcgacatcggcacgtactgtggcgagacctgcaagaagctcttttctcagttagcacaagtgacaggcgtgacgaaccctaccggggatggtttttggtgggcgctcttgaggattcagaaagatgaaccggccagctccgaggaaatgcctgccgttctcgagcgcaacgtgaagcttgcggtggcgctgggcgtgttcaacgagtgcttcaacccggtgaaggatcggcgcaccaagatcgatatgctccaccaagctgtgtatagccttgggtctcaatttaagcggctaagctacgaagggttctacaccatggttctggagaaggatggagagatcgtttcagcagccctgctgaggatccatggcacacaagtcgcggagatgcctttcgcaggcacgctgccagcttaccggaaacaaggaatgatgcgtcgcctggtcagtgctgtggagcaggtgctggcgtcagtgcaagtggagaagctggtgatacctgccatagattctctggtggacacatggaagaggtccttcttcttcaggcccgtggatccccagctgagggaggagctcaagaggctgagcctggtggtgatcaccggcaccaccctgctccacaaacccatcgttccgctgccgccgccacgtccaccgtcgccccaacaagcggggagtccagaggcatggtggcgcaagtacgcggacccgtcggcgcgcctgaccgacgacgagcgggcgttcctggagatggacgtcgacacggcgccgcccttccgctacaccgacctggtcacaggcaacgtgtctctgcacaggttctgtcaagccgggagctcgtcgtcggcctgcgccgctgccgtgtccacagggagagcgagcggcagcgctgcaccgcctccgggtccgggagcatttgcggtgcagccgggcggctggcgttcttgccgcaaggctgcgagcgcgatggctccccagcccagctacgcgcgcggcggcgggcgcagcggtatactccatggcatgaagtgaccgatccaccccctgccctcggcgctgggcagggcttgctgcagctctgtggactgtggtgtaattcagctctgagcctctgactctgagaatgaagatgatgcggaattgcggacatactctgacagtctcatgtaccagtactcgatccatctcagcatttagacctggataatatcgatactagcgacattccgtagtgtaatgcttgtgattggtttaagatttggagttgactagagaactaaatgctttacttcagaggattttggtggtgaatggtgatcagctgcgtactctgcaatcttcatataccatttgtttgtgtgtttgattttgtcttttaaataggagcataaggatgtatttggttggacgtaaaaagagagatagaagaa

SEQ ID NO: 31968 - DNA, 6070 bp, Zea Mays
taatctctctcaaatacccccacttttttcttcttctttattttagcttcaagtcttcaacattcctctgcagcagccagcagccaccagtgaggccgtgagggtgagtcgagtcgagtccaccaccaccaccaccaccaccaaatagccaaacacgcagtggtgctgctctctagtcctcccttcttccactccgctaaccccccgtcgcaagcacgcacgcgcgcgctcatcggattcggctacgcgccggcgagatccgggccgccgcagcacggtccggcagacgccgccgaaggcgcaagccgcgatcttgtcgccgcgggagctgcattggcgccccacgcggccgttccggcgtttcttgggaggttgcggcggcgggaggagttcgtgtccgggatccgccagatccgtgctcgccggcggcggcagcagtggtggtggccgccatggaggccgatgcgccgctcgacctcgcgctcttccagctatcccctcggcgtcagcggtgcgagctagtggtgtgcggcaatgggcggacggagaagatcgcgtcagggtcggtgaagccgttcgtggcgcacctgcgggctgcggaggaacaggcgtcggctcagccaccgccgctggccatccggctgcagctggagcggcccgccccgtggtttagcaagggcacccttgagaggttcgtgcgcttcgtgagcacaccggaggtgctggagttggcgaacacctatgatctggagatgtcgcagctggaaggggccaggaagatttatgcgcagggaggtactggagatgctacttcaggtggagctgtacaatcttgcatatcttctgttactgaatctagtttatgtaatctctggccatgcttattggcagctgaaaatgttacagcctcagcggcagcggcggcagatattacaaagaaagaacttcttagggcaattgatgtgcgtctaagttcccttaaacaagatctggccgcagcttgttctcgagcatcctctgctgggttcaatcctatcagtgtatctgagcttattctttttgctaaccattttggtgccagtcggctgagcgaagcatgcacaaagttcatgtcactttgccagcggcgtcctgacatcagtcctcaaactgcacagccagcagtttcatcacactggaaggtctttgacgatgggaatgtccgtggttcttcgagttcagacatgtctatagatgaaccactagttgatctcagtgaatccaagaacaaatctacagtcagtggaagtggctctcaggtccacagactaagcaacatccaaggtttagaatctgctgcagcacagcaacccaagccaaccatccaacaagcagtagataaacaagaagcagaaacagatgcgtctcctgcaccttctaaaggagagctttcaaggcggctgagtgtgaaggacaggataaacatgtttgagagccagaaaaaggagcagactccaagttctggtaacagcaactctgccggtactggtagagtggttccagggaaaggtgagcaccgcagggttccttctggcgcctccatggagaagttagttagaaggtggagcagtgttagcgacatgagtattgacctcagcaacaatgagagtagtagcttaaatgacaaaaaggataatggaactcctgccgggactccaacatctactgatttggaggccgactctaaagtaagagctaatgaggactctaatggacagaaggattcaatcacgtcacactcttggccttgtcaaaaggataatgtaccaatggatctggccaccacagatttgtgcccaccctcaattttaagtaatacacttgctcctcataaagagagtatatatggtgatggtgcagaaaacgacatggttatgaactctagcattgaaagtgaagcatcctttgggaaagaaccgggggttattcaaggacacacaaggatgtcaaatcatgctacttcaaatgtttccactcaagaccgtctaaaatcttctgcaaagtcagttgaagaagccttgctgaaaaataaagttattgtaactagtgcatcgtcagaggagcatgtctgcatgatagacaaggaaatcacagctgttgctcatgaagtaccagttgcaagtgaacagattccccagaatgatattagaggtctccatacaaaagatattcacactgaagcagaagtgactggaaggaaggatcagccttcacgatcatttggaagggtatctggtggtgttaatcctaaaccaaaagcctcatccaattcccgagctaatgctaaaggctcatctgttagggatgcgattgcctctacagaaactgagttccgtgacgttagtttgcagcggaatcgtctaccacggaagtcagaagatgtagggaaaaaggttacagctggttctgattcagattgctctggtcgtcagggaaaaaatttgagcaggcaatcatccattaccgatcaggaactaaacttgcaggctagagtgacaagaccaggaaaagggaaccaagatcggcatggtgaattgcaaatgaaggccaatgagttggagaaattatttgctgaacacaagttaacatcctcccgacgaggtaaacctacagatgtgcaggttgaaagcacacctatggtgagtgaggtaaagccgacaatggttcttcatgagacaattcatacaaaacaagttgtaaaggagagtataactgtcaatgattttgatgccggtgagcttctgaagatggtgaataatcaagaatttaacattagcacaccacaaaaacttggcattctaagtttagaagagtcgagagggaagttttatgagcattatatgcagaagagggatgcaaaactgaaggaaggctggaagctgcagagagaggagaaggaagcaatgttaaaggctatgcatgacagcctagaacggagcaaggctgagttgcttacaaaattctctcggtctgcagatgtccctgactcaacttatgtttcccattgttctcagaagattcctccttcgcgatcagcaagaaaaaataaagatcagggggttggctcattcttggtggaagaggaaatgaatagtgactacctatctggtgatggttcttccaggagtgctgattccagaaagcatttttcaaataaagttgcttctacccaaaatgcatctgctggtcctatccataaacgttcatcaagaaccgcaagctctggttatgctaatcgcaggaatccaccagaaaatcctctcgcacagtctgtccccagtttttctgacttgagaaaagaaaatacaaagccttcacctggagtcagtagagtgagtgcaagagttcagcaaaagtcttttgcccgtagcaagagtattattgaagagtcaaagagcatattgaaagaagatcaatcgaggaggtcacaatctatgaggaagaaccaaattcctgatgagcttaaggacatttcgtcagggaatgatgatatttacaattgggctccctcaagaatttccaagaatcaatcagagggaccttttgcttacagtacccgtagatcgggtccaccaaagccttttcttaggaaaggcaatgggactcaccctgttattggtatagctggatttcaggctgcagctgccatgatggcgaatgccctccagcatggtgacagtggtgattttgaagatcagcaagaggattcccctgatgatgccaaagaagaggaagaatatgaaagcatggaagaaaatcttagagaaagtgactttcctgctgattctgacagtgagaacccaagagtgagtcatgaatttggaaattcagatgacccagggtcagaaaacggtgatgctgattttccaagcaaaacacctgccattggcagtactaagttcactgcttttacaggaaatgttcacaatccagctggtgatgttccagcaccctggagttctcgtcttccacagctgttcccttacacgaatgataattcagatggtgacgcctttgctgattcaccatcgggaagtccatcaccatggaattctcattcactggatgaaataacagatgctgatgtatctcggatgcggaaaaagtggggcagtgcacagatgccttttgctggtgtcaatgcacctcaacagccacgcaaagatgtttccaaaggattgaagaaattgtggaaatttggtaggaagactagaggcggtgacggtttagtaaatgattgggtatctgcctccactgcctcagaatgtgatgatgacatggaagatggacgggatctggtagtaggatcttctgatgatttcagaaagtctcgaatgggttatcttgcttcatatgacggttttgttgagaacgaggttttttctgaacaaggtatttgactttctaattctgtaaaaggtcttctcgttgtcattaaattagttagtatgcttctcaaaatactattcccacaatttatttgcactagataaagtttaaagaaatgggcctttctaatatggtcatcacactcctaaaattcaaaaaaaagtatctgaaggttccaaccatgtctatgagttggcaaacaatttaattgataacttaagatttctgttctccatctacccgaacaaaattgaaactgttggaacagctattctgagcattactcattctcgatgaggtattcctaggatataacctcttattcttggctgatgttatgcgcactaaccctgggccattggttctgccttatggcttgagtagttcagtatattgttcatacttcagtttgttaagagtgagtgacctggtggacgttcctctgttaatgcactttgcattgatgatgcacatgttatgtcgctccctagatcatgttagtggatgcaacatttcgaatgtgtggattttgaaaaagaaagggaaaaaggtgctagagctgtaatgtttcctatgcaatccctgcagtgctatccgaaagaatccaataacttctttttgtgaagcatggcctgaggatcctccctgcaatggctcgggaggagtaagatacaacctttgaaaactattgaccctagtaactaggcccagatgttaaaattgtaatccccccaaagcagtaacttccgtggatcactggatcatgatgatatggaggcccagtgatgttatacatagagtacatgatagacacaggaggaaaacactagattaggggattacgctaatacccctggctatcataccttaacagcactcgcaggggtttattagctcggacttctgaatcttaagggacctgtaagcctgtatatcctttggttactgtccaattttaactcttgccacacattttttttattcaagcccagaagcttgatgaaggtccttaatttgcagaacaatcactacgcagctccattccaaacccacctgcaaatttcagattgagggaggatcagctgactggaagttctcttaaagcgccgcgttctttcttctccctgtcaacattccgaagcaagggaggtgatgccaggctcaggtgatcctcagaagacaccagaggtgtggtgtgtataaaatatcttgtcaagttaggtatggttatcaaattttcagggtggtacgtggatgctgctagcttgtgattatatatatattgtgtatctatggcggttcatataagctaccagttgagctctctccattgttgccgtttgattattcttttttcccctgtgtagagttggacttttgcaatctgttctttcaactggcccaggactcctgtattttttttcattgtttttgtgatatatctgtatctccctctcaacttgtttcttcattcacatatatcacaaattcaagatatatggtaattttgccaactatagcaaaccacctgagatgctagctctgcttgtgataaaattgaaacgagtttgtgacaaaattgaaacgagagtcgagccgagttgaccaagagctgagcgagctcacaagatacaagtatttt

SEQ ID NO: 31969 - DNA, 1671 bp, Zea Mays
atgggtgagataggcatggaccagctgggtctggccgaggctgccgccgccgtgaaggaggagggcatcctcgacgatgacgaggagacgtcaccgatagagcaagtgcgactgacggtgccgacgacggatgactcgtcgctgccggtgtggatgttccggatgtggagcatcgggcttctgtcgtgcgcgctcatgagcttcctcaaccaattcttctcataccgaacggagccgctggtggtgacgcagttcacggtgcagtatcctatgcaatttctaagcctctatgcaattttccagcactcggctttgctagatctcgacaatgacactgcgttttttggtgtttttgatggacatggaggaaaagtagtcgccaaattctgtgcaaaatatctacacagagaagttctcaggagtgaagcctatgcagctggtgacctgggtgctgctgtccacagagcttacttcagaatggatgaaatgatgcgaggtcaaagaggatggcgggaacttcaagcacttggagataagataaatcagtttagtggcataatagaaggcttaatttggtctcctaaagcaagtgattcaaatgatagacatgatgattgggcttttgaggagggaccacactctgattttactgggccaaattgtgggagtacagcctgtgtagctttgatcagaaataagcaactcgttgtggcaaatgctggtgactcccgctgtgtcatctcaaggaatggcatacaatttgtctagagaccataaaccagagctcgaggcagagagagagaggatacggagtgcaggcggtttcgttctaatggggcgtgtaaatggaaatctaaacttgtcaagagctatcggtattcttcactcgcttcttctcgttcgtacctgacaccttacctgatggtcttgcttgcatatgccaaatgccttttcaggagacatgaagttcaaacaaaacaagttcttgccccccgataagcaaatcctgactgcgaaccccgacataaacattgtcgagctatgtgatgacgacgaattcattgttttggcatgcgatggcatctgggactgcatgtcaagccagcagttggtcgatttcatccgcgagcatatagacacagaggaaagcctctcggcagtatgcgagagagtgctcgatagatgcctggctccgtcgaccatgggcggcgagggatgcgataacatgacgatgatcctggtgcagttcaagaagccgattgctcaggtcgaggacgccagcggtgcagaaccagctggagacgctgggtgctgtgagacccatggggcccacgagaacggctctggtaagcaggtgtagcgaagacgtggcatgcatggctctcggagtcttggactcttggtacatataggcctgacgctggacatgggtaaaacgggagtacgatagatgacaccctctgttcctcaatacaacccgctgttgtgattttttggttacctgaccacctatctgtacatttttgtggaaatgatgttacagtaattattgtccggtcaagcggaccccttttgagttttgtcatctacatgtacttactctcgtagcagaatgactgcatgagctgacaattgcactcctttaccctcttagactctcacgctgtctcc

SEQ ID NO: 31970 - DNA, 1796 bp, Zea Mays
ctcatacctgccgtctcactgacaggaaacgagaggagatccggtctcatgaagtggctctgcagattcctcaaggggccgaagcccggcgaaccgagccgccggcggccccaggtggcggccggagaaggggagggcgcgctttggcaccaacgaccagctagaccaaagatcgatccacctaggaacgagaatgaggaactagtggaccgtgccattgccgagcctcttgcagaggctgtcaaaccgcccagagagaaaacccataggggagaagacagcaacgacgacgaagatctcacaagagccgtacaggacagtctgaatatgaacccttacacgccttacaacccctatccaccctctcaagcccaacctatagggcacagggtatgcggaggctgcaagcatgagatagggcgtggccattacttgagctgcatgggcatttactggcaccctcagtgcttccgctgcaggtcctgcggtcaccttatccgtgagaccgagttcaccttgctgggtacggattcgtaccacaagctgtgctacaaggagctgcatcatccaaagtgcgacgtctgccttcagtttgtaaggcctcgtgtcctcggaaaacctgagcgatctgcactgcagactgtgataaactgcatcccaacgaacgggagtggcttgatagagtacagagcccacccgttctggggccagaagtattgcccttcgcatgagcgcgacaggacgccacgttgctgcagctgtgagaaaatggaggtacagccaaggaacacgaagtacatgtcgctgggagacggacgcggcctgtgcatggaatgcctgggatctgcagtgatggacacgagcgagtgccagcctctgtaccattctatcagagactactacgaggggatggacatgagactggaccagcagatacccgtgctcttggttgagcggcaagcgctcaacgaagccatggaaggggagagtaaaggcccacaccacatgcctgagactaggggcctatgtctgtccgaggagcggactgtgagcagtatacttaggaggcccagaattggtggaaaccggttactaggcatgagaactcggccacagaagctgacgaggagatgtgaagttactgcaatacttgtcctgtatggcctccccaggctactgacaggttccatcctcgcccatgagctgatgcacgggtggctgcgcctcaaaggttaccgaaacctaaacgcggaggtggaagaaggcatatgccaggtcatgtcttacttgtggctggaatcagagattcttccgtcatcctcgaggcacgcgcagccttcatcatcgtcctcctcctcatcctatccagcaacatcatccgagaaaggtggaatatctcataccgggaagaagctgggcgagttcttcatgcaccagattgccaatgacacgtcgacggcctatggtgacgggttcagaactgcgtacgctgccgtcaacaagtatggccttcgccaaacactgagccatatacgcctaacaggaggcttccctgtataataagagtgacaaaaaagacacaaaatgtccatgcatgatcatatcgatatcaaaaggttatatacatattgggatgaagttcgctatggaagcatagtgattcagtttcggtgaccttgagttttcaaagaggtcatgtgtaagaacactgatttaggggtggaggtatgccgcttccggcatatgatttcctctcacgaagcactggaatcaaagtaattgtgtggaacttacaa

SEQ ID NO: 31971 - DNA, 2883 bp, Zea Mays
gttgcagacagctacagccgtatgtccgtgtgacattctgctcagtcggccaatcctcaccaaattctccatcaaatccaaccaacccctcaccgcctatgccgccgcgggccgcctagggttccggcggccgccgctccctcgccggcgcgatggggaacacctgcatcggtcccagcgccccctcggaccgccacagcttcttcaacaccgtctccctggccgtgctctggcgacccccggccgccgctgaccgcgccgagccttccccgaccgctgaacccagctcatccactccctgctctcccccctccagggcccctaaccctgtcaccatctccgactccgagcacccgccacactccacctccaccgccttaggccccgccgcgccgcccaatcctaacggcaagcccaagcccaagcccaaggtgaagcgcgtgcagagcgccggcctcctcgccggctccgtgctgaagcgcgactccgagcggctcaaggacgtctacaccctgggcaagaagctcgggcaggggcagttcggcaccacctaccagtgcgtcgagaaggcaaccgggaagcacttcgcctgcaagtcaatcgccaagcggaagctcgtcaccgatgaggacgtcgaggacgtgcgccgcgagatccagatcatgcaccacctggccggccaccccaacgtcgtatccatcgtgggagcctacgaggacgctgtagccgtgcacctcgtcatggagctgtgcgctggaggggagctgttcgataggatcatacagcgggggcactactctgagaaagccgccgcacagttggcccgggtgatcatcggggttgtcgaagcatgccattcacttggggtgatgcacagagacctcaagcctgagaatttcttgtttgtgaaccaaaaggaggatgcacccttaaaggctattgatttcgggctctccatcttcttcaaaccagccttgatctgttttgctgggagaggcgaagatctcctgggtcaatcatgtaaggtcctggacaggctattttggcttttctcctctctcaacgcagtgacatgcaaatctcctgcttgttggagagaaaaaagagtaagaggatgaggataatgggagaatttttctttttttctaccccctccggccctggtaaacagtcagctttggaggcatcaagtgaactacatgactccatgttactcatttttctcctcaaaattgaacacacatttgtgatgctcttagggaagttgtttattctatgtttttgacacctagaagggtataatattggacttcatataaggagaaaccatgtgaaatatcaataagagcatatggccactaatccaaaggtagtctactaatattggacttcatataaggagaaaccatgtgaaatatcaatatgagcatatgtccactaaatctctgtttttttattgtttatagcaacatcttatagtcatgtatgtgccactgtctattcgtgtggattctgttgacttgacatgcttacaggtgaaatattttctgatgtcgttggaagtccttactatgttgcccctgaggttctgaaaaaacgctatggctgtgaggttgatgtgtggagtgccggtgtaataatttatatcttattgagtggggttcctccgttttgggctgaatctgaacaagggatatttaaacaagttctaaaaggtggtcttgatttttcatccgatccctggcccagcatttcggagagtgcaaaggatttggttaggaagatgctaaatcgtgatcccagaaagagattgactgcacatgatgctctatattgaaacagttttctgcaatgaataaactaaagaagatggcccttagggtcattgctgaaaatttgtctgaagatgaaattgcaggattgaaagagatgttcaaaatgctggacactgacaatagtgggcagatcacgttggaggaactaaaaattggtttgaagagagttggtgctaacttaaaggactcagaaattacaacactaatggaagcggcagatattgataacagtggttccatcgactatggagagttcctagctgcaactttacatctgaacaaagtcgagcgagaagacaacctcttcgcagcattctcatactttgataaagacggcagcggttatattactcatgatgagctacaaaaagcatgtgaggaattcggtatagaagatgcacacctagaagatatcatccatgacgttgatcaggacaatgatggtcggatcgactacaacgagtttgtaacaatgatgcagaagggaaataacccactagggaaaaaggggcactgccagatgagctttggtcttagagaagcattgaagcttggctaagtggcatgatcaatcctgtgtgaagtgccattcggcttcatatgccaactttagctgatgaaactaagtccgtgaatttgggacgccggtaccaaaggtggagcaagtgcgcgatacgattagctttgggataccaactaagcagtgagcatgcaggaacacattggtgatctttcgtcgttaaccccccatgtacatggcttttttgaggtgggataggaatggcggttgtgtttcccatggccattctttgcacgttatgaagctcagctgcaggatgctcttatatagagagaaatgttagtcacatcacatcgcgtgtccatactgtatagcgaaacttaacatgttgtaatatcggtcggacaatgtgtgcgtgttgtatgttatctttcttagatagaggcacaggcttagcgttgtcatatatgtattgcaagaatatgcaggctgtatattaaccaaatgatttttttgtgtacatttcag

SEQ ID NO: 31972 - DNA, 1292 bp, Zea Mays
cctcgccctcccctcccgcttcaggtggaccgtcgacggcgcccgccccccgtcggctgcactgcgcgccgcgtgcggccgcaatagtgtataacttggagatatggatttgcaagagaagacgaccccaactcataaaggaaaaggaaagaaaaaagaaagcgcaaagaaaaaagaaagatcaaggaagagaacgtcatctgttttggattccactaatgacacagtcatcagcgaggaaatgtcagagtataatcttgatgaacctactatggaggaaaaactggcaaccctgaatttaatcaatagagagaatgaaatacatggtactgagaagcaatcgctctctgtggcaccaccaagtgcagattcagtccatatcttgctgaagcaagctcttcgtgctgatgatagtgtagcactgttaacttgcttgtataatagagatgagaaggttattacgaagtctatatcactcctaacaccagcagatgttgtgaagcttctcaagttctttgtcttgcaaatacaatctaggggtgcagtgttggtttgtttactcccgtggctgcaaactttattgaatcgacacatgagcagcatagtgtctcaggagtcttctctgtcattgctcaactcgctctaccagcttattgatgcaagaacgtcaacatttaagtcagcattgcaactctctaccactctagattaccttttcagcgagattgctgatgatgaagctgatgaggaggtaccaccaccgataatctatgaagataaggacactgatgatgacgagtccgaagttgatgctatggaaaccgacagagaagaggctgaagagctaggtgctgttactgatgcctctgaaaattcagatggaagtgagatcatgagcgactgattgccttttactctcccaactgctgaagtccaaatatcaacatcaattattcacgtaagatggaattcacgataattgctcaagatagttgtgcttgtactttgtggatcttaattgagtgaatgtttcaaatagcttttggatgacatattgacatttgagctgagaaaagggtagttaatgcaattgattgagtaaagcaaacattacccatcttatagtttgtactatctgtgaagggtaattgtttctgtatatggtgcttgaggtcatatttactcatgctaacctcgacctctcggaagtgcccaagagaaccgttgggtcgatggtctaacatgcgacgtgtggtgtttttcttgtttgaatgcacaccaattcgttcttt

SEQ ID NO: 31973 - DNA, 1702 bp, Zea Mays
atcgtttcttcgtttttgggtcctcgcgcgcgggaggaaaaggaaggtctcgcacgggagcaagtagagggattcgcgagcctacaccgtatctctgcgagactcccaagatggataagctcagtggttctgcacgtcttatgattgtttcagatcttgaccatacaatggttgatcatcatgacgaggagaacctgtccttgcttaggtttggtgccctgtgggaatctgtttactgtgaggattctctactagtcttctcgactggaagatcaccaactctttacaaggaattaaggaaagagaagcctatgctaactccagacatcactatcatgtctgttggcactgagataacatatggggaggcaatggttcctgatgatggctgggaagaatatctgaacaataagtgggacaggaatattgttgtagcagaaactgtgagcttttctgagctgaagcttcagccagagacagaacagcgcccgcacaaggtcagcttttttgttgataagaagaatgcccaggaagtgataaaatctgttgccgagagattggacaaatgtgggatgccaaaataatatatagtggtggccaggaccttgatatattacctcaaggagctggaaagggccaagcacttgcatatttgcttaaaaagctaagctcatgtggaaaaccgcccaacaatactcttgtttgtggtgactctggtaatgatgcagaattattcagcatccctggtgtacatggtgtcatggtcagcaatgcccaagaggaactacttcagtggtacacagaaaatgcgaaggataacccaaagataattcattcaaatgagagatgtgcagctggtattatacaagctattggacacttcaagctaggacctaacatttctcctagagacctgcagtttccttatgcaaaggaagcctctttcaaacctacagatgctgtagtgaagttctacgttctctatgagaagtggcgcagggctgaggttccaaagtctgattcagttataaagtacttcaaaaacatcactcatgcaaatggagttaccatccatcctgctgggcttgaactctcactccatgcatccattgatgcgttgggatcatgttatggtgacaaacaagggagaaagtaccgagcatgggtggacagactttttatcacacagactggttcagatagttgggtggggaggtttgacttgtgggaatcagaaggtgatgtgcgtgcgtgttctctgtcaagtcttgctttgattctgaaggctgaatccccagagggctttgtgctaacccacatccaaaagacatggctgaacggatactcgtcaggggttgagcaggcgtttaagctgtagagcagtataccgtctcggctcgtggttggagttttcttgagaatagaatagaataatgtacctgtttataatattaacttcccaaaaccgcactggaggatcaccagggagaggattcggtgccttctcctatttggcgcgtaagataaatgttttgtctcatggctttcatgagaagatgaaattgactcatcttggtatatatttacaaatcttgaataatgcagcgttatctatatccagggatgtcaacggcaatccagggaaattgggtttttacttcattactcattaatgctttatttggttagaagatgattgatg

SEQ ID NO: 31974 - DNA, 406 bp, Zea Mays
aatctaagaattcagtgcgaaagaaatgtttagggtctttagatttaaagattatggtctactggtagtctttgatgtctcatgaggttctacttgctaaagcgaatgatgtggtgccgtgttaattattgtgctaaacaagttaacatagagaattagtttaaaaagttaattaaacaatttctatgcttattccaagtttgaatgtcgaggggtaggttttaggagagtaaaatgcttacacatagtttacagttgtgtgttgttagaattaaatctgattaaattagaatgccatagctatagttttaatgtgatatcgacatttagtattttcgtactagatttgcgatgtcttgttataggtgtttaatattcttcaagtagccatatctaaattgtaatg

SEQ ID NO: 31975 - DNA, 2593 bp, Zea Mays
ctcaaatcccccttttcttttctctttccaccggtccccgagctgcagcacaagaagcgattccagctgttgtcttgcatctcccttgtgctatctcaccccatgttcgcacaggaaactgaagaagaggggtcagggcacagaccgcttcacgcagcagcccgcccgcggtcgcgcgtgcaaaaggagcgcacttgcgaaatgagctagaagatggcgatttagtggaggcgaaaagctgcgatggggctgggtcgtcgatggagaagtgctggcagcgtgccctagctctgggatttatcttacaacaagttgagcggatcaatacctgattccctgccaactttgccttccctacgagttctaaatgtatctggcaaccagctgagtgacgaatccctatgtaaaaattatactggaccacttattttcagacgtgattttgatggctcagtatgcaacaaaccttcacccagcccgtcaagaaataaagtagctatcatagctatttcagtagtggttcctgtgttagtactaattgtactacttcttacatatttcatctggtggcagaaaagaaagcctattgtgcaaccagtacccacacatggctcaacaagagatccagaacctgataatgcttcaggaatcaaaaaaagttatggctacaacctgaatataactgagaatcgtcagttcacatacaaagagctggagaagttcactaataatttcaagaagttcataggacaaggaggttttgggcccgtctactatggccgtttggaagatgacactgaggttgctgtcaagatgcgttctgaatcatcgtcacatgggcttgatgaatttttagctgaggttcagagcttgacaaaggtgcatcacaggaatctagtgtctttgattggttactgctgggaggaagatcatttggcgctggtttatgagtacatgcctcagggcagtctttttgatcatctgagaggtttgtctatggaaagtctattgagtattgatttaggcataaccagttacgttgcctttttcaaattgcttttgaaatgtccatgcatggtttggatctgagaaactatcttgactgactgatatataaattctggcatcttgaaaaaaaggccttttgggggtatctacacatcttcctacttaagtgcctaatccttagtgacagaatggttgagcctaatccttagtgacagaatgattgcgaaatatttgctagcgtcctgattgtatcgtcaatccatcttaacatttgggatggggtgacttgatgctgtgagctacaagtctacaaccctaaaatcccaccacttgcctgcgctttattttcttttacttaatgacttcagctaatgtgtatgttaaaggatctgttttactttggctattaactatatatattgcaattccattatacaagatcataacagaactaggaaaaggaaattttccataaaatttactgaaactgagacgtcaagctgttaaactgttctgttatgctaaaacattgaaggtaaaaatggtgtttctgaagccttgaattggaggaaacgtgtacaggtagtgcttgaagctgcacaaggtatgccgcaataaaaaaatccatgaagaaaactggagctaagtaaatcctccatatgatcatttactgttattctcatgttttggcatttcctgtgatacataaaggtctggattatctgcacaagggttgcagtttgccaatagtccaccgtgatgtgaagaccaacaacattctcttgggtcaaaatctgcaagctaaaatagcagattttggactttccaagacatatctgagcgacacacaaactcacatatcagtcactccagctggcacagctggttacatggaccctgagtactaccagaccggaaggctcagtgagagcagcgacgtgttcagcttcggagttgttctgcttgaggtagccacaggcgagtccccgacattgccaggccaaggtcacatcaatcagcgcgttaaacagaagattgccactggcaacgttggctcgatcgctgattcgcgacttggaagcgcctacgacatcagctccatgtggaaggtaatcgacaccgctgtgatgtgcacggcggactctactgctcagaggccaacgatggccacagttgtgatacagctgaaggagagcctggcgttggaggaaactcgtgaaaagggaagtagcaacagggtgagccgagggagtgatgtagaagctatggcgtccacacttggtccattcgcaagatgaagctgtgcctgtacctggattcagttcatggttgacgctcgtgaactccttgtcatgtgaagacaactagtagcgtataattgtgggctgttttgaaccagcaattgcttgtgtgtgtatggactttgacaaaggtttggtgtgagcttgcagcttctccagaatccagatgtcatgctctgtatgtatctttgacaaagatttcccgtgtctatatataactgcatggtactaataacataaaggattgactttgtttgaagcgagggatcgagaaattgagcgtg

SEQ ID NO: 31976 - DNA, 417 bp, Zea Mays
gaacaaccaggttcaatttaaatccctacttatatacaattttaccttatttgtagaaagcaggaatggggaagaggagaggtgatgcacaaactgagaaactcctgcattataggagtagatattatgctccacccccaagctgctgccactgccattctctggaatcaatcatattccttgccaggttgaactccaggacaaaaggttcagattaatgggaagatgcagcttggagccaataataagcctgtggggccgatattgttttctttaagttcctctttgcaacaactctccactctttaaaacaagcagcattgttggattgtcttcattcaattccactgtattagcaacatctagtaattattaatatgatgagagaaaatgacttcaatgactattaagaatctg

SEQ ID NO: 31977 - DNA, 5340 bp, Zea Mays
catttcaggaccagagcagaattcctcgtttctttcaaaccgcaagaaaactaagcagcacataattaccatttctgccctccgtcccctctcaactccgtcgtcgcgacctgccgcgccgtcatcgccggcggcgaccagcacgtgcagtggaccagtcgcgaagcaaccgcgcagaagagaagggtaaaaacaggactgttggaagtcgagtcgagaagcaacagcaagcagcagcttggggggtaggtggggcaacgcagcagagatagtccaattcgccgccttgccggccactgacctcgccggcggcggggtcccctctgttggagccgacggatccgttgccccctcctatccgaacctgatccacccatgggaactccagttaatatcatcgttggttctcatgtttgggtggaagacccaaatctagcttggatagatggagaagttattagcataaaaaacaatgaagtacatgtgcagacatcgaatgggaaaaaggttaccacagacaggtcaaaagtatttcccaaggatatggaagctccaccaggaggagttgatgatatgacaagactttcatacttacatgaacctggtgttctacagaatcttgctacccgctatgaactgaatgaaatatatacttacacaggcagcattttgattgctgtaaatccatttcaaagattgccacatctttatgatacccacatgatggaacagtacaagggtgcagattttggggaattgagtccccatgtctttgctatcgcggatgttgcttacagggcaatgataaatgaagggaaaagcaactctatattggtcagtggtgaaagtggtgctgggaagactgagacaacgaagatgcttatgagatatttagcacatttaggtgggcgatctggagtagaaggacgtacagtggaacaacaagttttagagtttgttgagatccaatttgacaagactggacggatctcaggagctgctatcagaacttacttgctggaaagatcacgtgtgtgccaaattaattctccagaaagaaattaccattgcttttattttctttgtgccgcaccacctgagtacactcagaggtacaagctgtctgatcctagatctttccattacctcaatcagtcgagctgtattgaggtggatggaatcaatgatgctgaagagtatttagcaacacgaagagctatggatatagttggaatcaatgaggaagagcaggaaggtatattccgggttgtagctgctgtacttcatcttggaaatataaattttgccaagggaacagaaatcgattcttctgtaatcaaggatgataaatccaggttccaccttaatatcgcagcagaacttttgaaatgtgattgccagaatttagagaaggcgctgataacacgagttatagtcacgcctgaagaagttatcactagaacacttgatcctgcttctgcagttgctagcagagacgcattagctaaaataatatactcccgattgtttgattggattgtggaaaaaattaatgtctcaattggacaggacccaaactcaaaacagttaattggagttcttgatatctatggttttgagagcttcaaagttaacagttttgaacagctatgtatcaattatacaaatgaaaagctgcaacaacattttaaccagcacgtgttcaaaatggaacaagaagagtataccagagaagagataaactggagttacatcgagtttgttgataatcaagatgtgctagacttgatagagaagaaaggtggattgattgcacttctggatgaagcatgtatgtttcctagatctacacatgagacgtttgcgcagaagctatatacaacatttaagaataacaagcggtttgccaagccaaagctttcacgcactgattttacagtagtccattatgctggcgatgtgacataccaggctgattatttcttagacaagaacaaagattatgtagtggctgaacatcaggatctgctgaatgcttcttcatgcctattcgtagctggtttattccctcctctcccacaggagacagcaaagtcttcaaaattttcatccattggatcacgttttaagcttcaacttcaatccctcatggaaactttgagctctaccgaaccccactatattagatgtgtgaagccaaataatctccttaagccagctatttttgagaatacaaatgttatacaacaactaagatgtggaggtgttctcgaagctatcaggatcagctgtgctggatatcccacaagaaaaacattttatgaatttgtcaatcgttttggtgtccttgctcctgaagttttagaagggagcaatgatgataagattgcgtgccaaaagattttggaaaaaatgggtctggagaattaccagattggaaaaacaaaggtgtttctaagagctggacagatggctgatttggatgctcgtagagctgaagtattaggaagagcagcaagaatcatacagaggcaaatacgtacatatattgcaaggaaacagtttgctgagcttaaaagatcagcaacacagctgcaatcttttgtcagaggaaccttggctcgtaagttgtatgagtgcatgaggcaggaagcagcagcagtgaaaatacaaaagaatatgcgacgccacaaagcacgggaatcttatttacaattgcaagcagctgcaatcacattgcagacaggtttaagggcaatgtctgctcgcaaagaattcaggttcagaaaggaaacaaaagctgctgtccacatccaagctcaatggcgccgccacagagactactcacattacaagaatctgcaaggagcagctcttacttaccagtgtgcctggaggcaaaggcttgccagaagggagctcaggaagctcaagatggcggcaagagaaacaggagccctaaaagaggccaaggataaacttgagaagcgtgttgaagaactcacctggcgcttaggattggagaagcgattaaggactgaccttgaggaagcaaaagcccaggaaattgctaagctgcaagagacgttgcatgatatgcagcttcaagttgaagagtcaaaggccatggtagttaaggagagggaagctgctagaaaggcaattgaagaagcacctccagtaattaaagagactcctgtgctagtcgaagacacagaaaagattaactcactgacgaccgaagttgaacaactgaaggctttgctgctaactgaaagacaagcaacagaagctgcaaaaagagaacacgctgaatctgaactgagaaatgaagaactaattaagaaatttgagagcgcagagaaaaagattgagcaacttcaggaaactgtccataggctggaggagaaagcaaccaacatggagtctgagaacaaagtgctccgtcaacaagctgttgcaatttctcctacgtcaaaatcattagctgcatatcctaagtctcctttccagctgaaaactccggagaatgggaatgctctaaatggagaagtgaagtcatcaccagatatcacccctatcttaccaaaccccaaggagcttgaggctgaagagaagccacaaaaatcacttaatgaaaagcagcaggaaaatcaagacctactgatcaagtgtgtatcacaagatctgggattctccagtggcaaacctattgcagcttgccttatctacaggtgtcttctacactggagatcattcgaagttgaaagaactggtgtttttgaccgtattattcaaacaattggctctgctattgagtcccaggacaacaatgacaagttggcatattggctctcgaattcatccacactgctgctgctgctgcaacgaacactgaaaacaactggagcagctggattcactcctcaaaggcgcaggtcatctgctgcatcttttgggagggtgttttcggggatgcgagcctcaccacaaagtgctgggcgtgcttttatgggaagtcgcttgattggaggtctaggtgaccttcgtcaagttgaagccaagtaccctgccctgcttttcaagcaacagctcacagctttccttgagaagatctatggaatgataagagacaatttgaaaaaggagatatctcctttgcttggcctttgcatccaggcaccaagaacatcccgtgcaagcctaattaaagggtcacgttcccaagcaaatgccttagctcagcaaactctgattgcacattggcagagcattgtgaaaatattgacaaattacttgaatgttttaaaagcaaattatgtcccttcagtcttaatcagcaaagtgttcactcaaatcttttcatttattaatgttcagttatttaatagtcttcttcttcgacgggagtgctgttcatttagcaacggagaatatgtgaaagctggattggcagaattagagcagtggtgcatttatgcaacagaagagtatgcaggttcttcctgggaagaattaaaacatattaggcaggctgttggattccttgtgattcatcaaaagccaaagaaaacattgaaagaaattaccaacgatctgtgccctgtccttagcatacaacagctatatcgaatcagtacaatgtactgggatgataagtacggtacccacactgtttcatcagatgtcatctcaagtatgagagtaatgatgacagaagattctaataacgcggtcagcagttcgttcctgttggatgatgattccagcattccgttttcggtggacgacatctcgaagtcgatgacagaaatcgaggtaacagatgtcgacatgccacctctgatccgggagaattctggcttcaccttcctacaccaaagaaaggactaacagggtggtccttccagctgcatgtccctttttgcacattctttttctccgctcaacctgtgcataactcatgtacatacgctcgtgccttttgctctctggtcagggcttgttagatgtattgtctttggtttgattggttggttggttctttcctcgatcctctcccaattttgttgggcgaagggtccacaatctatgtttctccatactgtagtgaaaaggggccggatgcccctggtctccccgagctgcttttggaaaagctcgtggtcattaagcagttaagcttgtggaaaaggttctccacatctaccgagtcgttcgttgtgtcgccttcttcatatggatcatcgccatattgtaaattgcaaatacgattatagttgaaaaaagagatattacagtgatagcagtgttctggagtttggatctcatgaatattct

SEQ ID NO: 31978 - DNA, 2424 bp, Zea Mays
gatgcactttctacccttttctctctgtacattcgtgatcttggccctgctgttgaatttggagatgcacactggcttggaagacagggtattgcattagcgctccactctaccgctgatgttttggccgctaaagatcttcctgttgtcatgacatttctcatctcacgtgccttggctgatccaaatgttgatgttcgtggtagaatgattaatgctgggatccttattattgataggcatggaaaggaaaatgttcctttgctatttcctatttttgagagctacttgaataaaagggcatcagacgaggaaacatatgatcttgtgagggaaggtgttgttattttcactggtgctctggccaaacatctatcaaaggatgatcccaaagttcatagtgtcattgagaagttgttagatgtccttaacaccccatcggaggcagttcaacgtgctgtctcagattgtttgtccccacttatggtatccaaacaggaagagggtcaaactcttgtttctagactcttggatcggatgatgaaatgtgaaaaatatggtgagcgacgtggtgcagcttttggccttgctggtgtggttaaaggatttggaatttcttccttgaaaaaatatggcattgctgcaacattgcagaaaaatttggaagacagaatgtctgcgaaatctcgtgaaggagctttacttgggtttgagtgcctgtgtgagaagctcggcaaactatttgagccgtatgtcattcaaatgcttccattcctacttgtgtctttctctgatcaagtcctagcagtgcgtgaagctgccgagtgtgctgctcgggcaatgatgtctcagctcactggtcctggtgtgaagcttgtccttccttcacttcttaagggtctagaagataaagcatggcgtactaagcaaagcagcgttcaacttcttggtgccatggcatattgcgctcctcaacagctatctcagtgtcttccaaagattgttccaaagttaacagaggtattaacagacacacatcctaaagtccaagcgtctggacagacagctctccaggaggttggaagtgtcataaagaatcctgaaatttctgcactagtccctattcttctgtcagctctgatggatccaaatgcccacactaaacactctcttgacatccttcttcagactacttttattaactccatagacgcaccatcgcttgcactgcttgtgcctattgtgcatagaggactgagggagagaggtgttgagactaaaaagaaagctgctcaaatagttggaaacatgtcttctttagttacagaaccaaaggatatgatcccatacattagtttgctcctaccagaagttaagaaggttctagtggatcctatacctgaagtgagggcagtggctgctcgagctctggggtctcttataagtggaatgggtgaagaaatcttcccagatcttgtgccatggttattagatactctgaaatcagataatagtaatgttgaacgatctggtgcggcccagggattgagtgaggttttagctgctcttggccaagattattttgaccatattcttcctgacatcatccggaactgttcccaccaaaaggcttccgttcgtgatggacatcttacacttttccggtatttgccaaggtccttgggtggtgttttccagaattatctgcaggctgttcttcctgctatattagatgggcttgctgatgagaacgaatctgttcgtgatgctgcactttctgctggtcatgtctttgtggagcattatgcaactacgtcattacctctgttgcttcctgctattgaggatgggatcttcagtgataattggcgtatccgacaaagttccgttgaacttcttggggatctcttatttaaggtcgctggaacttctgggaaggcaatccttgaaggtggaagtgatgatgaaggtgctagtacagaggctcaggggcgtgctattattgaagtacttggaagggagaaacgcaatgaagttcttgccgccatttatatggttcgttctgatgtcagcttgactgtccggcaggctgcgttacatgtctggaagacgattgtagcaaatactccaagaactctgaaagagataatgccagtacttatggacacacttatttcgtctcttgcatcatcttcctccgaaagacgtcaggttgctggaagatcacttggtgagcttgtaaggaagcttggtgaaagagttttgccctcaattattccaatcctgtcacagggactcaaagacccaagtgctagcagaagacaaggagtttgcattggtttgagtgaggttatgggcagtgctggaaaacaccagctattaagttttatggatgaacttattcctaccattcgtactgctcta

SEQ ID NO: 31979 - DNA, 286 bp, Zea Mays
ccgcctcagccctagctatgccaccttgaagccatcaggagccaccacactgagagagagggaggcggagagcgctgcagagggcaaccgccgatgatccgagcccacaccaccgtttcgacctcggtgtgtggattagagggctcatcctcgtgcctggagtgcgtgcatggcctaatcaagctagaatatggcttggtggatcgtgaattggtcgtcggggtatgacctccgccgatggaccgccatgcaccgtggctagagcatatgggtgcacgattctcgg

SEQ ID NO: 31980 - DNA, 775 bp, Zea Mays
gctgtgtttacaaattacacctgcttgctgttgatcttcgtttcccgtccagccgtttttcgcatccacgtgggccagccggccaggcgaccgccgccaccgccgccctactcctggtcccagctctgctgcacccttcgccggcgacgagcgtccaccgcggcagccgaagctcccagcgtcctcctgcaggccgagctgaaggttcagcgcgccggtggagttcgacgacgaaactccgtcacgtcatacctctccgcctcccgtctccaatcggggctcccagcgtctcggagaagaggagcagcacggcacggcggctgtggcgaggaaggctcctgtcccatcccaacccagttagcagccgcccaaggaggaggagatccaatcggcgtgcgggcgtccgcggtccatccatcgatccaattccaatctgcagctcagcttcggtatatatgggaatctgaggagctgcgtcgtgctatggagcctgtggatttgattagaagagtgaaggaaattgagcaagaagcttatggtgagcatggcatggcgacagatgaagatcctaagcaaactgccgctgttgatttatcaaaacggcttaaggatttgagggcaggcaatgatggcagtagccaaaaagctctcgaagaatggcgtaaacggaagatggagcgtgcaaggcagcgagccatcgaaaagaatgggacttctagtgtgaaaactaaatgaggatggccacgctgaggaacctgaaggtcaagacgtcaac

SEQ ID NO: 31981 - DNA, 1575 bp, Zea Mays
ccgcggcctccccgatcgccatcgacggtcccgtataaacccgcctccctgcgcttgggcagcttccctcccctcccctcccctccccacctaacgttaccggccggtcagcctctagtccacccgagcgcggccggccgcgtggacgcccgccgacgagcgagcagcgacgacgacgagcgagcaccggcggcggaggcggatggggaagtacgagatggggcggacgctcggggagggccacttcgggaaggtgaggctggcgcgggacgcgggcacgggccggtccttcgccatcaagatcctcgaccggcagcgcatcctcgccatgaagatcgacgagcagatcaagagggagatcgcgacgctgaagctgctcaagcaccccaacgtcgtccgcctgtacgagcctgagaatgtcctcgttgatgcaaagggaaacataaaggtttctgattttggactaagcgcccttccgcaaaaccaacgaaaagatggtttgttgcataccacatgtggcagccctaactacatagccccggaggtccttctgaacaaaggttacgatggctcggtatctgacgtgtggtcctgtggtgttattctatatgtaatgcttacagggagtcttccatttgacgaccaaaatatggttgtcctctatcagaagattctgaaagggaatgctcacattccaaagtggctctctcaaggtgcccaagatctactgcgaaagatcctggatcctaacccgatcacgcgcgtagatgtggatgggataagggcacacgattggttcaagcaaggctacgctccttctgcgccgtttaatgatgacgaagaagatatcaacgtggatgaagaagacagcctaaatatgactgagaatggcattcaagacaagatagcaatcaaccaaatcaatgctttccagctcattgggatgtcctcctgccttgatctatccggattttttgagaaagaggatgcttctgaaaggaaaatcagattcgcatcaaattatcccccagcttacttgtttgagaagatcgagagcattgtcagaaaaatgggtttccaggtacacaagagcaacggcaaggtgtttgagattaatgaatccctttacgttgtcgagctaaaaaagtcatctggagactgctccctgtacagaaagttgtgtgagacgctctcggaggacttgggcacatgcaaaagccagcaatttttaaagcaggattctatcagacaagagataggtagacataacagtagcttttaactaagagcccccttgttaaataggctatagacacaaactaacacaaacaatatactgaatttaaaacagtatattgggcatgcacctattacagatgtgctctctcatgccttttgtcatgaaaccttaagagacttagactatgaaaaattggcaactgacaatgtatcgaactccaaagggataatatgatgatgtaaacaagtaaaatacgcatataagtgattcagagctacctggtctctatgtttctcttatatattgattgatattggaacgtaagattgtttgct

SEQ ID NO: 31982 - DNA, 262 bp, Zea Mays
ggcgaggtacaagttcagtgatcctctccttcttcctgtgatcgcgccagaccaccacttggctggccgttaatgatcgtgcagcgagccccgacagtctgcattgggcgcacgccgggatgcacgactccacaatggcaacctgccttgcacaaccctacgccggtgatcggcactccgtacgcgtccagggcccagcggctcttcctccttactcccctctctctggctacgggtgagttcttgcttgcttctagttggg

SEQ ID NO: 31983 - DNA, 4342 bp, Zea Mays
atgaggcccggcgcccgtctggactcggtggtcttccagctcactcccacccggaccaggttcgacttggtcctcatagcgaatggccggaaggagaagtttgcatctggtttgttgaaacccttcctggctcacctgaaggccgcccaggatcagattgcgaagggagggtactcgatcacacttgaaccaatctcagagttcgacgtgtcattgttcacgagaggcgccgtggagaggtccgcttctagatttcgatactactctagtacagttatttctggcattgcctatttgcctcttgggtcaattcttgtgtcagttctttgcaggtttgtgcgtttcgtgagtactacggaggtccttgagcgagtcacaacactggagtctgagatcctgcagctcgaggatgccattgctatccagaggaacgatagtcttagattaaaatgtgtaagcgcggaagatttctctaccttatggctaggttgctttgtgtttttgtagagagatcacatattcttgctttgccatttaaaaggtcggagaccatggaagaaagttgactgaaagcaatgaaagtagtatgacgctgcaccaacctgattgctttctgagagcatgttgtatagaatagtgcatgcctttgaggattgtctgaatcacattgtttcgttgggctaccaaaaagaaaagcaaggtgcaatccactactattgttttagaatctagtcatcatggagtttgatgcgacatcacatcaagggccattattaagttggtacttgtcacttaactcccaaaatgttaggggtcataatctgatttatggacaacctttactatcgtttaatgttatgaattttctgtgtgatcacaataacttacatatgaatctatattttttgaagacctgaatatttagcaaaatcttatttgaaactggagaattctggatggtattatattctacattcaggggagtactgaaatggatccagctgtttcatccttttattcgccttaccatagtcacaagaaacgggtacagcggtactatggtagcgacccttgacacagaaatatcgtccccgcgaccaggatacacatgataattttcgttcccagtttcccaccatgtaaaaatctctcacaagtagtgtaccatgttccttggccctatcgatccaggaactttatgactatgcgccttacctgtcacagcctgccatatctttttatatttatttctaccacatgcctaatactatccatccactaataggtggaccggcaaattatgatcctaattcagccacggcaattgttgtttacaagcctgggtcaaattcaattccaccaatgcagaatgaaacaacagcacaggaggagaattcaaaagttcaaaactgtgttaagaaaagagcaagctatggctttcactcgtgctgtggctgctgggtttgacattgacaacctgggttactttacttgattgcgtttgcagagcgctttggtgcttcacgtatgatgaaggcatgttcacatttcatcgaactatggaagcagaagcatgaaactggacaatggattgaagttgaacctgaagcaatttctacacgctctgaatttcctccatttaatgcatctggcattgtgttgatgggagacaacatgaagcaaaacctggaatcagggtctattaatggagagccaaatggcgaggatggagctaaagctgatcagaagtccagccagcagatggggtctcatgctgcatatcctccatgggcaatgcatcctgcatctggtgcagttctttacccaccttatcctatgcaaggaatgcctttctatcctggggtgaatccctactaccctccatatcctccagtggatgatcccagttcaggtggaggaaattctcatggtcacaagtcacatagaaaggggaagaggtctggaaagaagcctagtgtagttgttatcaagaatgtgaatgtaacatctaagaagtgtggctcatcagagagtgaatcacaatcaagttctgaagttgagtctgctgacagtgacaactcacactccaaatcaagagaaagaaagcataaaagctcatgttcaaaggagggtaggagaactacttttgatccgggagatgagtataacaaggatgaaacatcgaatggccatggtgttgagcaaggcaactggagtgcattccaaaatttcttgttgagagcagaagaaaaaacaagatctagtgatgcagacctgtttgctggtgagaaagaacccccatcacggagaaaacagaatgtaaacacagcagatcctattattttagttgagagagatggtggcaacgtctgtgagcagaacaaaataggttttgattcagccaatgggaggactagagttatccgggtcatgtccaatgatgaacttgttatgtctggagaagggagaatctatatggattgtgaaatgaaggagattgaagctggtggaggaaggtacaggagagggacaggtgacgactacatggtttatggtcagggatgtcagatagacagacattgtttgttggatcctcttgcagaggcccagtacaagaatcctgttcagcaggacaataataggaatggtgttacggatgagtcctttatgattcctcttaggtccagctcacaggataatatcggagcagagagcagaactactatggacatagatgttgagcttccttctagcattcataaagcatcagataaaaaggctgggcatcagcttttttacgaacctgatgaactggtgcctgagcgttgattcgaagatgtttcatttggatatgatccagcaatggattatgatagccacatgcagagtactgtgaaggttgaagatgcaaaaccagaggatgtcttgccggtcactgacggtgtacagaaggtagagaaagagaagctaaagaacgcaagggatggttcagataaaagaacgaaggattccctattgaggagactatcggcgccaaggaccccactgaatgatgcacaaaaacgtgcacagaacctgcgtgcatataaagcagaccttcagaaactgaagaaagagcaggtatttcacatttcattccattttcccttctgtgcatttaaaatgactaaaatatagtgagcatttgcatttttagttggtgatcttggttgggttccattcctagcctacaccagtttgcttgggacaaaaggctttattgatttgtgaccaccctttcaaatggccaactagccaagtttaaacacaattcagtacagtttcttgaaagaaaaaaatacatgcctgctaacagttcttgtaaggcagaagttcaagtagttaacctgagcaatagtttccctattccagaaatcttatgagttttacatataatgtactctatgctgctgagtttgtcatacattgtttcattattagggcatgtttctaaatcgtgtcgacaaattgtacatgatatcgtctgtgtagttgaattgccacttgccagtgacttttcttatttctcaggaagaagagcaaataaagcgattggagaggcttaaattggataggcaaaagtggatcgccgcaagaggtaatggaaagggtccagggaacgatgctcctagagcgaacggtatgaatggacttagtaaatcagttccaaccttcactgggatgaaaagggttgaaaacggaacgactgaatcactcagcggtcgactgaagaggctttctgaacccaaaagcattgttggggcagagcattcgttgaacccaaagtcagctggtgcaggccgttcacgaagaagtatggcatgagttgatgtgagatggagaactgaatagcttgagtccatcgtgccactcgctagcccggtaacttacttactagaaacgtgaaaggcatctcaaaaggctttttgtacaggaaaaaaggaaatggctggctctgtagcattgtctgcttccaagatttgtgatggaaaatcgagctatctttcaatggcatggcgttggactttcaattttaacataattatttcattcttttgattcagggtggcttgtgatagctgtaaacctggtttttttcccaatgtggagctatattgtgggtgtatttatggaatggattgatctgtgtttgagatatattgtggtatttatatagtgtataaatgtccgactttggattggacgagatgggccaattcaatttgtacggcagtagtatgacacgctgaagttggatgtccaagtattcacaacctctgcatcgaaggcacaaagagcagat

SEQ ID NO: 31984 - DNA, 1087 bp, Zea Mays
cagcagtccgcggttccaacttcccaccgctactccgccagtcgccagggatctcggcatctcgcgccgtcgccgggccgccgcctcgcccacgacgcccagtctccagcctctgggctttggcgccctcaccggccatgctgcgtgcgactcacctcccactcccccagcagccactgccggcgcattcttcctttgattaatgtaagtttggcccggggctggacggcggcggctaggatttggtgcccactgagctgcctcacggttcaacctcatccaaggaaatcctgactggagtttctctaaacttcagcataccacgcagatgatgatctcccgggttgggaagagagtttgcttctgcacttccaggtggtaaagttcttgacgggaatgccaactcatggagatgaagtgcatcttgtgcaagcatttcaaatgttgagccctcaactctactaggtgtaccttcaaaacacttactgaccacttctgaagcaagaccaagggcctcaaatatctgggcacctttgtacgacgccagggtggaaatccccatctttgcaagaaccttcattattccattgttagaagcatagaaatacttgtcaataagttcctttggatacagctgtccgtcatcttgaagaggtattttctcatcaatctgtaaccgccatatggcttcaatagccaaataagggcatatagcatctgcaccaaatccaagaaggctacagaaatggtgcacttcacgaggttcagctgaatcaacaagcaaccctatgcgtgtcctctcaagattcaagacaagatgctgatggacagctccaactgccaatagagaactgacagctacacgatctggagagaaacctgtatggaaaaatagttcaaacctgacattttaaacctccaaatgctagagagtatatgacaagtaattttacagaatcaagcattgagatgcatagcacaaaatcatataaatcaagtgtgttgtgagtatcaagcgttgggaaaagatgaaagcagactgcttagaataagggagtagaatttagatgaacttagaataagggag

SEQ ID NO: 31985 - DNA, 1788 bp, Zea Mays
cttccgggtccaaccaaaagttctgattcctaaactggcccgtactcccgtccaatcccaacccggcaacgcgagaatatatcaatccatcctcgcgtcgcgtgatctcatctcgccctcgctcacctacatctccgtccgcaagcgtcagccaggctgccccgggaggccgggaggaagcagatcggagaaggcaagccacggatttccttctcgccttctggaccccatgtgatctgttgtaatggctcgattgtacatcggcaacctggatccccgggtgaccgctcgggagctggaggacgagttccgcacgttcggggttcttcgcagtgtctgggttgctcggaaaccacctggctttgcgtttattgattttgatgataagagggacgcagaggatgcaatccgtgacctagatggcaagaatggatggagagttgagttatctcgtaatgccagcggtggtcgtggaggtcgtgaccggcatggtgggtctgagtccaagtgttacgagtgtggtgagactggccactttgctcgtgagtgccgtttgaggattggttctggaggtctaggcagcggaaggcgccgaagccgtagccgtagccgcagtcgcagtcccagatatcgccggagtccaagttacggtagaaggagttacagtcctgcagcacgctctccaaggcgtcgtagcgtctcaccagctcgtggacgcagctatagcaggtcaccacagcacaagggtgcacgtgaagaatctccctatgataatggataccgccgcagcaggagctagagccagatcgttgtatccgacgacgagcgttatgtgacagatattgggaaagctatggtcaataacctgcttgacagatccttcgtcgactgcttgactttggttaaggcatcgtcctgcactgcttaaacgactcggccgactacggctttcagttctgtcttcatggttttgttctgcgctctacattcttcgcacaccctcgcatgcttcattcagtctgccgtgtgttaatctgcctgcgtatcttctcgaagatgctgcgcatcgcaaaagcatttctccccgtaggtttggtctccgtgctgcgtgcgctgctcctggttcaggaactgcagtatgttagatggatgaggatgactgaatgactcacctactcacgttatcatgccttcagaggacccaagttagtgagcgccaggaagtgaattgaccaggccaaatgctacgttgagccgactttggctttgctctgcgatctccacttgccaacatgtgttgccttcgacgaagtcttcttcgccttccgcttccttctctgcagcatcctgattgatattcttcattcttcgagtgacatgcagtcaccctaattgatcgtcatagagcctgcgttgaagtcgaatcccccctaatggacaatgtagttaaattgttattagcttgtttcttgttggatagactaatgtcagatgctgtttggtataaaatggtaaccatctggttgatgattggcggcgaactatttgttcagcacgtggttgctatatgacaagtcacaaggtattattaacctgagtggtaggctgcatttggatcaaccaggctggttgagaggcagcatgtgcttgtttggttgctcgtccgtgcatctagtagcttaagttgaagtgtttggttaatggttgtatgtatttttgtgctcattgcaccgcggaatgcagaatctgggcagctcgcttgaaacagatttcattctcgtttcttcg

SEQ ID NO: 31986 - DNA, 752 bp, Zea Mays
aaaaaatcgtgtggaaattctcagtagagaccagagctgccaacacccaacacgatgcccttggggaagtactactgcgactactgcgacaagcagttccaggacacccccgccgcccggaagcgccacctccagggcgtgcagcaccaacgcgcccgcgccctctgaccagcatggcggcgcttcctccctcctcctgcctgacggcaccctcgccaagggcatctgtcaccacttcgtccgcacgggggcttgcaagtatggggattcatgcagatacttccatccgaagccaaatggtgtcaatccagcattagctgcaccagggcttgggtctgggcctgcacccatggtgcagcagtctgatattattgggaaccaacccaattttgttgtataccagggagtagacataaattcttcctcagggaagatactggggggacacgcctcttggggcaacctgccgccatcactgcaacctcctcctgaaggcggctaccctcccctcccgttcatcgactggggctgaaggggcgttgtctccctgaaattcgaaccatttaatatttcataccttgattggttgtgctaaatcgcatatacttggagcgcagtagagttaaggtgatcccagtttattttgatcttaaatttatctctgtaatagatatttacagtcagaggtacacttcgcagattgcgttgatgtttgaatgaactcacatttgcatcaatggtgctcttatggc

SEQ ID NO: 31987 - DNA, 765 bp, Zea Mays
gtgctcgtcttctttccaatctctcttcctgatggataataaacgagactggttgctgtagccacccagaagttcctatcagacattgctagcgattctcttcagcactgcaaggccagggtagcagcacctatcaaagacaataagagcaaacagccgaagacgtcttgtattaaccatggatgatctttctaaagctttgcgcgagcacggcgtgaacttgaaacacgcggagtacttcgcagacagcccttcagctggaatggctccttcgaccagagaggagtagactggattaggccaacttgtacggaactagggagggatcgcgtggaatggatgggcatgttggcattcttgcccgatcagatcgatgggatgtattactattaagtactgctactatgactagtatatttctcaattaccattgtcactgagagaatccagacacaagtcgttttgcccatgcgcttttatttgtacaaactgtcaatcatctgtaaccctatggggcccaaggatgattgggcaaacatcatgagttttttgttttctacataccattctaaaggaggcagctcaccttccctgggtggcgaattgtcaaatcaccccctggccctaggagaacatctctatggacacttctctaggtcccttgtttcctccatgttgacaaagtgatcagtatgtacttaccacatgaccacactgattaattgtgtccttgctttcgtctatggcacaccaccagaaatctgt

SEQ ID NO: 31988 - DNA, 1251 bp, Zea Mays
cagcagtgctgttctgtattcccaaattgccaccctgttctgcgtactcgtcgaaacgacgataaccacacgtctcgaaaccctaaggctgccccaaattgttatcccaaaccctagacctaaacggctccatgctgtgagaccaccaacagtgtccatggctctggacgccccggtggagcgacgggacgaggtacagatcgcgatggggaacggaaacggcgtggcgccgtctcaaccgtcgcggccagccggtcggccaacggctgctgcggcggcagcgccatacgcggacaggcggctgcggctgaacccaaatgcggatcacaagccggaagactacagcgacgtgcgcggcgagtacgcgccggccgtgtacagcgcactcgagcggcatctcccacccagcctcatcgatgccgaccgcgatgtcaagctacacttcatgcgggacattctcgcgcgctactggccgcagggcgagcgtaacaaggtgcaaaggcacagagaatataggcagaggatactccacctttacaagcctcttcatgaagaattatacaatatgcatccttcagtgttcttcttaccaacattccttgaagcagttaggagcaatacagaagaatgctttagaagtattatgactgagccaattcctggtgtttattcgtttgctatgttgcagcctactttctgtgagatgttattggaggaggtagagaactttgaaaaatgggtccatgctatgaaatttaagataatgaggcctaatacaatgaacaagtatggtgctgtccttgatgattttggcctggaagctatgctgaaccagttcatggaacagttcatagctccaatttctaaagttctttatcctgaggttggtggaggaacattggactcccatcacgcttttattgttgaatatgggaaagacagggatgttgaactaggttttcatgttgatgattcagaagttacattaaatgtttgccttggaaaacaattctttggtggtgaattatactttcgaggtattcggtgtgagaatcatgtgaattcagagacacaacatgaggtgacttctcattttacttcaacaactttcttatctacccatgcatggaaatgtatgactacacacatattcctggttgggctgtactccaccatggtcgacacaggcatggtgctcgagctacttcatctggtctcagaataaatctgcttttgtggtgccggaggtat

SEQ ID NO: 31989 - DNA, 5154 bp, Zea Mays
acgaacagcttttcggattgctgacatcattcattcaagggacatattcttgtatgtattggtaattgaattgaggagtggcctcctttggtagaagttgcagaaactcgtcaactccctcctatgttgattgaaagatataacacagctgccggtgaaggaacagctctttgcgggattttttctgacatacatcgggcctgggcaacagttgacaattcatttttcatctggcgatttgataaatgggacgggcattgccaagagcataatgttgacgagcaagcaatttgtgctgttggccttgctagggcaaaacctgggattttcattgaagccattcaataccttttagttttagcaactcctgttgaactgatacttgttggagtttgctgttctgctagtgctgatggaacagacccatatgctgagctttcattacaaccattacctgagtacatgattgccactgatggtgtcacaatgacatgcatcacatgtacagacaagggccaaatttttgtagctggtcgcgatggccatatatatgaattgcagtatacaactggttcaggttggcgtaaacgttgccgtaaagtttgtcttactactggcattggcagtcttctttctaggtgggtactgccaaatgcattcaaattctcaactgttgatccaattgttgatatggtcatggatgaggagaggaacactatctatgcgcgtaccgagggcatgaagttgcaattatttgatctaggagttaatggtgatggccctttgacaaaaattactgaagaaaagaacattgttgatccacgggatggaccttatggtggtcggaggtctaatgcgccaagagctgcacgatcaccaagaccatcaattgtttgcatctcacctgtatcttctgtggaatcaaagtggctccatgctgttgctgttttatcagatgggaagagattattcctcactacatctggtggaagtggttcttcagttggattgaacagtggtctgcagaggccaacctgtttaaaaattgttgctactaggccgtccccacctctgggggttggtggtgggcttacatttggtgctgtttctgtggctggcagggctcttcctgaagatctagcattgaaagttgagtctgcattctattctgctggtgctcttgtaatgtcagattcatccgctacagccatgtcatctcttctggctgtgcagaaagattcagctgcgcagctatctctccccagcacctttggaacagcttctagaacctccagagctctacgagaaacagtctctgctttacctgttgagggtcgaatgctttgtgcctctgatgtcttaccacttcccgatgctgcttacatgatgcagtctttatatgctgatgtggaatgtttcacatgtttcagaaaaccttctgagaaggcatgtataaaactgtgggcaaaaggggatcttcctacccagcatatcttgcctcggaggagggtggttgtattcaatactatgggtttgatggagttgatttttaacaggcctgttgatattctaaggaaattgtttgacgggaacaccctgagatcacaaattgaagaattctttaatcgctttggtgctggagaggctgcggcaatgtgcttaatgttagctgcgaagctactttatgctgaagatagtctgataagcaatgctgtttctgagaaagctgctgaggcgtttgaggaccctgggcttgttgggatgcctcaaattaacggcaccactgctttatctaatacacgaactcaggctggaggctttagtatgggccaagttgttcaagaggcagaacctttgttttctggtgcatatgaagggctttgtttgtgctcgtcaagactactttatcccatctgggagcttcctattatgtcgattcgaggaccgtctggtaataataaacgcgaggatggcgtaattgtttgcaggctttcagctggggccatgaaaattcttgagagtaagattcattcactggaaacatttttaagatctagaagaaacaagagaaggggcctttatggttatgttgctggtcttggcgattctggttccatactctacaaaacagggcctattattggccctggagggcatagcaatggaaggagtccctacaactcccaaattcgagatatgaaccctgtagataaatctgcatcgaataaaaagccaaggctgctttatacatcagcagaactagccgctatggaggtgagggcaatggagtgtcttaggcggttgcttaggagatctggtgaagcactgtttctgcttcaacttatttgccagcataatgttgcccgtttggctcagacactgggcaatgatttatgcaagaaatttgttcaattaacatttcatcaattggtatgttcagaggatggtgatcagctcgcgatgcgtcttatttctgcactcatggagtactatattggcccagagggcagaggaactgttgaagaaatcagtactaaattgagggagggttgccctagttacttcaatgagtcagactacaaatattacttggcagtggaatgccttgagagagcatctatgactaataatgctgatgagagagatattcttgctagagatgctttcaacctcttgactaaaattccagactctgctgatttgagtgccatatgcaagagatttgagaacctaagattttatgaggctgtagtccgattgcctctgcagaaagctcaagcacttgactccaatgctgatattatcaatggtcaaatagacccaaggcatcatgatacaataatgttgcagcgtgaacaatgctataggattgttatggatgcgctgtgcactctcaagggtgttgggcatagtcgaatgcaaagtgcagacaagtcatctgctctagcaactgctgctgatccagcttctcgaagcaagtatatcaaacaaatcatacaacttagtgtccaatggccggacacagttttccatgagcatctatacaggacacttattgagcttggtctagaaaatgagcttttagagtatggtggatctgatttggtttcttttctgcagagtgctggccgtaagcatcaagaagaggttcgggcagtttcttcagttacacctggagctgctaagatgcatgatttaggtgcacctatctcgactagtcaaacaaagtatctcgagctcctagctaggtactatgtccgcaagggggaacatattgctgctgccaggatgttgttaatattggcagagagacagtgctctaattctgaagaagctccagctcttgacaagcggtatgaatatctcagagatgcagtgcttcaggccaaaagcgcaggcatcgctgctgatttgtccaaaaatcctgttgatagcagcacagtggatttgcttgaaggaaaacttgtcgtgctacgcttccaaattcaaattaaagaagaattggagctcatgagactgctaaggctgctaaggataaggcaaaagaactatcattaaatctcaagagtatcactcaactgtataacgattatgctgttccatttgatctctgggaggtttgcttggaaatgctgagctttgctaattactctggagacgctgatagcaaaattgttcgagaagtttgggctagactccttgatcaggcacttactaaagggggtgttgcagaagcttgttctgttgtgaaaagagtaggctcgaaacttgatcctgcagatggagcttgtttacctttagatatcatatgccttcaccttgagaaggctgcagtggatagattaagttcaggagaagaattagttggtgatgatgatgttgcaagagctcttcttggtgcctgtaaaggtcttcctggacctgtactttctgtgtatgatcacctgttatcgaacggtgcaatcataccctcactaaatctgaagttgcgccttctgcgatcagttctagcaatcctccgtgagtgggggatatctgtcattgcacacaggctaggcaccacaagtgctggggcttcattctttcttgatggaacattctcattgaaccaaacagggactgcgaatcaaggtgctcgagataaaataattagtttggcgaacaggtacatgactgaggtgaggcgattaaaccttccacagaaccaaacggagaatgtctaccgtggtttccgtgaacttgaggagaaattactatcttcttattaagcagattgcagtcattcctcaagatagtgaagaatgatcttgcatctgttgtaccacaaaaccaaggaatagagtcgagggcttctggattcacctcagcatgatctgtattgttccttacacttatctgcaagaacccggggctgctgcaggactctagctgaggtggttagatggctctagtaccactcatgtcctggctgagttggttagatggctctaatagcacttctgatgtcctgggtttgacttctaggtgagagcaaatttcagacgggttgaaaaaggtcatttgttggttcctctgtttgtgtgcacacaacggactgaccaatggatcctcgtgtaggtaaagatctagatctggtctatagggagcggattctcttgctgcatgggaggcagttttcgtgacttggtcgtactccgattgagcttcttaatataataacgggggacagtcttttctcaccgttcgagttcttttcttttttgaacccaaggctgctttaatcattattaatcagatgtttttcatgactaagtgcagccttcttttatttgacttgagtcagtatggactgcagagccgtagatttggaaaattgtttagatgtcttcattacttgctaatctagtggtagatactgccggtcctgttttaagggtggactttgtccctgaacaacattaaactgttgaatacaagttgggttttgatgcaggaatcggaatttagtatgtgccatgacattgtacagttctatagtagattattctcagtgttgtaagcttttacgctgtgtttgtttgtatgaagataccgtttcagtagctgaaaaaaggtaaaggttattgccagaaatgtggatttataggtctcgtt

SEQ ID NO: 31990 - DNA, 3908 bp, Zea Mays
cagcgggcttactaattttgagaggtgtctgacatagactaaaaaaaaatcagcgccagggctcagggagcgacctaccccaaggtggggagttggttccttttccagtaataatgagggcaaattcatatcccatcatgatggaagaggacatggaaaatggaaggtcgtatcaagaaagaccaagggctttttcaacagtacgaagcaaatcatctgtaccgctggccttccgtttgttgatgagggtaaatccccgtgccgtgattattctttctcttttggtcttcagtggtgttttgtatgtgggagctagtacatcaccaattctggtctttgtgttctgtatatgtactctcagtctattcttctctgtctaccttacaaagtgggttcttgctaaggacgaaggacctccagaaatgtccgagattttataatgtacaaccaaaaagagcaggcctggtgcagtggtgacagctatttgctaaggctttagctagctatatccatcaactgagtcattttagactgtttgagacttgagaaagagttggctcacagcagttccaatgatttagtggaacatgtcccgtcggggcagaaattccatgctatgctctacagagagttgtgtatcattatattaatgagaaggagaaaggctgcttgaccattgtctgttttttaggagattttcatggaaagagtgccctttctatcaatgcagggctcaaacctttttgcaacaattgaatgggtttagcttagaattgaatcatgcccccgcaagattgtcgggccatcgaggacttgttcagatgagttgtaaagtgccggcgagggaaagggatacatagcctttagtgacaaagatagagaagttctcactgagtcaccaggtcacaagttcgaagcagcctctccgtatttgcgggagaaggcttgccccttggtttatcccttctccagacccctcatgtgggaacttgcggcattgggtctgccctttatgtacaaccaaacctttagtcctaagcaagttggattaggcacttgggccagagatcaaacccagtgcgagcatttatcctgtaaatggagtttgtagtctgtgctgccccctgccccttttattatttcctatgattgtttgtctctaaattgtgctagtattattgggtttttgacttaccagagtagtgctgtagcatgatttgattttgtgccttctcttgttcagatatctgatgccataagagatggcgctgaaggtttttttaggacacaatatggaactatttctaaaatggcatttattctggcctttgtcatccttggcatttatattttccgcactaccaccccacagcaggaggcatctggcttgggaagggcaacattagcctatattacagttgcctcttttctccttggagcgttatgttctggaatagctggttttgttggaatgtgggtgtccgtacgtgcaaatgtacgagtttcaagtgctgctcgtcgctctgcaagggaatcattgcagattgccgtccgtgctggtggtttctcagccattgtggttgtttgcatggctgtatttggcgtggcaatactgtactcaacattttatgtttggcttggagtagattcacctgggtcaatgaaggttaccgacttgcctcttctccttgtgggatatggttttggtgcctcttttgttgccctttttgctcagttgggtggtggaatatacacgaaagctgctgatgttggagctgatctggttggaaaagttgagcagggaataccagaagatgatcctcgtaacccagctgtcattgctgacttggttggtgacaatgttggagattgtgctgcccgaggcgctgatctttttgagagcatagcagcagaaattatcagtgcaatgatacttggaggaacaatggcacagcgctgtaaaattgaggatccgtctggctttattttgtttcctcttgttgtgcattcatttgatttggtggtgtcatcagtcggaattctctcaatcagaggaacacgtgactctgggctcatttcccctatcgaagatcccatggcaattatgcaaaaaggctactctgttactattatgcttgctgttcttacatttggagtgtctactcgttggctcctgtacacggaacaagcaccttctgcatggctaaattttgcattgtgtggcttggtggggatcatcacagcatatgcttttgtttggatttcgaagtattacacggattataaacacgagccggtccgccttttagctctttcaagttctacaggacatggaactaatattattgctggaacctctggcttggtggacgagtctggcaacccaactggtggtctttttgggacagctgtagcgacaatggggatgcttagcacagcagggtatgttctcaccatggacatgtttggtcctatagctgacaatgctggtggtattgttgagatgagccagcagcatgaaagtgtgagagaaatcacagatgttctagatgctgtgggcaacacaactaaagctactacaaaaggatttgccataggatcagcagcactggcatcattcctcctgtttagtgcatacatggacgaagtagcttcttttgctcaaatgccgttcaaggaggttgacatagcagtcccggagatttttgttggtggtttattaggctcgatgcttatattcctgtttagtgcatgggcttgttcagcagttggcaaaactgcacaggaagttgttaatgaggtcaggagacaatttatcgagaggcctggtattatggactacaaagagaagcccgattatggacgctgtgtcgcaattgtggcctctgcatccttaagagaaatgataaaacctggggctctagcaattatatcacccatggccgttggcgttgtcttccggattttgggccactccactggtcagcctcttcttggagctaaagttgtagcctccatgcttatgtttgcgacggttgctggtattcttatggcactcttcttgaacactgctggcggcgcctgggataatgcaaagaagtacattgagactggtgcccttggtggcaaaggcagtgagtcccataaggctgcggttacaggcgacacggttggagacccattcaaagacactgcaggaccatcgctgcacgttcttatcaagatgctcgccacgatcacactggtcatggctcccatattcttgtgattaaccaaccagatttatcaagcttgccattaaccctgcggagatgtatctatgcgacttgtagatgaggtgtttacctgcatgtgatgtaatgatccaatcggttttagtgtgactacatgttgtacccaaagaaagaaagaaagaaagcagcgatctgtacccaggttttaatggtccaatcggttttagtgtgactatatgttgtacccaaagaaagaaagaaatcagcgatctgtacccaggtttgacggtagatattattctgaatttctgacgggtagtgatggtgcaaatgccatattttgtgacggacgtcactgaactagtagcccaagtgttttgtatttgtttattgctgggaacattatgacatccgttgagcttagctgtaagaaaggaacgatccacgatggattttaggatcgtgactgggtctacaccttacctttgactcttcacattaacaaagaaactgatgttatgtaatggtgttaatatgaccgattgtgagcacttctaagaggattaatatttaatagcttccagcacagaaaacatgcgcagataacaaaagaaacttcatatcaatctcaacagaagctgcatccttaaccatcctgcatttgtggtgcttgtt

SEQ ID NO: 31991 - DNA, 2785 bp, Zea Mays
ttcccgcccatgtccatctcaccgtctccttgaaacgcacccgagccaggtcgagccgtcgagtcgagtcgtcgacgacagcacgcggcgggcggaaggggacgcagacacgcagttgcaggctcgcagcagcaagattctcctgtcttcaatttcatcaacaatctctcgcctataccaccacctaaacctttagactcagcacataatgtgcagctattcaagtcatcagacttggcacctgtttcttcgatctttgcctcaccacatgttaatccagtgaaggaaactaaagttttgatcagggatgaatctgttcaccttcctcaagaattgcactcgcctagcagtgtcaggactcgaatagacacctcaggctcttttagaatgatcagatgcaaagacattgtgtcggacaattgcaatatcacttgtcaactaaacgaggcatctattgattcttctgatcatacatcaaactctacaggccaattgactcaatccatacaggatgctgctggcagtatggaaagcgataaggatcaatgcgatgccaataaaacagaccttaccatatcccaggagtgcacaggcctagaaggtatgaaccttgatgagagtggcccagacaaaatggattcgtcacattctgggattgttgttcatgaaaaccagctatctgaacaaaacaatgacgaacctgcagcatataatgagggttacattattacacaccaatcaactagtgatatgctcactttagccataccatctggaacagaaacacaaccagtgaatgatacacaaatggctgataacccctactcttgtgaatccttgttggatgatcagtcaagtggatattgcacccagaattctgtgcatgaaccccatttgtactggactggggcagttgaagggtctgcagtatcctatactccccaaacactccctggtgctttgcaaagtcagctgatgccatgtaacaagctcagtgaaccaaaagattacgtgcctactgagcaaaatgccttgtcacagcacttacgtggcatgcgtaggcgcagccttttcaatgaaaaggctggaattagtaataaaggtgtagacaaaacttcggatcatcatcctgtaaattcaactacccccaaatgcaaaactatttctggtgacaactcaaagcctctaagaacccctccatgcgcattacctggccctgctggatcttctccagcaccttttgagcaaaacattataaatgatgatttcactcaaacaactgatgttgcaactgccgaagcttctagtcagggtagtcccaagaagaaaaggcataagtttgacaatggtgatggcacttcatgcaagcgttgtagttgtaagaagtcaaaatgcctgaaactttactgtgagtgttttgctgctggagtctattgttctgagccttgttcgtgtatcggctgtcagaacaaccagagtcatatggaaacagttctgtctacacggcaacagattgaatctcgcaatccattagcatttgctcctaaagtcattcatacatctgagcctggtatggacttaggggacttttccaataaaactcctgcttcagctcgtcacaaaaggggatgcaattgcaagaagtcgtcgtgtctaaaaaaatactgtgaatgttttcagggcggcgtgggatgctccgtaagttgcagatgcgagggctgtaagaatgcttttggaaaacgggagggggcttctgtgttaggcataggggaacctaaacagggattggaagaaaagtatgtttgtgtgaaagaagaaaaaagtgaaatcgataaacagcttgttgtctaccagactactgacgctgctcctgctgaaaatgtactgaccacaccttccatggtggagtgcagacccttggcttgtcttccacccgcaagctccaagaaaagctccaaaaaaccacggtcttcaacaaagctcacaggacatccttctcggccgtgcaacttacaagctcctccaaagaccgacgttgtgctctccccattcgaaaactacgcggaaatggtcctcggtgatagcacatcagatatcctgaagggaaattcatctcctcatacttctgttaaagttgtgtcaccgaataagaagcgaatctctcccccacggatgggtatcgggctatctccaatctgtaggagtggcaggaagctgattctcaagtccatcccttctttcccttcccttggtggtgatgtaaacaacgaggatccgaaggccaagctcccagcgccttgaatttatcatgttttgtgtcactcgtggcccttcccgttggttctcgaaatcgcccacgcgctgactgcaccagactgtttctaccaccataccatcagatagtggatggacaaccaagcgtgcaccgtttcatcatttgtgtaattgtgtttgcttcgattaataattattcacgtactgctataataacccactgtgatggcagaattctacctacctcccagaaccaccagtggcatttggtttgctggtaagttatgtctcggctcaaggacgttgctgtgttgcctgtgcctgtatgtctgtataatttatgttcattatccgggatcaagatgtggaacctctatgtacctgatggcagaactgttaagacatattttattttatttttatctgaggttaaactgtgagacttatttgtgtaaggtcatactgttttttacattttttccaggaacgtgcctgagcatgtctttcatta

SEQ ID NO: 31992 - DNA, 1878 bp, Zea Mays
atgccccaccaggcaccaggttgctgggtttgggcctcacggtccagcagatgccagccagttgccacgcgtttcatcagcccgacccaaccaaagccagaagacacggtgccgtcagctgtgctcccggcgctcccgcaccacaagcaagcgcgtgcgcgccgtcaagtcgcctctacagcaacttccaccgcgtactccctccctccctcgtctcgtcttcgtctccaggtttcgcgggggccaaggtttctgccggagcagtcgcggtctgcgctgcggcacggcgacgaggtggggatggagtaccgcgacaagctcgtgctggcgcccatggtccgcgtgggcaccttgccatttaggctactggctgctgaatatggtgctgatattacttatggagaagaaattattgatcacaaattcttgaagtgtgagcgtgttacaaatgaatctcttgggactactgattttgtggagaaagggactgacagtgtagttttccgtacatgcccacaagaaaggggcagggttgtattccaaatgggcacatcaaatgctgtgagggcacttaaagctgctcagatcgtgtgccgtgatgtttctgctatagatatcaacatgggttgtccaaagtctttttcacttagtggagggatgggtgctgcattactctccaaacctgagcttatacacgatattctgacaacactgcggaggaacttggacacaactgtgacatgtaaaatccgtcttctgaacacacctaaagacactgtggagttggcacgccggattgagaaaactggtgttcctgctcttgctgtccatggaagaaagattaaagatagaccgagagatcttgccaagtgggatgagatagctgatgttgtgtcagcgctgtcaattccagttatagctaatggagatgtctttgagtatgaggattttaagagaattaaagatgcaacaggtgccgcgtctgttatggttgctagaggtgctatgtggaatgcctccatcttttgtgccaaaggaaaaacaccttgggaggatgtcaaaagagagtatgtaagaaagagcatattgtgggacaacgatgtgaagagcacgaaacataccttgaaagaaatgataatgcactattcttgccttgaacttcctgaggggaaaggcgttataaagtgtgatacatctgaagatttagcgagactatacggggaagaggactactataattttgttgttgcaaataggaaatgaatacaatttgatgttgtgagctctcatgtgtaccagtaaggcttgaatagccagacgaagagtgtggtgcctgcagagacaagctgttgagatgcagaatgaaactagaaatgcctttgttgagaagcttgttcattatccttttcagttgttcagtgtacgcatcctgagatgtacaatcctttaatgagaggagagtatcatcttctaaggagtcaagggtgttgttcaaggcatgttcctgaatagagaatgcagtgcctgttatgattgccccagatcttctgcttggattcctatctcaccctttattgatgggattaggaggaattcctgccaccaaggacaacgggatttgccattttggcgctgtctggacttaacactgaagctgctgatctttctcttgtactggtaatagttaggtttatacctgaaattaatcaaacaccatttttttgtaacaaatactaatttatttgctttctatactatggaaattttgtcatgtattgttggtggaaatactattgcgcttttgaaggaattgaaagactttgatatgttgactactattatggccctatggtctaagaaatattaaatgttttcatg

SEQ ID NO: 31993 - DNA, 1660 bp, Zea Mays
aggaagcccacttgcagtgcgggcgcggatgtgcatttcccttttcaacccacttgcagtgtcgactgggctaccgcggtattaccgccgccgccgccgccgccctacgccggttaccgaggtcttcgtcagccccttcgccggcggcgagcaccctttaggtattcctttcccggctcccgctgcgcgaaaccggccacccaaatttgtccttcactgggtgtctgggtccgatcctggcctggctgaaggggcttccagcaacacacacgtgggcgaggtctttatcgaaattcccgagagaaatgtgcttgcagttttttaccgtgctcccttcttccattccatgcttcctttttcttgcatgaatggtacccgactcggatggctcaatgagttgaaataatatgacgttgtagtatactggatataggttatagagtgattatgggtcagccatgaatttttagaccaacaatttgcatttaagctgattatttggtgcataaagatatgtttataggataagtcagaaggaacaatttttggaatgctatatttacacaggttggtgatagaggcaggtaggagcggctccgatgcggaccgcctaagatgagcccattacgttctcgcgtcggcttacactggctcccacgccgtgggtggatgtttcgccaggccaagacgagcatccatgcttgtcgcgactggtgctgatgcctggttgcaggcctttggcggaccgacgttgcttcctcgggtcaaggttttggcctctcacgaagaggatgccaggaaagagaatgacatggtggaggagattctaatccccaaggtaagacgtttgacatggtggaggagattctaatccccaaggcaagacgttcgccgggttttgcaggtgctcgtcggtcggagttaatttattttcgtgtatacacccgacgttggttaatttaatatccagtctacgcaagttggcaggaggacatgagaaaaatgtgctagaaattgtgttccgtggatttcagtgtgctgattctatttagtttttgccaatggatttcataccccatgtcctaattgtgtgccacttcttttgcttatggaatttccacggccaaattgcttctagcaaacaattggtggcaattggtttgttccgtttcgtgctccatgagacatgcagctcaccttcgtcgtcgctccctccgtcaaagctttgctccactacctatggcaaagagttggataaagtgactggtcaaaagagacgtggtgttattaactatgacacaagtttgtgcttggtctacccatatatttcaactctgaagtgtctacttattcatctaaacaaggcgtcacatatttacagcccacagagacgcccaacaagtatacggcctcatcaactgcaatgctaccaccccgctccagcaccgcaaaaactgcctgttgggccatctcccttgctatatatgcacaccgccgataatctggaaggtaatgtccacatgattctaaataagcccattgttccgaaggacaaacaaaatgagctgtttaggttcttaattgattttagtttctctgtctaacctgtgataggcaacatcataattgaaaaacttctgaaagaagaccttgagggaaa

SEQ ID NO: 31994 - DNA, 250 bp, Zea Mays
aatctcagttcttgaagcaaggaaactggagtagaagacttgcactcttgctctactaatgagaaaatcgagcaaaagatctgccccattcttgactgagagtaatgttgagcaagaaaacagttgttgcgacaggaacattttgctcaaatttccttcagatgaagcatggcagaaataaaaagttggtccgctgatgacagaaacgagcaagatatctgtcccttccaaaattgacatcaatgttgag

SEQ ID NO: 31995 - DNA, 248 bp, Zea Mays
ctcggatcaagaaaactgtcattttttaaaactttaacacatacatccattcatgtctgcaaatcatgtgcttggatggctttgctaaatgcaactaaacccgacaatgaccaaattgagaacaacatagattttttgtcttcttcgaagccagttctgataattacaggagacgatgttagaagacacaatcagccctgcaaatgatttggtcatggacaaccctcaaaaagttcaatacaaagaca

SEQ ID NO: 31996 - DNA, 3313 bp, Zea Mays
ccagctgcctacggccaccgcgcggcgcatgcctccgtccggtccgtccgaacgctcggaccggatgaatggatgactcctgcagtcagccacttcccttcgtcgctcgtcggcatggcgccacgcctctcacagccacctgaggcactgaggcagcgacccctcccccttgcggccttgcctcctccagaatcgcagacagcttccgccgaatgaatcgtccacttgtccgtagaattgtgcgatcctccggcggctaccaatgttacggtgctctcagtcttatgtttgggctgccactcgcctgtcgccattgcccatcaccatctgtatgatgggtgggtccgtcagtggcccgatcgcaacgtccaacctatcagcgctccttcatggatcatggattcagcggttgacacccagggttgattcttcgcagatccaatgaatctccgtagccggctctggttagaggctgagccctcgcgcctgttaaaacatcatgatgctcctcgtgagccttgtcactggttacaaggcgtcaaccggtcaagggctgcctccctgtctacttctgtccagtcgagtcgttctagctgtagctgttgataaggccctgatttactagtcttcactcttcagcagggtccttgcttggggagacaccaagaaaggacatcattttagtagatccactaattgttaactactccatagtttatttttgcaacttctggttggacaaattaataaggtaaaaccagcatagtttatttttgcaacttctggttggacaaattaataaggtaaaaccagcacgtaatttgcaatttgggacgcgagatgtaacatctcataattatcaggtggcatgtacaattctccgaaggaagcctcgcggcgtcttcaaaaatgttgagacaagatgagagggtaatgtgttatattgataaatgacatgaaacaattttggggccttttatgttctctgtagggtgttcaagttgaggcattgagagagtcaatggatgtgtcaagtttcttttctccaaaagggaatgaacctggaagtttgtggcaacacatagacaatctctcctttagtaatgtttttttttttgctccagggctgtattgtgctatcttccgtggtgtcttgcagataggatttgtgactcaagatgatgttctctttgcccatcttactgtgaaggagacattgacttacgcggcactactccgtctcccaagaacaatgacacagcaacaaaagaaagagcgagcgatggacatcatacatgagcttggccttgaaaggtgccaggacacaatgattggaggatcgtttgtacgtggggtttcagggggtgaaaggaaaagagtttgcattggaaatgagattttaatcaatccatctttactgtttctggatgagccaacatctgggctggattcaactacagctctaaggatcgttcagcttctccatgacatagctgaggatgggaagacggtaatcaccacaattcaccaaccatctagcaggctgtttcataagtttgacaagcttattctcctgggcaaaggaagtttgctatactttgggaaggcatctgaagccatgccatacttccagtccattggatgcgccccacttattgcaatgaaccctgcagagtttctactggatctcgccaatggcaacactaccgatgtctcagtcccttcagaattagatgacaaggtgcatatggaaaatcacaatttggagaacaataattccaagattgactacaggccatcagcacaagatgttcatgagtatttggtagatgcctatgagactcgagtggcttttaaggagaagaagaagcttctagcaccactgcctatcagtgatgatctgaaggcaactataacatcatcgaagcgagagtggggcacatcctggtggcagcaatattccatcctcttttgtagagggatcaaggaacgacgacatgattacctgagttggatgagaatcacccaggtcatagctacatcggttatcttaggtttactgtggtggcactctgatcccagcacactaaaaggtctagaggatcaggctggcctgctgtttttcatcgctgtgttttggggcttctttccagtgtttactgcaatctttacattccctcaagagagggcaatgctgaacaaagagcgcgcagtcgacatgtacaagctcagtgcatacttcttggccaggacgacgagtgatctaccacttgaccttttcctcccaatcatattcatggtgatcgtgtacttcatggcaggcctcaaagcaactgccacacatttctttctcagcatgttgaccgtctttctcagcataattgctgctcagggactcggattggcaattggagctactctgttggacatcaagaaggcgacaactctagcttcagttacagtcatgacattcatgctagcaggaggcttctttgtaaagagcgttccaccattcatctcctggctgcgctacctgtccttcaactaccacacgtacaggctcctgctgaaggtgcagtacgaccccgtgccggacatcctgaccaccacgaggcacatggacagcggtggcaccgaggtggcagctctcgtcgccatggtcatcgggtaccgggtgctggcctacctgtccctgagaagggcgaaggccctgggcagctagcgcatcccttcaccgcagtgactgaagcctgagctcgtggagcgggttgggtcattgggtgtgtagggaagtttgtgctatattgcgctgtgaaaagatggaagtctttttttttaacttttctgtctttttcaactaagttctgagcaagtaccaacactgaagaacaaggatctgtagcgagtgtaccagagacaagctgtgctgtaatttttccttcacaacgattgcgtggttaaagtgattgagtataagcgtgagtttagattgccggcatattcttaggatgggtagctctaggacaaattctgttcatactcccaagaacgcgtacatttcatcaatgacattatacgagttcttcgcgatggacagaagcacaggatgaaggcctgatgtcccataggtcagagggaaggtatgatcagtgtttgattcatctacatcacccttatacggtcccatttctgcaatgttcatatgttctaaaattctgggctccatcgatctttccaatctgtgactaaagctcttcttttttttaactgctattaaggtaaacacgcacacgcacaaagaacttttttgcca

SEQ ID NO: 31997 - DNA, 253 bp, Zea Mays
atctcgagaagcctgcaatacaagattacatgtccaccaatttgtttaagaaatagaattgataataatttaacttactatgcgtttagccttgccggcatgaccctcaaccccaaagcagtggagacgaggcgtacttaaacggttgccacaatttctatctcatctagctctaaactcatctgaagcctagtaatcacataaccagagccaagcatctgggtgctggctcaaccaatccaactcactttcc

SEQ ID NO: 31998 - DNA, 1817 bp, Zea Mays
agccggaaccaataaagtgaacgtaaaccaaaatcaatccatccccggtgcagaacgcccaacgggcaacggctgtgctgccaaaagtccggaccacagctcgcgctgcccgccgcgccttgcccagacgtgcgctcccttctcccgcgccgtcgcctctgccctggccgacccgctgggcccagtgtgcgcagccctcccgggttaaggcggaggtgcttggggacccgctcccatggcgagcgccggcatcagcggcagcggggacgacgatgcaggagggaagctcttggcggatcgctaccagaagggcgaggtcctcggcgagggcacgtacggagtcgtcttcaaggccatcgacaccaagggatatgaagccaaataatttactcattggtgccgatgggcagctcaagcttgctgactttggtctggcccggatgtttgggagtccaagaaggaacttcactcaccaggtctttgcacgttggtaccgggcaccagaattattatttggttcgaagcactatggatctggggtggatatttgggccgctgggtgtatttttgctgaactgcttactcgcagagcctttctccagggttctagtgacattgatcaacttgggaagattttcgcagcacttgggaccccaaaatcttctcaatggcctgacatggtgtatcttcctgattatgttgaataccaatatgttgctgcaccaccgctacgtacattgcttccgatggccagcgatgatgctttggatcttttgtcaagaatgcttacgtatgatccgaaagcaagaatcagtgctcagcaggctctagagcacaggtacttttcatcgttacctgctccaacaagaccatcacagcttctaaggtcacggtggaaaggagatcaagggaataacaagatgcccgatctgaacctgcagcatggccctctggtgctctctccgccaagaaagttacgtagggtgatagcgcatgaatggatggaaggtatgcacagagcagataaagtggacgagcatccttctgggatgaggcacaccgatgacatgcccagtcagaagagttctagaattccaatgtcagttgatgttggagctttgtttggcacacgacctgcacctaggccaacattgaacagtgcggacaagtctcgtttaaaacggaaacttgatatggatccagagtttggatttgcggagtaaaagaaactttgttaacgtgcaccattcttttcttactgagatgttggtttcgaaaatattctttgggagatatttccacagttcactcagagaagaggattgcattgaagccacaaaactgcaccgaaggattctgacacgatcaactgggctgttaccgtcatcggctcacgaagaggaaaactaaggagaggtcattctgatttatcctgagtcgcatggggtattatagctaaccgattccgtaaagaaggctcttagaaacagcatgctctatgccatgcgagtggagagtgttatgtggaattgggggcatagaaacgctcgctccagttagaaatgtgtgtttgtgctaaatgtgatctactagtcctccattctccgtggtttcaatttccttcaattcttgtacggacacttagctttgagcattcttcactcagccactctacgtatagtgatttttattgtaactaagagcagtgattttattgtaactaagggcagtgattttattgtaactaagagcaattgttgtgttctcgaaccaacattcaaaactgaataacacgatatcagcgcaatgtggacgat

SEQ ID NO: 31999 - DNA, 6168 bp, Zea Mays
gttgacgccacagggcttcgtgctgccgaattccccagatattctgggggttcaaccgaacccccatgcccgacaacactgggcttgaaattggccttaaaggctccaagggagccccaatgccaggaacggaaggaagagtggcaaaggatttgaagaaagctcctgcctccttggaggaaagcaatgcttctcgtgatgaggatcctggcggagggcctgccttgactgggaagaaaaggaaggaccggaggggttccgcggatgacaacaggaatgtgacaagaagggtgttgaggtccgacgccatgaagctgcgtgctgaggctgaggcaccatgtggagcgggtgtggaggttagcaaaactgatagtttggagaggaaacactgtgacactactgtggaggctgaggcttgcaaaagtagtgtgctgatggaagttgcctgcaatggtggggaagccaacggattagttaacttggatgcgagcgatgtttcggaagaatcaactaggtgttctgataataatatgggaatgcctggtgttcctgcaacagatttttctcaagatggtggcttagctcaaggtagcattgcagaatcagatgataagacagtcaagtcagatgaggtgtccgctgtaactcattcagagcagaatgactcccaagctggaataaacagttataatgctgatgaggcccaagataacaaagtgagacatgggccttgtcaggatgaggtcatagactcagcaattactaatggtgccaacacaagtacagatttaaccaaaaccagccctaccagtggatcagaatctgttaagcaggatgatagtaagcaggagaataatttggttcatactgaaggagtgatactccacagtggtgatccgaaagttgagaatcattctcaaattgaggacacttgtacagaaactgagatttctttgactgggaatggaagatgtgcagctgataaccacactgatcgaactgggtacactaagcaggaggagaggggcagccctgtgaacgaaaccaatgatatttcggcacatgacattgtttttacaaggagaggtagaaaatcatgtgaggcaaagcaggggacatgtgaagaggagtcacggtttgagaagcgagttacgagatcagctacagttagacagagagaagtttctggaagcttatgcaaaactaccacgaatgagactgcactaggaagcagagggaggaagggagatattattgctcactatacaaggaaagtgagcagtgcagtatctccaaaaggtcaccatgctgagctgggagaatgtaataccagtatggagaatcaaacagtgaaacaaaaggtggttgatcgaagagattcaggtgccactaagaatgataatgatgcgaatgacacaaagaataaggaatcagaaaagacagagatcaatctgaagacgcaaccacctgttggaagtgttagcattgtaaataaaacaactgtaggagctgtttctgtggtgggtcagagtatctctggttcagccatcactgagagaaatgatacagatcatactgattctgatggagttaaatatgaaaatatgactcttgtgcagaaactactactgtctgttggcgcgaagattgttgccagcaagaagagggtattggaagcaggtcctgataaaaccactggaaggtcaccaattgctttgccatccatgaaaaagacaagaaatacgtcttctgatcctgagatagatcaacctgataagtcttctggagagaagcttattggaaataactgtgatttgggcaataaacgtgttttgagggaacggcagcatcagaatcaaacatatttgtcaagcaggtcttctaaccagtctaatcaaaatgctatcaagcagacacaggatcaatctgacgatgatgacatcagcagcgatacttcctacaggagaactcgtagcggacgtcgtcgtggtgctgcccgtcttgccgtgccaaaacaagaggactccagtgattctgaagaagttgttgttgtgaaaaagaatcgacggaaacgtaagaaatctgtgcataaacacagggctggatctaagttgaagcatacttctggtagtcctcccaaaacaggtcgtttgggtagacctccacttgtcaaatctgaatgtggctgcttacctctgcagccaggaaaagggaaaatgaatgtgcctgaaggtacaggagctctacgcgaagaaaaacaaaaaataagtgatcagataaaggccatgcttctagatgctggttggacaattgatttaagacccaggaatggtagaaactacatggattccgtgtatatacatcctagtggcaaagggtcttactggtcagttacaaaagcatattacgtgttccgtgcagatatggaatctgagcagaaggaaagttctaaagaccatattctgtcaaaaaaatctgttggtagccccggcaaaaggcaggtctctagttcttcaggctgtactttaacagatgatatccttagcaaattaaaaagagttgttgtaaacaaacgaacaaccaaagtagagattcaaaggttgagacagaagaaggaaaagaagaatactacaaattcaacaagattgcatttaggcaatgaaagaaaaaagagaggtggctgtgctctactcgttcgtggatcgaacaaggagtctggcagcaccactgatggttttgttccatatgaatggaaacgtacgatcttctcctggctgattgatctgaatgttctatcagtcaatactaagctgaactgtttggatgaaagccactcaaaggttttactagagggttttgtcactagggatgggattaactgcagctgctgtagcgaggtcatttcagtgccagaatttgtgactcatgctggttctgaagtaaataagccatacagaaacatacttgtggatgggctagacattgaccttttgcactgtctcattaatgcatggaatatgcagtctgatgctgaaagacaagatttctttcccgttagcattgagggagatgaccccaatgatgacacctgtggtatttgtggagatggaggcaatttgatctgttgtgatggatgcccctcgacatttcacatgagttgtctaggactggaggcacttcccactgattattggtgttgttccaactgctcatgtaaattttgccatgaacattctagtgatgatgctgaagacactgctgatgttgattcttcattgcatacttgttcccagtgcgaagagcagtatcatggagcctgctctcctgatattgattccatagctactaatctttctagtcagacaggcaatttattctgccaacaaagctgcagactggtaacgcttgtcagattattgttcttttttccttgaccttgtttctggatatgctaccttgtggttttcatgatcataatttaaatggtgacacttgctattttactttcatgtttgaggcagatatcgttcccttttttaacggctcatgttgggtttgggactaaaaggcttttgctgttgttttatgtttaagaccttaatcactaatgagatgtttggtttgaggaataagctagtccatcatcttcgcactcctcacttttttgtttggtttgcgaaatggaatgagttgatccattatcacctcatttgtcatagttagttagttagtactaacacgaggaatggggccatctcaccaaatttgaggaatagattcatgatgcaccaccgcatcttggatgaagtgattcctcaaaccaaacacctcctaaatatctgcaccatcccgctctgttagcttcctttcttgatcatatgcatatatgtttttccttctaatagcaatatcatagcaatgtacatatattcaggttgctggtttttatttacatggatttcattactacaagtgattacatatagtaaggtactatatgagtgtggtattttgtcatggggcggcaacccagggcatggaggcttagattggataagattgagttagttacttgggattagattagataatattgagttagttacttgggatccaagtcttcctatctatataaggatgaactgtacctccttaagaagaaaaaggaatgaagaagaattagtcctagatctctccaatagtctagtccctcccatgctgactctgcccggctaccttcccggcgctgactaggattcataacatatggtatcatgagtcaggtatcctttccatgacttctgctgcggacgatgtacgcacatggcgtgaggagctcgctcgtgccagggcagatctggagcaggcccgatctgctatcctccagctagtgatctactcacggcaaaggtggagtctgactgccgatcagcggcgacaacgcgactgcaggaggctgtgcatgggttcctggcgtgacgtccagtgtggcagcggcttgccgtcttcaggctacgacacgtggcttcctggcgcggcgtcaagcacagcaagcagcggcttgccctcttcaggttgcggcacttggcttcctgacgtggcgtcaagcacgacaagcggcaacacggttgcaggctacggccttcagcagggttggccgatccttagccatgtggacagcaagaacaagtctggttgggtggtgctgtctccactggaactcgcggtagctcaggccctgtttgaggaattgcagaatcttctcgcagtcaagaaggatcttgaaccagaatactcatgcagagttgttcaacgcatccatgaagaggtaccagaagaagtccttgctttggacaaaagagttgagtgtaactccaagattgctgttgcactctcattaatggacgagtgcttccttccgattgttgaccagagaactggcatcaacttgatacgcaatgttgtgtataactgtggatcaaattttgcccgattggatttccgtggattctatataattattttagaacgtggagatgaaataatagctgcagcatctgtccgaatacatggaaccaagttagctgagatgccgttcattggtacccggaatatgtataggcgacaagggatgtgccgccgacttgttgatggaattgaaatgatcctcagctctctcaatattgagaagctgatcattcctgctatcacagaacttgtggacacctggacatctaaatttggatttagtccactggacgattctgagaagcaggaagtgaaatccgttagcatgttagtttttcctggtacaggtcttctccaaaagccattgctgaagacctcaccatcggaagatcaatgctcccaaggagacaaaactgaaaaatcatctgatgtagtcaatgaagattcgctttgctctggtgcaagtgccgaccccctaggttcggtggtcaaagagcatggggacaccagcaaagatgccgatggtacttgcaacggtgatgtttcacagcgatctcctctttcctgatggtaagatttggttgcagctttctgggcccccccaagctttatatggacgaaacctccgtttgtttttgtacctctcgagttttgactcagcagccagcatgacaaccatccgtttggcagaaagaggcttccggttttttgcagattagttgccggggcacccctgtagttgtactcagaatttgaccattgactcgtcggcctgggaaaagaatcagcccgtgcagtactgaaaagcgtttactccaaccaggaaccagctaacttactgtgcagctgaaaagtcagtatgcagaatgtggaggataatatcacttcttttgtttttttttggtcgttaacttagaactccgagggcgagtcgtcgtaaatgttacaccagttgttattttgttaatagctttttttttaaaaatgttttcgctagcgcattcctagaaccttctcatttctgtaagatagttctcgcctctgtaagataaactaatgtatgcgcaagctagaaatagtccgcctgatccgtcacgcggaattggttacctaaaccctgttaatgtttcgttttgcatcgtgttggaatgtgtgtgttcttcctgtgaaggaaagcttttgcgggtcattatactagag

SEQ ID NO: 32000 - DNA, 2664 bp, Zea Mays
gccggagttgtctgctgtttgaaaaggaggagaagcggggaggacggaagggggtgccgtggcggatgacgctgagcctggcttaccagagtctcggcgtggtgtacggcgacctcagcacatcgccgctgtacgtctacaaggcggcgttcgcggaggacatccagcacacggagagcaacgaggagatcctcggcgtgctctccttcgtcttctggacgctcacgctcgtcccgctcctcaagtacgtctgtgtcgtcctccgcgccgacgaccacggcgagggcggcaccttcgcgctctactccctcctctgccgccacgcgcgcgccgcgctcctcccgccaggacgaaccgccgcctgggacgaggaccagttctcggacggagccggcggtggcaccaacaaggctacggcgcagaatggcaatgctgtgacgctgggagggggcgccgccgccagcgtcaggaggctgctggagcggcacaaagtgctgcagcgggttctgctcgtgctggcgctggtgggcacctgcatggtgatcggcgacggcgtgctcacgccggccatctccgtgttctctgcggtctccgggctggagctgtccatggcgaaagaacatcataaatatgtggaacttcctattgcctgtatcatactggtttgcctgtttgcactgcaacactacggtacacaccgggttggcttcatttttgctccagtggtgatcacatggctcctatgtataaccctgatcggtgtttacaatattattcactgggaacccactgtatatcgagcattatctccgtattacatgtacaagttcttgaggaagacacagagaggaggttggatgtccctgggaggaatactgttatgtgtaaccggttctgaagcaatgtttgctgatctggggcatttcaaccagttgtcaatacagattgcttttacatgcatggtgtatccagcattgatccttgcatacatgggacaagctgcttatctgtgtaagcatcatatcatggaaagtgactacaggatcggattctatgtgtctgtgccagagaaaattaggtggcccattatggcaattggtattcttgcagcagttgtgggaagccaagccgtcatcactggtacattctcaatgatcaagcagtgcgcttctctgggctgctttcctcgggtgaagataatccatacatctgccaaagtacacgggcaaatatacatccctgagatcaattggattatgatgatactgtgcttagctgtaaccattggttttaggaacacaaaacacttgggaaatgcatcaggattggctattataaccgtcatgctggtcacaacgtgcctgatgtccctggtgatagtcctgtgctggcataagagcatattccttgcgattggcttcatcctgttctttgggaccattgaggcactgtacttctcagccgcactcatcaagttcagggagggagcctgggtcccaatcgttcttgctctcatcttcatcctgataatgtgcgtctggcactatggcaccatcaagaagtacgagttcgacgtccagagcaaggtctccatcaactggctccttggtctcagcccgaaccttggcattgtccgcgtccgtggcattggcctcatccacaccgagctcgaaaccggcatcccagctatcttctcgcatttcgtcaccaacttgcctgcctttcaccaggtactcatatttatgtgcatcaagaacgtgccgataccacatgtccggcctgaagagcggttcctcgtcggaaggatcggccccaagcagtacagaatctaccggtgcatcgtcaggtacggctaccaagacttccacaaggacgacgtggagttcgagaaggagctggtgtgcagcgtggccgagttcatccggtcagggtcgtccaagctgaacggcacggctgaggaggtcgacgaggaggaggagcagcgcatggcggtcgtccgctccaacagcgtccgcatgctggaggaagaggccacggtgcagaacaccgtcggggtcggcccgtcgtcgcgggccagcagggagatacagtcgccgtcgccggccccggcgactggggttgggcccaagaacaagaagcgggtgcggttcgtgctgccggcagcgagcccgaagccggacgccggcgcgcaggaggagctgcaggagctgtcggacgcgcgggaggccggcatggcgttcatcctgggccgctcgcacgtgaaggcgaagagcgggtccggcttcctccgccggctcgtgatcaacttctgctacgacttcctgcggaggaacagccggggaccccgctacgccgtcaccgtcccgcacgcctccacgctggaggtcggtatggtgtactttatctgactggactgaactgaacagccccctgaaactaactctgggagtgagaaactcagaaacataggaacatgaaaagataagatgaggtgaaacaaaaaaaaaggttttcagctgtatatgctaggttttgtaactgctggtgagtttcgttgtaaaatgcagccctgttttcttgttaggcgttcagcttctctcgtaatccactagaaaatttattattatgggctagtttggtaatatattttttcgaggtatttct

SEQ ID NO: 32001 - DNA, 3631 bp, Zea Mays
cggcacgccccccataaatatcgacatcgtcttccacctctcggcttctttactctctaaattttcttttttttaaaaaaaaatattgttctttggcgtacgctggtgcgcctctcctccccgcctcggcatcgacgcgatttgcgtgcccgacatgtcggactcgccggtggagctgccgagccggctcgccgtactgcccttccgcaacaaggtgctgctccccggtgccatcgtgcggattcgctgcaccaaccccagtagtgtgaagctggtggagcaagaactctggcagaaggaagagaaaggcctgatcggggtacttcctgtgcgggactcggaggcaacagctgttggctctttgctgtctcctggtgtgggcagtgattcaggtgaaggaggcagtaaggttggcggttctgcagtagagtcatcaaagcaggacacaaaaaatgggaaggagcccattcactggcacagcaagggagttgctgccagagctttacacctttccagaggggtggagaagccaagtggaagggttacatacattgttgttcttgaaggtctttgtaggttcagcgttcaggaactaagtgcaagaggaccataccatgtcgcccgtgtttcacgccttgacatgacaaagactgaattggagcaggcagagcaagacccagatcttatcgctctttctaggcagtttaaagctactgccatggaactaatttctgttctagaacagaagcagaagacggttggtagaacaaaggtgcttcttgatacagttcctgtttacaggctagctgatatttttgttgctagctttgagataagttttgaggagcagctttcgatgctggattcagttcacttgaaagttagactctcaaaggcaactgaacttgtagacagacacctgcagtccattcttgtagctgagaaaataacacaaaaggttgaggggcagctatcaaagtcgcaaaaagaatttctactgcgccagcagatgagggccataaaagaagaacttggtgataacgatgatgacgaagatgatgttgctgctctggaaagaaagatgcagaatgcaggaatgcctgctaatatttggaagcatgctcaaagggaaatgaggcgcctacgaaagatgcaacctcagcaacctggttatagtagctctcgagcctacttggaacttcttgctgaccttccttggcaaaaggtcagtgaagaaagggagcttgaccttagagttgcgaaagagagccttgaccaggatcattatggactaacaaaagttaagcaaaggattattgagtatttggctgttcgtaagcttaaacctgatgccaggggtccagtgctgtgttttgttggaccacctggtgttgggaagacatctttggcctcctccatagcaaaggccctgaacagaaaattcataagaatctctcttggtggtgtaaaggatgaagctgatattaggggccaccgaaggacatacattggaagcatgccagggagacttattgatggactaaagagggtatctgtgagcaatccagtgatgcttctagatgaaattgacaagactggttctgatgtacgtggtgatcctgcatcagcactactagaagttcttgaccctgagcagaacaaagcattcaacgatcagtatcctttcatttatcattaaagggagctatgatttatttgttgttttttaaatgaacaagggacagttttacctcattggcaatgcttcttacaattaggcatgtgtgagttgtatgaggtcatcattactttgtcacgtagtgtgtgggttgctgatttagttgaataattgcagttggcagagactaaaaggctaagctcttagtttgtttatgaatttgatactcaccatcaaattccttggtcttttactgcttgatctgtgggttatatatgtatatatattaagaattccttaatatgatcaccagctatttgaatgtgccgttcgacctgtcaaaagtcatatttgttgcaactgccaataggatgcaacctataccccctcctctgttagacaggatggaaatcattgagctgccaggctacacacccgaagagaagttaaaaatagccatgaaacatctcataccaagggtattggagcagcatggcttgagtacgacaaatcttcagattcctgaggctatggtcaaactggtcatcgagaggtacacgagagaagctggtgtgcgcaatcttgagcggaacctagctgcattggctcgtgcagctgctgttaaggtcgcagagcaagttaaaactcttagacttggcaaggaaatacaaccaattactacaacccttcttgattcaaggcttgctgatggcggtgaagttgaaatggaagttattcctatggagcatgatatatcaaacacttatgaaaatccatctcctatgattgttgatgaggctatgctagaaaaagtacttgggcctcctagatttgatgacagagaagctgcagatcgtgtagcaagcccaggagtctcagttggccttgtctggacttcggttggtggggaagttcagtttgtggaggctacagccatggtgggtaagggtgacttgcatttgactgggcagcttggtgatgttattaaggagtcagcgcagctagctttgacatgggtgagagcaagagctgctgacctcaatttgtcacctacttctgatatcaacttattggagagccgtgatatccacatacattttcctgctggtgctgtgccaaaggatggcccttctgcaggtgtgacattggtaacggcactggtgtcgctttttagtaacagaaaagtcagagcagatactgctatgactggcgagatgactctaaggggccttgtattgccagttggtggtgttaaggacaaggtacttgcggcacatcgttatggaatcaagagagtaattttacctgaaaggaacttgaaggacttatcagaggttccattaccaattctctccgacatggagattctgcttgtgaagcgcatcgaggaagtactcgaccatgctttcgaaggccgatgcccacttagatcacgctccaagttgtagcacccaagtcgcgtttggtatggatgtttgcttgagaggatcatcgtcacagtaccacgaatggtcaacagtgtgagagtaagagcctagctctcttgccagcacaggtcttggcacgcccttttcggtttggcttcgcgtctggaatgtgtatacaggattactggtcagaattctgagaataacgagaagattctctgctgggatagtgggattccctgcatatttatgtgaaaccagctgtcggtatttatgcacagatgcaacagcaacacaaatctggtaggaacactggtgggtttctgtcgataatttgagtgtatatgtaatattatgtaatctattccagggaaacatagttaaaccgaggttgtgaaagccaaagagattgagaaatatcatacgtactttagggttgggtgacttgttacaaaatgtgcatattcacatttcttcaataaacaaccgaaaatgcaaacatttgctcgttaattatatccgcaaa

SEQ ID NO: 32002 - DNA, 1632 bp, Zea Mays
cgacgggcttcaatgcttgataaatgataaagcgtagcttcacggccgccgctttttttttttaagagctgccagtcttccacggcccgtgctcccaacgccagggccagccgtcacgtcacgtctcgctcccactgtactatcccgcacctccctccgactccgagcgtggggcttcaccagaccaagaacacgccaagcccgacgctcccaggaccacgccgcccaagccgtcgagcaaatccgcgatgcacaagtggtggcgcagccccgggcccgccctgctcgccgccgcactggcgatcgtggtggccgcgctgcggccggcgacggagcacgcggccgccaaggggcgaccgccgctgcggttcgggccaggaggagcgttcaaggtggccctgttcgcggacctgcattacggcgaggacgcgtggacggactgggggcccgcgcaggacgccgcgtccgaccgcgtcatggccgccgtcctcgacgccgagaacccagacttggtggtgtacctcggcgacctggtgacggccaacaacctcccggtcccgaacgcgagcctgtactgggaccgcgccgtctccgccgcccgaggccggggcgtgccgtgggcgacggtgttcggcaaccacgacgacatggccttcgagtggccgcccgagtggttctcccccgacggcgtcccgccgctgcgctggccgccgggtccaggatcagggtgcggcttccgtgggactccccggacggacctcatggcggcggagaccggcgcgaaccggctgctgtcctactcgtccagcgggcccagggagctgtggcccggcgtctccaactacgtcctgcaggtgctctcgcggggacggcgggcccgcggcgacggtcacgaccacgacccggctctgctcatgtacttcctcgactcgggcggcgggtcgtacaccgaggtggtgtccagcgcgcagctccgaaggccaagtctgagataaggaagccctgcgtcggctccatcaacgaggaggaagtggcgccgcaggcagctgaatggggcatgatggatgcgctcgccaagaggtcgtcggtgaaggcggtgtttgttgggcacaaccacgggctggactggtgctgcccctacgacggcgaggagcgggagcaggagctgtggctgtgcttcgcacggcacacggggtacgggggatacggtgactggcccagaggagcgaggatccttgaggtcacggaggagccattctcggccgtgtcatggatacggatggagaacgggaccaggcacagcgacgttacactaacctcctgaatccatctgcctgcttgattctcttgtacaatgtacagtatagaggatatttctttatatatataaacaacgtatataaatataacaacaccaaaaataagagcaccggaggacatagtatatggcccccggtagtttcttaaagggctagtttgaaagccacgaaatcgaagaaaatttggagcggctaaaattctctctttattcaaaattaaaattaaataaagaaagaattttagccccttcaattctctatggattttagactctcaaactagacctaaaatatttacttgtttttgtagaaa

SEQ ID NO: 32003 - DNA, 2980 bp, Zea Mays
gcttcctccgccgcggacgacggcgggcccagcacgagcggtagcgcggacgcgcacgcccgctacgccgacgccgacgacaatgcggcgggcgccgggggcccaaaggtctgggtcctcgtgctcctgttcgcgctgctcctgctgcccttcctgccctctgcgatgcgccgcggcggcggcggcggcgggacggtttgggcgggaggcggaagaggcactgagggagggtaccggtaccgccgcggcgggatcagcttcaagagcggctgggacgtcgtcaacctctgcctcgtgctcttcgccatcctctgtggtctcctcggccgcggcggcgacggggactcctcttcctccgcgacttcagcttacgcgtctgccaaggacgaccgtcatcgcctggcgtcctcggcggcgcccgccgcggagcccgtcacggtggcggcgactactacgagctcgggggactgggagcaggagggctacgactccatgtccgccatctacgccagcctgtcccgcaccaccaaccacgcccatgcctcggggatccgccggatgaagagcagcagctcctacccggagctgcgcctcggcagcgacggcgtctgggccctcgcgtccccggactccgcctggcgcttctacgacgacgccgagctgtaccgcgcccgccgcccggagcggcaggagcggacctgggacgtcgacccgcacgggagggcagcggcggcggaggtcaagaccatccccgtcgacaccttcgtcgagcgcggccgggcctcgcagtcgcagtcgcagtcgcagccgcggaggacgaggaggaggagcgtcgagaggctccccgagatggccgaggagaggccgctgcagcaacagagcgggggcgcgcgggcgccgccgaggctcaggaggtggaactccgaggttgttgatgtcatgttggaacaggaggcggcaccggcgcggagtagaaggtgggactcggaggtggtgggcgccatgccggaacaggacgcggctgtagcgccggcgaggctcaggaggtggaactcagagtcgctggatagcatactggagcaggaggcgagagtggcggcggcgaggagcacgaggtggggctcggaggtgatggacgccatgccggaacaggaggcagcggtagcgccggcgaggctcaggaggtggaactcggagtcgttggatagcatactggagcaggaggcgagagtggcgccggcgaggagcacgaggtggggttcggaggtgatggacgccatgccggaacaggaggcagcggtagcgccagcgaggagcaggaggtgggactcggagtcgttggatagcatactggagcaggaggcgagagtggcggcggcgaggagcaggaggtgggactcggaggtggtggacgtcatgccggaacaggaggcggcgtggatgtaataccggagcaggaagcgccggtggctctggcgaggagcgggagatggagctcgggggcggtggacgtggtcccggagcaggaaaagccggtgatgatggcgcctgctgctccaccacctcctcctccgcctcctcgacggcgacggcgcagcgtcgagaaactgccgacatcagaggaactggagcaagagatagtagtggaagaggtgagaaaccccccgatgccgccgccatcgctggccatgttcccgcctggaacgccaccaccccctccgcctccgcttccgcctccctcgacggtgtcgcgcagcaagaagaagcgcagcggcagcgtgggcggcgccaaggagctagcgtccgccattgctacgttctaccagaagaagcgcaagagcattaccatgaaggccaagaggaggccccatgcccatcaccaccaccactccgatggccaatactactcgtcgccgtcgtcagatgcgtcagcgagcccggactccactgctcgcaccaccaccgccccgccgcggcctccgcctccgccccctccaccgccaccgccgtcctccatcttctccaatctcttcaggaacaagaagggcggcagtaagaaccgccgcatccactccgtcgcgccaccgcagccgccacccccgcctccaccggctcgacgatctaagaaaccgccaccgcctccgtctcggcccgcgcctccagcaccaccgccgccgccacaaccagtcaggacacggccgcagcgcgcccacgtgcacgcgtccacacagcagccgccattgtacccgaggcgcgtctactacacctactacccgctcccgccgccgtctccaccgctacctccacctcctcctccgccgccaccgctggtgccagagggcgaggatgactccccttcggtcacggcgtcgccggcgccggcgtactgcgcgagccccgacgtgaacacgaaggcggaccggttcatcgagagcttccgcgaggggctgaagctggagaagctcaactcgtaccgggagaagtggcagaggcagatccaagagaacgccgccgtcgagatcggggaggaggaggagggggagttcatggtgatcgggtccctcttcggcgacgacgacgaagaggacgaagacggcatctccttgccgcagacgccggcgaccgctgtcgccgtcggcttctaacgacactgacgttgaaggaaaaaaaaaaatccccgagaaaatggagagaacaaagatagcacaaaagagtgtttcttctggctgctaatcctggtttgtctacagtaaaagtactgtttttgagtgattttctttttcactagtttcgggtttgggtaaggaggaattgatttcgtgtgtgtgagagctgcggaggccttttgtgcttattttaaaatggcaaaaaaggcgctgtttgggtgttgcattagttgagctgctgtgagtttcatgtctatgcacgagcttttggagttgtaaaaaatatacaatgagtccatgatgaacaaagtaac

SEQ ID NO: 32004 - DNA, 2602 bp, Zea Mays
taactgctgcattctcgggtataagcataagaattatatccaaccaaatgcccaggcatattaatgtcttttgagatttaaaattgcaaacttgatatgctcattacaacaagaataactactccactgaccactgtaacaacccactcctgaaatatacacaaagaaagttacgctagatcactatttgcgagaatgatcatataactccaaaactgatgaatgcaggtgtcagggcccaagagggtccaccacagtgacgccggtactgtagcagcatgcccctcagtaggttagataaagataaggctagtttgtgataagattagaattagagataagattagatctagtgcttaaaggtcaagtaaccctctctatataaggagaaggactgtatcaattgaaggtaagcaagaattagaaggaaatccctcctctcttgccggccgtgggcagaggcccccggccggcctccccagcaccccatccttactcgctgcgccacgtccccggtaggatccgcaatcctatcaacccaccagatcctgatccccaacaacagctttctgaagttatggcgagaagaggcatgaatcctactgttagtgatcaagcaatccgcctggatctcattgccaaatcgagaggcatcgctgctgccgagaagtactttttggacctcccagaaacatccaagactcatcttacatatggcgctcttctcaattcttactgcaaagagttgatgactgagaaggccgagtcccttatggagaaaatgaaggagctcaactttgctttcactgccatgtccttcaacagcttaatgacgatgtacaccaaagtcaaccaagctgagaaggtccccagtatcattcaggacatgaaggcagatgacgtattgccagatgtctttacttataatgtttggatgagggcgcttgcagctctcaaggacataccaggggttgagagggtgattgaagagatgaaacgggatggccgtgttgctcctgattggacaacatacagcaacctggcttccatatatgttgaggctggaatgtttgagaaggcagaggctgctcttaaggagcttgagaagcggaacaccagcaatgacatcgaagcctaccagttccttattacattgtatgggcgtacacagaacttagtggaagttcaccgtgtctggcgatcgctgaagcgggataaccctagaatggcaaacatgagctaccttaacatgattcaggttttggccaacttgaaggacctgtctgctgccgaagcctgttttaaggagtgggaagcccgacacatccatccacccaagaccaacacaaagggctcgggggcagataatacacctggtgcagatccaaaatctccaagtaacccgcctaataatcagtctggcaccaaggaaaccggggacgagacagcagaggacctccagccgaagcatccaaaatatgacatccgggtagcaaacgctatgatcaaggcgtacattaccgagggcatgcttgacaaagctgtcgccatgaagaagcgtgccaagatgcgcggcggaaggctgaacgccaagacatgggagatcttcatggagcattacctcaagacgggggatctcaagatggcccattggtgcgcggaccgcgcgatgaagaaggggcacagcagcggcaggatttgggtgccgccgcccgccgtgacggagaccctgatgagctacttcgaggagaacaaggacgtcgatggggccgagcggtacgtgggggctctgaagaaggtgcagaaggatctgggcgcaccggtgttcgagccgctggtgcggacgtacgctgccgccgggaagaagttccccgggatgcggcagcggctgaagatcgagaacgtggaggtcggggaggggacggcccagctgcttgactctatctgcgccgatcaataggtggttttcttttgtcctcgccgtttgtgtttgtctcaataacagcaggaccgtttcgagcgctcggctatttgctctgcaagcgctgtgatgcctgtatgtactctgaaatccggccaacgtttctgttcttttcgacatcatcagcccaagcacgtcctagaggcggtggcagcgttggtggcggctgctatgcgatgggggcaccacctccgttgatgtattgtctggtgcgggactgcgagtgacctctgaggcgggggcggagaataactggatctacctaacgtcggaatggagacctgcaggtccatttgaaattaaacagaaggttggtaagagtgtgatggtgctcattttgcgttttagaggatccatacttgcatgtagccaaagaaactattttagtaccttttttccttgtactttttttttgtcttattgctttgcctggagctacttgaaatgctccacagttatgtcctctttttaactgagatgtcgttggcctgaacaaaggatgcttgacgcttcgaagtcacacgcaatgataaattcagtttgcagcatcgcgatgcatttggacgctcattttactccttgaaagctgatactaagtgtcacgcgatacctattacgata

SEQ ID NO: 32005 - DNA, 2563 bp, Zea Mays
gtgaccagtcacgcacgcgcgcgcgatccctcgcctacctccggtccctgcccgcctgttgctgtatttatttccgcctcgtctcttccccatctcgacagcatcactgccgtgtagtgtagctagagcccgtgcactggtccggattcgcagagcaaaacggaaatgatcacggtggcagcaccggaggcgcagccgcaggtggcggcggcggcggcggttgcggcgccggaggagaccgtgttccggtcgaagctgccggacatcgacatccccacccacctgccgctccacgactactgcttctcgagggcggcggaggcggcgggcgcgccgtgcctcatcgcggcggccacggggaggacctacacgtacgccgagacgcgcctcctgtgccgcaaggccgcggcgtgcctccacgggctcggcgtcgcccagggcgaccgcgtcatgctcctgctccagaactccgtcgagttcgtgctcgccttcttcggcgcgtccttcctcggcgccgtcaccacggccgccaacccattctgcacgccgcaggagatccacaagcagttcagcgcctccggcgcgaaggtcgtcgtcacccactccgcctacgtcgccaagctccggcacggcgccttcccgaggatcggcacggtgagcggcggcggcgtggacggcaatgccctcctcaccgtcctcaccatcgacggcgacgcggccgacaccccggaaggctgcctggcgttctgggagctgctcacgtccggcgacgtcgcgctctgcgtgctgcctctgttccacatcttctccctcaactccgtgctgctctgcgccatgcgggccggcgcggcggtcatgctcatgcccaagttcgagatgggcgccatgctggagggcatccagcggtggcgcgtcacagtggcagccgtcgtgccgccgctggtgctcgccctggccaagaaccccgcgctcgagaagtacgacctcagctccatccggatcgtgctctccggcgccgcgccgcttggcaaggacctcgtcgacgcactccgcgcccgcgtgccacaggccgtcttcggacagggatacgggatgacggaggccgggcccgtgctgtccatgtgcccggcgttcgccaaggagccggcgcccgccaagccggggtcgtgcggcacagtggtgcgcaacgcggagctcaaggtggtggacccggacacgggcctctccctcggccgcaacctccccggcgagatctgcatccggggcccgcagatcatgaaagggtacctgaacgacccggaggccaccgcgaggacgatcgacgtccacggctggctccacaccggcgacatcggctacgtcgacgacgacgacgaggtcttcatcgtcgaccgcgtcaaggagctcatcaagttcaagggcttccaggtgccgccggccgagctcgaggctctgctcgtcgcccacccgtccatcgccgacgcggccgtcgtcccgcaaaaggacgaagccgccggcgaggtccccgtcgccttcgtggtccgcgccgccgacgccgacatcgcggaggacgccatcaaggagttcatctccaagcaggtggtattctacaagaggctacacaaggtgtacttcaccccctccatccccaagtcggcgtccgggaagatcctgaggagggagctgcgcgccaagctcgcggcagccgcgaccgcctgaggagcttgacgctcaggttccatgccttgctacgtgcaactcgtttggtagtggcgtttactgccaatccagtgtatgggtacaggcgtgaaacatgaggtaccgagaatgtactatcaatatatgctttgtatgcgagtgcttcgtcaattaaggaccaccatttattcccgtcatgattttatttccccccgttggtgcataatccaccatccaacacattcatggtcactgggactgggactgggactcatccatgaaacaagactgagaaagtgcagcgactttactgaacaaaccgaaagggggcagatacgaatcgtatgcgaatagacaatcgatccaaatcctaaggaatcttcaatctaccgagtgggtacatcaccagaaaatagcaagcaaaggctgcaattatagaagggtacgcttaaaaagttatcaggtcatccttctttggatctggcttcttcggcccttcctgggagctgctacctcccttcttgccgaatatcatctcgtccagatcatcaaggatatcatcatccccacctgaccttgttctcgcggcagctggttttctgacaagggcgtcttcattgacggcagcagtcagatcttcatgttctgtggcaaccggtatgacaactgctctctgttctgcatgctccgaggccctgggctgcttcatctcctcgtactttgacaacactttctggatctcgtcgttcacgctcaaggcctcgaagagcacagcttcgttgtctccgacggtctcaataatcctctggatagtgtgctgagattggtagcattgttgcacgagtgtggccgtcaagtcatcctg

SEQ ID NO: 32006 - DNA, 8529 bp, Zea Mays
gttgtcttgaacgatccctccccctataaattaaagcttcgaagacagaggataatagaagtgagatcgtaagcacaagcaacagcttgaaaacgggcagaaaatagaacattctttgaaaaggagccaacgaaccgatcgatcgatcaagcaccaagagaactcgcgcaacacaaaatctctgcaaggattttccggccgctgcgccggcgagcaccatcctctggcaaccggcggggcagcagcagcatcaataaggggatccttgtctcgcttcgtgatcgtccgccgcgctggggtcgactcactcgcgccactcttcccgttccctaccgtggtggcggaaccctaatgcgggcccgagtctagcctccatggactttgccagccgccacgccgcagcggaggctgccacatcgtctgctgcatccgcctccgcccccgcggcggtcgctgaggagcctgagtacctcgcccggtacatcgtcgtcaagcactcgtggaggggaaggtatcgccgggtcctttgcatcgcctcttcctgcgtcgtcacgctcgaccccaccactctcaacctcaccaactcctacgatgtcggctccaagttcgaccatgctgaggctctcactgccaccgacgagttcacgctcgcagtccgcaccgatgcccgcggcaagttcaagcctatgcgcttctcatccccgctccgcccggggatcctcaccgaactccaccgcctccgcccggtccaggactccttcgacttccccgtcctccatctccgccgacgcacccacgagtgggcccccttcaaacttaaggttactcctgtgggtgttgagctccttgaggcttctggttatatgcgctggtgcttggaattcagagatatgaattctccagcaattattctcttggggaatagctatgggagcaagactactgaaggtggagggtttgtgctatgcccgctttatggtcggaagtcaaaagcttttatggctgcttcaggaactacaaacactgcaattatatcgcatctgacgaaaactgccaaattaaagattggattatcactatctgtggataattcacaatcaatgaaagcggacgagttcatagcaaaaagagctatggaggcagttggagctgctgaaacacgacatggagagtggtcagtaacaagattacgttctgctgcacatggcactgcttatattgagagcttaagtttgggtgttggaccaaggggtgggcttggagaacagggcgattctgtctcttgtctgcttgttcttacaagcacttcacttgttgaaagacgtccagagaactatgaggctgtcatagtacgaccactctcagcagtaagtgctcttgttcgatttgtagaagaaccacagatatttgcatttgaattcaatgatggctgcccaattcatgtatatgcaagcacttcccgtgataatctacttgcaacagttcttgatgttttagaaacccagagacagtgtgcaattccagtgctaccaaggttaacaatgtctggtcatcgcatagatccgccttgtggggtagcacatcttgagatgccctatcatggttctgttgacatggagtcagcttccatgcacacaaaacatttggccgcaattgctaaagaggctgtagtgtcatctgacactgttcctggagcaaaaatcagattgtggcgtagaataagggagtttaatgcatgtgtaccatacactggagtgcccgtcaatattgaagtacctgaagtggtcgtactggccttgatcagtcttcttccaaccataccacatagccttcctgctgatgctcctcctcttctgcctccatctccaaaagcagcagcaacaataatgggttttgttgcatgcttacgcaggctacttacatcaagaagtgtggcatcacatgtgatgtcgtttcctgtcgctgttgggagaataatgggtttgcttaggaatggttcggaaggagtagcagctgaagctgctggacttgtggctatgctaattggtggtggtcccggtgattcatccatcttaatggatgcaaggggagaatcccatgccacctacatgcatgcaaagtctgtactgttctcgcaaccaatgtatgttccgatccttgttaacaggttgaggccaatatcggtgtcaccgttgttatctttgtctgttgtggaagtccttgaagctatgctttgtgaaccccatggtgaaacaacccaacatgctacatttgttgagctactgcgtcaagttgctggtttgcgccgtcgtttgtttgcattatttgcacatccagctgaaagtgtgcgagagactatttctgttataatgcggacaattgctgaggaagatgcaatagcagcagagttcatgcgtgatgctgccttgaaggatggtgctcttctgaggcatttactaaatgctttcttcttgcctgctggagaacagcgtgatgttagtcggcaacttgttgctctttgggctgattcctatcaacctgcacttgatttgctatcaagaatacttcctcctggacttgttgcttacctccatacacgttcagatgaagaatcacagagccagtatgatgaagcaccgttgagcagaaggcagagacgaatacttcagcagaggagggtccgtggtagtaaaagtatgtcagtacaagaacaaggggtaccccccaatggtgttgaggatggggaacccttcaggcacaccagtgcgggcacttatggagtagcagatgttcatcagaggcatgttggcccatactcttccacccactctcctttgccaggtataagcattgatccttcttgtgcagttacagtgccacatggttttgtacctgaggccctttctgaaaataatcatcaaattggggaaccacagctggattcacatgtttattcagtggactccaatgccaatggtgatcttgtgagctcatcgcattcagatttttcagtccctgcacaggttgtggtggaaaacactcctgtgggatctggcaggctcctgtgcaattggtatggattttggagggcattcagtctagatcacaacagagcagatttgatatggaatgaacgcaccagacaggaactgagggaagcattgcaagctgaagttcataacctggatgtcgagaaagcaagaacaaatgatattgtccctggaagttcagtcactgaggacgctggtggtagtgacaacttacctcgaatgtcatggaattatgctgaatttttagtgagctacccaagcttgtccaaagaagtctgtgtggggcaatactatttgcgactgctgcttgaaattggaagcaactatcgagcacacaattttccactacgagatccggttgccttttttagggctctgtaccatcaatttttgtgtgatgcagatattggtcttactgtggatggtgcagtacctgacgagttgggatcatctgatgattggtgtgacattgggagattagatggctttggtggtggtggagggtcttctgtaagagaactctgttcaagggcaatgactatagtttatgagcaacattataaagttattggggcttttgatggcactccacatattactgtcctcttagaccgaaccgatgatagggttttgaggcatcgtttgttactacttttaaaggtcttgatgaatgacctttcaaatgttgaagcatgtgttttggttggaggctgtgttttggctgttgatttgcttactgttgcacatgaaacatctgagcggactgctattcctttgcaatctaacctcatcgcggcaactgcatttatggaaccttcaaaagaatggatgtacattgataaagatggcacacaagttgggccacttgaaaaagatgcaataagaaggctgtggtcaaagaagtcaattgattggacaacaaaatgttgggcttctggcatgtcagactggaaagggctacgggatatacgggaactgcgatgggcactttctgtaagagtgcctgttttgactcccactcagattggggatgctgcattatctatattacacagtatgacatctgcacggtccgatcttgatgatgcaggtgaaatagtaactccaactcctagggtgaaacgtatattgtcaagtccaagatgccttcctcatgtggcccaggttatgcttactggggaaccaagcattgttgaagcagctgcctcattgcttatggctattgttacaagaaaccctaaagctatgattcgattatacattactggtgccttttactttgcattggcatatcctggttcaaatctcctatcaattgcacatttgttttcggccacacatactcatcaagcttttcatggtggtgaagaggcagcactatcttcatctttgcctttggcaaagcgtagtgtactgggtggactcctcccagaatctttgctgtatgtcttggagcgcagtggcccttctgcttttgccggtgcaatggtgtctgattctgacacaccagaaattatatggacccacaagatgcgagcagaaaaccttatttgtcaggttctgcagcatctcggtgaatttcctcagaaattggcacagcattgccattcattgtatgattatgctcctatgccacctgtgacttacccgaatctgaaagatgagatgtggtgccatcgttactacctccgcaacctatgtgatgagattaggtttcctaactggcccattgtagaacatgtggagtttttgcagtcattgttggtgatgtggcgtgaagagttaactcgtcgtccaatggatttatctgaagaagaagtctgtaagatactcgagatttctcttgatgatcttgtgcttggtgagaacggtagcatcaagcagtcatctgacttaagtttggctaattccggaaacaaaattgaaaacattgatgaggagaagcttaagcgccaataccgaaagctagcaataaaatatcatccagacaagaaccctgaaggaagggagaaatttgttgctgtgcaaaaggcttatgagcgattgcaggctagtatgcagggattgcagggaccacaagtctggaggctgctactcttgctgaaggcacaacgcatcttgtacaagagatatggagatgtcttgggaccattcaaatatgctggttatcctatgttgctaaatgcagttactgtagataaagatgacagcaattttctttcatttgataggacccctcttctgatagctgcttcggagctaatttggttgacatgtgcatcatcttcattaaatggagaagaacttataagggatggtggtatccccttgttggcaacacttctttctcgctgtatgtgtgttgttcagccaactacaccagcaaatgaaccagctgcaagaatagtcaccaacataatgcataccttctctgttctcagtcagtttgaatcaggaagagttgagattcttaagtttggtggccttgccgatggcattgtgcattgcacagaacttgagtttgttccctcagctgtggatgctgcgctgctgacagctgcgaatgttttggtttcatctgagttgcaaaatgctctgctcagggctggatttttatggtatgtgctacccctgctgcttcaatacgattcgacagcagaagagaatgagacatgtgaagcacatggtgttggggcaagggtgcagattgccaaaaatctgcatgctgttcatgcaactcaagctttgtctaagctttgtggtctcagtggcgatgatatcctgtacccagataacaaacctgcatacaatgcactgaaggctcttcttactccaaagcttgctgacatgctgagaaaccacccacctaaagagttattatcaaatctaaattcaaatttggaatcaccagagatcatatggaattcatccaccagaggggagcttctcaaatttgttgaccagcagcgtgctagtcaaggccctgatggttcatatgatttgacagaatcacattctttcacctatgaagctttatctaaagaattgaacgttggtaatgtatacttgagagtttacaacaaccaaccggattttgaaataagtgaccaggaggaattttgcattgccctgcttaagtttatagtagagttagtactacagtggaattccattaatttggagacgattcatcaacatggttcagttactgaagcatctatgtctggaaatgatgaagtcagtgattcaactattgaaggaaaaatggataattcatcaggaaaacaaagtacagatggagattctgaagttattataaacctccaaagtggactaacatcacttcagaatcttcttacaagtaatccaggcttagctgctgtttttgcttccaaggagcgtctgattcctctttttgaatgccttgcactgcatgttccttctgaaagcaccagcccacaaatctgtttaagtgttctttctctgttgactaagcatgcttcttgtttggaggctatggttgcagaaaggatgagcctgattttgctatttcagatactccactgcaatcccccttgcagggacggagctcttgctgtactgtattctttagccagcacaccagagcttgcctgggcagctgccaagcatggtggtgttgtttacattcttgaacttatgttgccacttcaagaggaaatccctgtgcagcaaagagctgtagctgcatctttattgggcaaacttgttgggcaaccaatgcatggccccagggtagcaatcacccttgccaggttcctgcctgatggtttggtttctgccattaaagatggacctggtgaagcggttgtttcttctcttgagctgacaactgaaactcctgaactagtatggacacccgcaatggcagcttctctttctgcacagttggcaacaatggcatcagacctctatcaagagcagatgaaaggacgtgttgttgattgggatgtacctgaacaagcttccggacaacatgtaatgaaggatgaaccacaggttggtggaatttatgtaagactttttcttaaggatcccaagtttccactgagaaaccctaaaagattccttgaagggctcctagatcacttgttgcagctatggcttatgagggacaaagggaaactatggcatctgggcaggcttccagtggatcgcaggcagaacctggtgaacatgacaattcatctcactctgaggccactgtgcagactccacaagaacgtgtccgccttagttgtttgcgtgttctgcatcagcttgcgtctagcacaacctgtgcagaagctatggcatcaacaagtgcaggaactcctcaggtcataccactgcttatgaaagcaattggatggcaaggtggaagtatactggcattggagacattaaagcgtgtagtcggtgctggtaatcgggctcgtgatgctcttgttgcacaggggcttaaggttggtcttgttgaagtgctccttggtattcttgactggcgtgctggtggaagacagggactccgtaataaaatgaagtggaacgaatcagaggcttcaattgggcgtgttttggctgtggaggtgcttcatgcttttgcaaccgaaggtgcacactgtgctagagttcgtgaagtcctgaattcctctgatgtatggagtgcttacaaagaccagaagcacgaccttttccttccatccagtgcacaatcttctgctgctggagttgctgggctcattgagagctcgtcaagattcacttacgccctcgccgcaccgccatcttcttctctctctccaccatcagctccagcaaaccctagtggacggcaatattatcagcattcgtagtggaaaacgaaacacttaatctctgctccttggagtatgaccatgaaggcaccaccatggtaacgatttgtagagtgaggccaccttgagtgggcttgttactgtcaccaaatacagctcgtgtctccattcccaccaatgagcagctgatcagttgcccgcatttcagtacatagcatagcatagcataccattgtacagttttccattacataagggtcggggtcggttttgtgtgtgtgttttttttttgtaaagcatatgattttttttgggtaccatagatgtccatagaatacgcgagctgaatattgtatccattcattactgggttgatgcactcccttgttcggatcacacgacttacttgtgacgagagaaataaatgttttttttgcctttgtttgatgagcattttctggtgtcagttaaccttttacagtcatattgtcgtgtatgaccaccgagtgtgtgtaggttttatatagcctgtccgtcactacttttggttagagtttgctatttcatttgtaatgaagttgtttgctgacacctttgcgtgtaacaaaagaaaagcacacaaaaaataacatgctccctcagcc

SEQ ID NO: 32007 - DNA, 2003 bp, Zea Mays
agaaaccagaccaacaacaaaaaccgactagcccaggcaagcagaaacccactgtctccgcttccgctcccgactcctttgtctcgtcctcatccatccaaccaggcgagccaacaagcaagcaaaagtaaacggggcgaggagctggagagacgccggcgacgcgaagcaaccgcccgatcggagccgcggctgagcaggagggagccggagatggtgggtctcgtcggcggcagcacggcgcgggcggagcacgtcgtcgccaacgccggaggggaggcagagtacgtgcgccgcatgcaccgccacgcgccgaccgagcaccagtgcacctccaccctcgtcaagcacatcaaggcgcccgtccacctcgtgtgggagctggtgcggaggttcgaccagccgcagcggtacaagccgttcgtcaggaactgcgtcgtgcgcggggaccagctcgaggtcggcagcctgcgcgacgtcaacgtcaagaccggcctgccggcgacgaccagcaccgagcgcctcgagcagctcgacgacgacctgcacatactcggtgtcaagttcgtcggcggggaccaccgcctccaggtccgtgctgctgccgcccgtttgttgcgtccctgcaaaaatgctctgtttcacgcgccctccttgctttcctgatcgctggatgctatgcatgaaatgcatttgctgtgcttgcgagattgggcatttactatgagctttgtgacagttaacatcttggtcctgtttggaagctgggattgggaatcaaatccttacatggtttaggagcatccagtttgaacttaaaccattgtagacatctgctgcaataaaaacaattggcttcggtgagaggcactcatcatcagttcaaacttaaaacgagataagccatcggttgattggcctaattaccttgcttcccgtgattgttcgcctcgctgaaaggatatgctcacaacccgtactgttttgacttgttatccacatactatttaagtacgaaaggacatgcgtactactttcatttgttgttcttcgtctagtcttcagactgataatataaggtgaaaaacttcgatgtttcgcgtgctgtcaagtgattgtgaagcaaagtttctgttagtgtcaatgcgtacaggctgcaatggccatctttactcctacttgaagcatatctctgatccacactgatgatgatgagttgtgtgcgccacttttttttctttttctttcagaactactcatccatcataactgtccaccccgagagcattgacgggaggccgggcaccctggtgatcgagtcgttcgtggtcgatgtgcctgatggcaacacgaaggacgagacatgctacttcgtggaggccgtgatcaagtgcaacctcaattctctcgcagaggtatcggagcagctagcagtggagtcacctacgtcgctgatcgatcagtgaagtcacctgcgtcgcccatcgatcagtgaccaccggtacaaaaaaagacgtcaatcagcaacaaataagaagaagcttcgaaggctggctggagagttcaacctttttgagaccggtggtttggccatcgtcttctgcgtgtaatgtctcttggaatatggaagtattagtcgttgtgtaggattaaacatctgtagtagcttgtatgctagggatggttgtttagccttagaaactgcacctagatacctcatggcatgtatgcatactgctagtatgtgtagagatcagggaaagcatggagcgggttttgcctcttaggtgcatggagatctgtctttttttccccctccattttgcggtggcgactctattggttggggttcttggataaatatactttcccgcgaacgcatagggccggattttggaattggttcaattctcgtaattattgtattctctagtgttattgggatttggggtttggaattgccggactgcgataagtgatgaaaatgtagacattaaagctct

SEQ ID NO: 32008 - DNA, 4475 bp, Zea Mays
atggggcggatcggcaccgccgtccgaggaggaagggctcgaatcagaccatctctgggacctagaacgttccgcatgggaagttgggttgcaaggagcagcgggtcccgacgccagaggggtggaagacgacggggtggccgtcggtttcggggtggttgctggcgtgaggctggtggaggggttggcgccgggaagggaagggacaggggcggaagacggagggaagaccgaagggcaggagacggaagggcggccatcttatctagatgcatcgaatggggagagacaccccctgacttttttttcttaagttggtgccgtgactcgaacccgggctggctcagcagaccgcttctttggcgtgtccggctgaccagttgcaccatcaaacctctggtacagccaaccaaagatataatgagagaacctatcaggacattccagtggcacgagtttttccctcatggaactaacaatattggtgttgttatatcactctgggctccaataatcctggtatatttcatggacacccaaatttggtatgcactgttctctactctgattggtggcatctacggggcttatcgtcgtcttggtgagatacgtacattaggaatgttgagatctcgctttgaatctttgcctgaggccttcaatgaacgcttgattccttctgatgcaaataagagtaaaggtcttcgtgctgctttttcgagtagacccaaggcttctggtgacgaaagtgagagagagaaaagagctgcaaggtttgctcaaatgtggaacgccattattacaagtttccgcgaagaggatctcatagacaatagggagaaggatctgctactggttccagactgtaaagaccgtgaacttgatatattccaatggccgcctttcctacttgctagcaagatcccaatagcactggatatggcagcagacagtggtggaaaagaccgtgatctgacgaagaggataaagtcagatccatacttttcctttgctatcagagaatgctatgcttcattcaagaacatcatcaataccttagtatttggtcagcgggagaaagatgtcctagtacagattttcacagttgttgataagcatatagaagaggaaactctgataacgggtctcaatatgaagaaccttcctgcactgagcaagaagtttgttgaattacttgagttactgcaaaaaaacaaggaggaagacttgggtcaggtagttattttgttccaagatatgctcgaggtggtcacgagggatataatggaggaacaggacctgctcgagacgttggattctttacatggtgccaatagtagaaaacatgaaggaattacaccgctagatcagcaagaccagttgtttgctaaagctattaagtttcctgtggtggaatcaaatgcatggactgaaaagataaagaggcttcatcttctgttaactgtgaaagagtctgctatggatgttcctattaatcttgatgctaggcggcggatatcgttcttcgcaaattctctatttatggatatgcccaatgctccaaaagttcggaacatgttgcccttctcatgaatggaaaaatttcctcgaaagggtgggctgcaagaatgaagaggtactccgtgaagatgaacagctggaagagaagctttgtctttgggtgtcatatagggggcagacattaacaagaactgtaagagggatgatgtactatcgaaaagctttggagcttcaggcttttcttgatatggccaacaatgatgatcttatgaaaggctacagagcaatggaagtaatgtctgaggactcaccattaaagactcaatgcaaggctatagccgacatgaagtttacatatgttgtctcatgccaactatatggaattcagaagcgttctaatgagccttgcgcacatgatattttgagactaatgacagagtatccatcacttagggtcgcctatattgatgaagttgaagcacccagcaaagatagaatcaagaagattgaaaaggtttactactcagtgttagtgaaggcttctgttacaaaacctaatgagcctggtcagagccttgatcaggtcatctacaagataaaactaccaggtaatgccattttaggtgaaggaaagccagaaaaccagaaccatgcaataatattcacccgaggcgaatgtctccaaactatagatatgaatcaggagcactatatggaggaggctttgaaaatgagaaatctgctgcaagagtttgagaagaaacatggagtgagacatccatcaatacttggagtcagagaacacatatttacgggcagtgtgtcatcccttgcttggttcatgtcaaatcaggaaactagttttgtgacaattggacaacgagtgcttgccaatccactgagggttcggtttcattatggccatcctgatgtcttcgatcgtcttttccacgttacgaggggcggtgtcagtaaagcatccaaaattatcaatcttagtgaggacatctttgcaggattcaattccacattgcgcgaaggcaatgttactcaccatgaatacatgcaagttggcaaaggaagggatgtaggtctcaatcaaatatctctgtttgaggcaaagatagcaaatggcaatggcgaacaaacgctgagccgtgacatctaccggctaggtcatcgctttgatttcttcaggatgctgtcttgttactacacaacaattggtttctacttcagtacaatgattacagtatggactgtatatgttttcctctacggccggctatatcttgtacttagtggactcgatgaagcactggctactggaaagaggtttgtgcacaatacacctctccaggttgctcttgcgtcagagtcttttgtgcaacttggatttttgatggcgctgcccatgatgatggaaatcggtttggagagaggattcagaactgcattgagtgattttatactgatgcagcttcagttggcctctgttttcttcacattctcgttgggaacaaaaactcactactacggaaggacgttactccatggaggagcggaatacagagccactggacgtgggtttgtggtgttccatgccaaatttgctgagaactatcgactttattcccgtagccattttgtcaagggccttgagctgatgattctactagttgtgtatgaaatatttggtcagtcatatagaggggctataacttacatcttcatcaccgtatccatgtggttcatggtgggcacttggctctttgcaccattcctgttcaatccttctggatttgagtggcagaagattgtggatgactggactgattggcacaagtggatcagcaatcgtggaggtattggtgtggcaccagagaaaagctgggagtcatggtgggaaaaagagcaggagccccttcgttactctgggaagcgtggtactattgttgaaatactgcttgcattgcgtttctttatctatcaatatggactcgtgtatcatctgaatataacgaagaagataaccaaggataaccagagtgtgctggtttattgcttctcatgggttgtaattttcgttgttttactcgttatgaagaccgtatcagtggggaggaggaggttcagtgcagagttccagctagtgttccggctgatcaagggtctcatatttataacttttacagccatcgtggtaatcctaatagcaatccctggcatgacggttctggacatctttgtttgcatccttgccttcatgcccactggatggggtttgctcctgattgcccaagctatcaggcctgtgattcaaaagatcgggctgtgggggtcgatcaaggctcttgcccggggctacgagatcctaatggggcttctcctgttcacgcccattgctttccttgcctggttcccgttcgtgtccgagttccagaccaggatgctgttcaaccaggccttcagcagaggtctgcagatctcccgtatcctgggaggacacaagaaagaccgagggacgcggagcaaggagtagtagggctgctgattgaaggtccgtctatcgggagttatgtcgtcctggagcggtctatcaggttcagagaatattagggtccgtatgtatgtatgtgtgtgtcgcacctagcaccagtagtatgtatgtatgtatgcgtatgtaggttcagagaatattagggtccctatgtatatgtatgtatcaggattgctatggtcttttggattggaagatctgagatttgctggtgcaatggccagtatctgacatccaaatgttgaaactataattaggctctgctaatagttagctaacttacagctaacaattagtttattagctggcttacgactaagtagtcagattaaagttgggatgtcggtcgccccctttaggtttagttaggctcgttccaatgggtggcgagagc

SEQ ID NO: 32009 - DNA, 3532 bp, Zea Mays
gctagcgtcagcctcgtctcgctcgttttgctccgtctctcttcctcctcacttcccacccaccctcgttttgctccgtctctcttcctcctcacttcccacccaccctcgctcgttttgttctgtctctctttctcctcactccctccgtcgatcctctgcagcttgcatcggtcgaccagtagtcttccactgtaatcgcctctcattattctttctgccacgctcctcttcgtccttactccctccgtcttgtctatctgtagccacttcgtcttcctacgtttttgccaggatttgaggctgtcatagtatgctctctgaccgtgctggcgggaggaaggagatgatttaagttctctgcgtttataaccagaaagaggaggataatccaatcatggtaactaaatagtaggtagtaatgtttcacggtaaatcacagtgctcgaatgcgatatgatctttgactcggagtattgaagactaatttagtttgagtttgagattagttgtttttgtcattaataaactcacattggcatctggttacgagctcactactagattttagatctccagttttggtgtacttttgctgcatgtgtctcccagagttgcagatttgcaggatggcttgatctggcaagtgctcgccattctatgggcccatcatgcttttcgagtacactgtttgatcacaaggagcggtctgctgccactaaacttcaagttgttgatcatgatggcctgaaaaattatcggggatatgctcatatgccttggccttaatttaaactacttgtatgagatggagaaatgtcacaaaacacaggatgaagacgactccaggaatccacccatgcctctcagtgactcagtggcacaaacgacagcctagtcaggtaacacaataacatatcagccatatgctatacatgcatatactatgttatggaaataactccgaagagtatatcacattctaactagttatgtatgcaaacactaatgcaagacaaccatcttgctcgtcatgttggtgtggtgggggtcaaaagcgtcttgctgctgaaattgatggtataccgtacaagcatttacctttgatttttgctgacgttaatatgttgcttcactaaaggactaggagacgtcttcacatcacggagtagaccactcagcaacaacagtgcaacggtgttcggacttttgttcacatatgggagtgtttaagctcctgcacctagatttagaaacaccaccatgtaaaatagacaagacagtgcttttgcaaacatgatgctaccacgagacccgaactcatgtatggccaaacatgttaacatattttgtatgtcaccaaaacgcttatttacatcaatgagcgattatctgaactgttgaatgctcaccaaaatgcttatttctatttcctactgctacttgctcctttgaagccttcagcgatggaggcctccacagaagctactaggatggcctccagcttatgacctctcactgccgaccgcaccttcctcagaatatgttgcttcatcaccgccctctcagcagactggagtttcttgcacatgttcaatccctggatgtacctcgacaccgcgccgccgaaaggatcaccggctttctcaagggccacgagcttctcgacgatctgagaagcgagcattctctcgatacagggtttggttccaacctccgtgatgtccaccagaaattgcatggctagatccttggtcttcaaagacttgcggtccagcaagttcaccagtttctctatggttcttagttgcagaaatctttgcaagacaagggatccacccttcgcaaagacgatctgatggagagcgtagtacgctgaatcctggagctcatcgatgttgcactgcagcatgtcaatgagctcgtgaacaatattaagctccaggaacctatgcacgtatggctctcctccagtgcaggccaatttcatcaccaaaaaggcggtctgggacctcacctggttcttttcaacctctctgcgttgtagcagccaagccaacctatcaaacagatggcttcccagaaggaggatattatgaagaatcacctcaaatgattgttgaggctttggtgattgcggcacatttctgtcagataaaacaaatctttccaaactgatccgagcatgccagggcaaatgaagcagcactgcaggccctatgcacccttgaagtggagcaccaagttcacagaatgtttttagcgtgataatcgcgtggtgctgtgagatctcagaaccattgcccagaagcacaagaagtttattgtcaattcctgattcaatcattgtctcaacagccttcagctttccaacctttgtcagagatgcaagtgttgtaaacacaatttcatgccactgctcattttctgcagtcaagagatctgcaattcgaaccatgggaattcttgacaaaatttcatccgcaattgtggcatcaacatgctcagatatcttggtcagaacagaagagaggttggctagagttgaagtatcttcacaggcaccaagaagatcaattaatttatctatggaacctgctatttcaagagagtgagcaagatttatgtagtctgatggggaaaatataactgtaattgcggcagtgactgcaaaaataagatctagtgaccctatagaaattatctctgctattcgagggccaagtattttgctgaacccaattctatttgtctcaagttcagacagggatctgcatgccatgagagcttgagttgtgtttaccaataaaatctcgatgtccatgaattctagcagagaaaagaatgatcccatcttctgttcggctggccgtttcatacactctttgccaaaaacaaaaagccaaggagctactaatgccacattatatgaaatggaatcagataaaagagcacgagtggcatcatttgttttgttctccaggtaaagtgagaccatgtcatgcatatgatacaacggctggtcctccagtttgataataagtgatccttcgactagttttgaaaccacgagagagaacagtccgcactgctcaagcgctgaccaaatggattccagacaagcctcaggaacaggttcttcccaagagatagctgcaagagccatgaaaaaaattcttgaattttctggcattgcttctaagctgaactcaaaagatccaaatatggtcaacgtagtctccacatctttctcattgacgtatgaaactggaccaggtgcacatgtggcatatgttgagaggttggatatagctttctcccatttttccactctagtttccttcctcagagccttgcccatgacagcaactgtaaggggatggtgaccacatcgatccaacaagacttctgcgacaggctgtgaagtatagagaagttaaacattcaaaaaccatggtgtttggaatttttagttattctattttttcatgatgtatcttcttctaaaatatcttactttgcaagtttggca

SEQ ID NO: 32010 - DNA, 535 bp, Zea Mays
ggaacgaaaaatgtcactatgatatataaaatgttgggaactacaccataagtaactaacgagggcgtccacccggcttcaccatgcccccgccagccccgccgcgcccctgcctgcatgcgcccccgcgccgccgctcgcttgcacgcgtccctgcgcccgacccgacccctccctgtggcccgcgcgctcactcgaccccggacgcgcgtgcatgcgggcacccgatgtggacatggaaggtgagatccacgaccatggaaggcgagatccatggccatggaaggcgcgtccccttccatacttggcggccatggcatgcacgtgctcccttccccgcctcaatcgactgctattttgaggatggacagaggcgaggcctccaaaccatccccactctcctcccatgcgtcgcttcgtgttatctccagcacatttgctcatggctcccggttctagatctggagttctccaccgccaccagcacggccgtagacgcggaagcaagggggttgggcttctgtcggtgctggac

SEQ ID NO: 32011 - DNA, 2932 bp, Zea Mays
acacgggatcctgactgaggtaggttgttgccatttttgttccctcacccagtccgtctcaccacttcaaaaaccctctcctctctcatccgccttcctggcgattgcggcgacgaggtgacgatagagctgcccccgcaaggaaaacggacaagagaggcggaggctgatagggagaggagacggaggaccaagagcggcgtcgatctaaaagcgttggcggcggccatggccaccgcggaccggacccggactttcatgaaggacgtcaaacgcgtcatcatcaaggtgggcactgcagtcgtcacgaggggtgatgatgggcgactggctgtgggccggttggggtgtctttgtgagcaggtaaaagagctgaatgtcttaggatacgaggtgatccttgtgacctcaggtgctgttggtgtggggaagcagaggctcaagtacaggaagcttgtcaatagcagctttgctgatctgcaaaagccacagatggagctggatggaaaggcttgcgctgctgttggtcagagtggcctcatggctctttatgatatgctatttacccaacttgatgtgtcctcctcgcaacttcttgtgacagatagtgattttgagaatccaaactttcgggagaggctctgtgaaactgttgagtcactattagaccttaaagttgtaccaatatttaatgaaaatgatgccatcagcactagaaaggctccatatgaggattcatctggtatattctgggataatgacagtttagctggtcttttggctattgaacttaaagcagatctccttgttctactaagtgatgtagatggtctatacagcggtccaccaagcgaaccgggatcaaagatcattcatacctacattaaagataaacattacagtggaataacttttggggataagtcacgtgtaggtagaggaggaatgacagctaaagtgaaggctgcttttgtggcttcgaacagtggcacacctgttgttattacaagtggatttgcatctcagagcattgttagagttctccaaggagagaagattggtactctcttccataaggatgcaagtctgtgggagccatccaaggatgttagtgctcgtgagatggctgttgctgcaagagaatgttcaaggcgtctgcagaatttatcatcggatgaacgcaagaaaatattgttagacattgcagatgctttggaacaaaatgaggatctaattagaactgaaaatgaagctgatgtatctgcagcacaagatgctggatatcagaaatctttggttgatagattgacattgaagccagaaaagatagcaagccttgcgaaatccatacgcactcttgcaaatatggaagacccaatcaaccagatactcaaaagaacagaggttgctgaagacttagtgctcgaaaaaacatcttgccctctgggtgtgctgttgattgtttttgagtccaggcctgatgccttagtccagattgcgtctttagcagttcgaagtggcaatggtcttctcctgaaaggtggaaaagaagccatgagatcgaacacagtattacataaggttataactggcgcaattcctgacaacgtgggtcaaaaacttattggccttgttacaagtagagatgaaatcgctgatttactaaagcttgatgatgtcattgatcttgtcattccaagaggcagcaataagctggtttcgcaaatcaaagcatcaactaagatacctgtcctcggtcatgcggatggtatttgtcatgtatacattgacaaatcagctgacatgaatatggcaaaacgaatagtgatggatgccaaaactgattacccagcagcctgcaatgctatggagacattgcttgttcataaagaccttataaaggctccaggtcttgatgatatactcctatcactcaaaacagaaggagttgctatttatggagggcctgttgcacatgaagtactgtgtattccgaaagcagattcattccatcatgaatatagctctatggcctgcacaattgagttcgttgatgatgtacagtcagcaattaaccatatacatcgttatggaagtgcacatacagattgcattatcaccacagatgataaagtagcagaaacttttctgcgtcaagttgatagtgctgctgtatttcataatgcgagtacacgattctctgatggggctcgttttggattgggtgccgaggttggcataagcacagggcgtatacatgctcgcgggcctgtgggtgttgaaggtctcttaacaacacgctggatcatgcgaggaagtgggcaagtggtgaatggtgacaagaatgttgcatacacccataagaaccttcccttacaatgaggtagcagaagcaaactaaacctatgcaactatgcaggctgtttttgtgcttgatcaggattcgtgtctatccagtgatgtttgatagtttcatcaggcaggagcatagaatggtgaatcttttcgattgaggactgtgaatccatggatgttcagtcattgtttgtgtagacattgtggtgagcttggaggccaccccacctccccaataaagcagtgctgggagtaatagagcactgatgtactgagggtgcctaggttaaacaagaggaaccggttatatttgttttgcggtcgaacacaaacaatttttgttggtgacttgtttcttatgattctacatatttcaaggtttatgtgctgtcctaaccgggttctttgataccgggtattttggatactgtaggcatactgtaacgacagcaaaagctggctgcagtagccacagctgtactgctgcaaatagctgttactaaaatatcgtgcatcacatgtcggccacaattacccaaaattgcgttgttctagttctaggcaatggtatttgtct

SEQ ID NO: 32012 - DNA, 756 bp, Zea Mays
atgcagcggcaagcgggtggtagaggttgttttggaagggaaagagaggagacagggtccaaacgagccgagacggacctgtataggcacagccgcacaggcacagacgaggctgcggggagagaaatggacgacgagcggcggaggaggacgaagcgggaggaggcggacggcgagtggcggcgctgggcggtgctggtggcgtcggtgtggatccaggcgctgacgggcaccaacttcgacttctcggcctactcgtcggcgctcaagtcggcgctgggcgtgtcgcaggaggcgctcaactacctggcgacggcgtcggacctgggcaaggcgctgggctggtcctcggggctggcgctgctgcacatgccgctgcacgccgtgctgctggcgtcggccgcgctggggctcgccgcctacgccgcgcagtactactgcctcgtgttcgtcagcccggccgccctcgccgccgtcccataccctctgggcggatcatgcgtgatggaggcgtggagctagagagaagtaggtgtaccgtgtatggtggtggaccggagcagagcagaggcaatggcaggccgaggagcaagccgggccgcccgccggggagctaaattttgtgtggtgcggcgaccagcacggccgccgcagtggtaaagacgaagacagggcaggatagatagctacttcacttccgcatgcagtgatgtatgtgaacaacagctagctctggtccggccggttggatctccc

SEQ ID NO: 32013 - DNA, 1789 bp, Zea Mays
ggaatagaatccttggcggcttggcctgcatgcagttggcgtatcttcattttatttatttatttatttatttattgtgtttgtgtatatataagggcggttatcatatcttggcgagtagcagctgcggacttgcgagcccaggcaggagaggactcgtccacatctattccttccttgttcggccgcccttcctcagttggtcgtcccctcttaccattacttctcctcctccctcgccccgtcggcgggcggccattgacgactggatccttcattcttgttctcaggggaaggacgacccaagacaggaggaggaggaggaggaggaggaggaggaggaggaggaggaggaggaggaggaggaggacagtgccgccatgaccggaggaggggaggagcaggggaggtcgctgttcggcgtgtctctgacaaacaggcctaggtggcagcagttcatgatctgctcctcgggcttcttcttcggctacctcgtcaatggcatctgcgaggagtacgtgtacaacaggcttcagttcagctacggctggtacttcacgtttgtgcaggggttcgtgtacctggcgctgatacggctgcaggggttcacggtgaagcagatggtgaacccgtggcggacctacgtgcgcctctcggcggtgctcatgggctccaatggcctcaccaagggatccctcgccttcctcaattaccctgcacagatcatgttcaagtcaaccaaggttctaccggtgatggtgatgggagccttcatccctggtctgaggcgcaagtacgcgttccaagagtacgtgtcggccgtgatgctcgtcgtcggcctcatactcttcacgctcgcggacgcgcagacgtcgcccaacttcagcatggccggcgtggccatggtgtccggggcgctcgtcatggatgctttccttggcaacctgcaagaagcaatcttcaagatgaacccggacacgactcagatggagatgctgttctgctccactgtcgttggccttccgttcctagcggtgcccatggtgttaacaggagagctcgtgacggcttggacttcctgctcccagcatctgtacgtgtacgcggtgctggtgttggaggcgatggccacgttcgtcggccaggtctccgtgctctccctcatcgcgcttttcggtgcagcaaccacagccatggtgacgacggcgaggaaggcggtgacgctgctgctgtcgtacctgatattcaccaagcccctcacggagcagcacgcgacggggctcctcctcataaccatgggcatcgtcatcaagctcctgccggagaacaaggagagacgcccgcgccggctgcccaagaatgacgacgacgacaagccccgggagagcagagaagcgggggaggaaacagcatgactgctgctatagacccgacacccgagcaaagcagaactgacgccagctcgatcagcaaccctagaagaaattctcagtcctccaaaacagcaatcccaggaggaggatgggatatacatgcaggatagagcactacatacagtaataataacctttttcctcgctcctcccctcgcttttctcatgtgctgtggttaatgttaattgtgcacttcgctctaacatcttaagctttttataaaggcaagggccagaggtctgaattctaattagcgcaatatctaaggtcttgttcagttattcctatcctatgtggattgtatgagattaaaaaaaatttataaaagattttgacttattcaggattgaaatcc

SEQ ID NO: 32014 - DNA, 1742 bp, Zea Mays
aattcaccctcaccccttcggctattcctcgcccccttcccttctcgaggattcgcgtaatcgtcaccatgcgccgcccgtggaggcactcgggcccagggtccgccgtcgcggcgcgccacggcgccgcggacctctgcctccgcgaggtcggggacctcctgccgcgacgcttcgcccgccgcgcggccggttccgaggaccttgtaatgcggctccagattcaccggaagcttgacaggcacacgggctgcgtcaacacagtgggcttcaatgaggtcggtgacaccctcatatcggggtctgatgatcagaaggtgatgctgtgggactgggacactggcaccgtcaaattagagtttcattcaggacatggcggcaatgtgttccaggcacggttcatgccctgctcagacgatcggaccattgtcacttgtgctgctgatggcgaggtgaggcttgccaagatacaggatgctggagacgtgtccacaacattgcttggtgaacatgagggaagggctcacaatttggctatagagcctggtagtccttacattttctacagctgtggtgaggaaggctttgttcaacattttgatctcagaacaaacacagcctcaaaactatttctttgcagaaactccactaaatcagtatactcatctcttgttcacctaaatgcgcttgcaatagatccgaggaacccaaatctttttgttgttggaggaagcgatgcatatgctcgtgtgtatgacattcgcaagtgcaagtgggatggatcatctgattttagtcacgcatctgactgctattgcccaccacatcttgttgacaataagagtgttggaataacagggattgcattctctcacctgagattggagcaattgaagggtgcaaatcaacaatgctagcatctggacatgatgtttctcaacctgcacctcagacatacgtcggtcatgttaatcgtgaaacggtgaagcgtgtgtctttcattgggccaaatgatgaatatgttgccagtgggtcagactgtggccggatctttatttggagaaagggagatgggaagtttctacgagccatggagggtgatgagtgcattgtgaattgcattgagcctcatcctcatgctatggcaatcgcgagctgtggaattgataatgatgtaaaagtttggactccctctgcgattgagcgggcacctatgatacatgttgatgagttgagacctcgcaagagaagagccaagctctggcgctttggcatacgagacctgttgatccaacagatactggtatcggaaaataggcaacagtcagctgaagaaggctcatcagaggaccatgaggacaacatagaattacttgatctagtgctacaggctgcagttgaaggtgtatcatcatcatcagacgaggaggaggaggacgacgacgacggcgataatgaggaggcggcggcctctgatggctctgaatagtagtcaaccgatctttcagggttgtttcaaattgtaaatatacaataataagccatcactcttctcatgtattatataatagaactatgatttattagcttgtcatttctatgttataaatctgcttttagtatgctactttaatgaaaaaattgggctaaccaaattgtgtgctatgttatgaaaatctgaaatggtgttgcgtcatatatttaattgtctgaccaaaaaaactttgtggttcatccctggg

SEQ ID NO: 32015 - DNA, 3013 bp, Zea Mays
tggggaggaggaggagggtagctaggtagtagctgcctataggcctcggcccccattcatggccattaccacgatgtgtcaccccaccacaccgccctctccgatgctgcctccctcatgataaccctctccctggtggttgttctttgccttgttgccgtgcagcctccacccccaccctcctcattaatcacttgctagctccctgcctccctcccggctcccgctcccccttctcgtgcttcgcgcccccgcagcagccatggcggggatcgacctcaacgacaccgtggaggaggacgaggaggaggcggagcccggcaacgcctgctcccagcagagccggaccagctccgcggccacgttcccgccgccgccgccgaaccagccgaggccgagcgccgcggtgtgcctcgagctgtggcacgcctgcgccggccccgtcgcgccgctgccgaggaaagggagcgtcgtggtgtacctcccgcagggacacatcgagcacctcggcgacgccgcggccgccggcggaggcgcgccgccgcccgtcgccctgccgccccacgtcttctgccgcgtcgtcgacgtcactctccatgcggacgcgtccacggacgaggtgtacgcccagctcgccctcgtcgccgagaacgaggatgtcgcgaggcggctgcgcggacggtcggaggacggcagcgccgaggacggcgacgaaggggaaaccgtgaagcagcggttctcgcggatgccgcacatgttctgcaagacgctcacggcctccgacaccagcacgcacggcggcttctccgtgccacgccgcgccgccgaggactgcttcccgcctctggactacagccagcagcgaccgtcgcaggagcttgtggccaaggatttgcacggaaccgagtggaggttccgccacatttatcgagccccgcagacaccttttaaccactggatggagtgcctttgtcaacaagaagaagcttgtctcaggggacgccgtactatttttgaggggtgataatggggagctaagacttggagtgcgccgtgcagctcagcttaaaaatggatctgcttttccagctctttataaccagtgcttaaatcttggttcactacctaatgttgcacatgctgtggccaccaaaagtgtgttccacatctactacaaccccagattaagccaatctgaattcattataccattttcgaagtttatcaagagcttcagtcaaccattttctgctggttcgaggttcaaagtgaaatatgagagtgatgatgcttctgaaagaagatgcacagggatcatagcaggaattggtgatgctgaccccatgtggcgtggttcgaaatggaaatgtttgatggttcgatgggatgacgatgtagattttcgtcaaccaaacaggatttctccttgggagattgagctgactagttcagtttcaggatctcacatgtctgcaccaaatgcaaagagactgaaaccatgtcttccccatgttaatccagactacctagttccaaatggaagcggtcgtcctgattttgcggaatctgcccaattccacaaggtcttgcaaggtcaagaattactgggttatagaactcatgacaatgctgctgttgcaacttctcagccatgcgaagcaacgaacatgcagtacattgatgaacgaagttgctccaacgatgcgagtaacattatcccgggggttccaagaattggtgtcagaacaccactcggaagccctaggttttcctaccgttgctcaggctttggggagtctccaagattccaaaaggtcttgcaaggtcaagaagtatttcatccctacagaggaactctggtcgatgcaagcttgagtaatagtggcttccatcagcaagatggttctcatgtgcctactcaggccagcaagtggcacgcacagctacatggatgtgcttttcgtggccaacaagcaccagctgttccatctcaatcctcatccccaccatctgtcctgatgtttcaacgaggtgatccaaagatgtccccatttgaatttgggcatttccacgtgaataagaaagaggatagacgcgcaatgtttgtccatgctggaggcatcggaggaactgagcaaacgacgatgctccaggctcatcatgtttctggaggaacgggaaacagagatgtgaccgttgagaaatctcatcccgctgttgccgctgcttcagacaacagggaagttagcaaaaacagttgcaaaatatttggcatatctttgaccgagaaggttccagcaatgaaagaaaagggctgtggtgacatcaacaccaactatccatcccccttcctgtctttgaagcaacaagtgccgaaatcgctgggcaacagctgtgccaccgttcatgagcagaggcctgttgttgctagggtgattgacgtttcaacagtggatatgatgatctgatgtattggaaaactgtcctggaggctgtgttgcgtagtgtggacagtgtcggtttgatggttcggtatcgtgaagacgggatttgattgaggatctggccagatttgtatcctagttgtagctgttagagcactttgtatgacaaccgtgagtgctccgtgttatcagcactagttgctgctcacaacttgcctctatgttcataatctgtatgccatgtcagacccatttatagagggtttgtttgcttggcatagttctagacttaaagcattattatgagaacaaatttgctctgcaccgtatctttcttactttcaagttggcaacggattaacggtggaggagatgatctgagaggttagttgtgcgacgtattaatggtgttacatatattatgcttaggagcattctgccagctcatttatcatatacatgtcagcacttgatttgttaagtgtagttagtagccttgcactttggattggagctatcctcttagggtgtgtttggttggagagttaaataaaatgaatgaagtggtt

SEQ ID NO: 32016 - DNA, 4071 bp, Zea Mays
caagttcgtcgagccgaacagcgacctgcactcgtaggctcaggcgcggtttaccctgacccacatacgatagttgatgtgggtgaaatggactttttaagtccaaaataagcgtactaacaccggcagccgccccaaatctcagtcgggtcattccaatcgaaaccctagaagcgctccgccgagctccaggttcccgagctcgccgctttctcgcggagtaaaaaggccgaggccgggacaacctacttgtgctacctcaacggttcagccatggatctggagatcgttgggcggcatgccttactgttcgacgacgacgcgacggcggagctcgtcaactccggcgtctcccttgtcccctgggcggccgtcggcgcggcagacctcctcctcgaccgccacgacgtccgccacctccttgaccgcgtgccccctcgcccgcaccgcgcctactcgatggccctcctctccgcgccctcccctgacggcgtctctgagaccgagctcgatcgcgagcgctaccttgacctcccggctggcgacggcgaatacgagggttctggggatgcggctccttcaggagtcataatcctacattattcagactcatttcaatgaagcatcaagtacaaattcaaaataagtctattaattggttgggatttcagtggtatggtcgcagccctgttgagccaaactgtataaggaatttttcagatattactcccttgtatatgacctcacacgtactgatctcttctctgctgtttgatttttttggttagcagcagactaacgttgtagtaactgtttgtttcttgcaaacaaacaaggttcatagaatatccaatcgtatccaaataacagtatcactgccacatgtttaaatttagcagtgttcattgtacatatttttttccattgtatacttttaagtttgcaggaaggatgctttgactagttcatgagcatctttaatcatttcaagtaagggactttcttctgttgctcggcagatggaatttgtgcctgcatttttcttccctactcctatttctgttatttactatataacaatcctttagctgacatttttttgcttatctaggaaatgggtcagatactggacagactgattataatgttgttcctttctcgtatggatatcccgctggttcagatgaaccaaattcttcgaacttgtgctatcgcccatcattttatgtgccagaaagcttgttgaataagctgttgatccagcaataactgttcaaggtgcatatgttcttctaaggattaaatgcctgtttcagatggttggagcagagatgaagttcctactagtgatgcacattgtttccttgcaatgtatcttgacgtaaggaatataggcaggtgggattagaatgattcaagtgctacctataacaaaaatgatgggatggctgtcttacgatataccagttttcttatatagtaattcattcagtttgacataatttgtgtttgtgtgctctctagccattgctgagacatttttttgctcccatgttttaaatttacagcctccttctgagaaggtgcatcagataattgcaaggacagccttatttgtcagcgagcatgggggacaatcagagattgtattgagggtgaaacaaggagataatccaacatttggattcttgatgcctgatcatcatctccacagctacttccgctaccttgttgatcatcctcaactgctgaaggatggtgctgatgctgttggcacgaataaaggcaatactgagaatgagcatgcttcatctggcggggctttatcattgcttgggaccacatatgactcaggagacgagaatgaaggcacactcccgcgtagttcggaaggcatgaatcctgaaaatagcatgactcttgatgtgcagggccatgtaaaatctgcatcaattatgcctgacaaaaaagaaataggcaaaaatcagaatgctcctcctgcagttaaaagaaaaacaatattgatgaagaagaatcagattcttactggcaacagcatggttgctgttcagcatgaaaaggttaatgacgcaattatagcatcaagtacttccaaatcacataccaattcaggcttatcagaaataaaagaaatgatccttgaaccaccatctttcatgaaacgcacaatggagaaaataattgagttcattctgacaaatgggaaggagttcgagaaaaaactgattgagcaagacagaacaactgggaggtttccatttcttctgtcttctaatccataccactcatattatctaaagtttctccaggaaactgaagagtccaattcacatggtagaagtcctaataacaaggacagaagaggttcttctgaccggaggggcagaaactctcgtgagcgcgccgacagaagctcctgtgagcgcgctgacagaagctctcgtgaacgcgccgacagaaggtgctcaatggagcgcaaagacatcaattatagcatggaatccagtgcttctgatagaagctcatctgggccatcagagaagcagctgtatgacaaacaagggaagggtatattccatcctgtttgtggggtcaagactcggaaagttactgcagatgaagctgctgctatagtaatggcagctactcgaggactgggtgctgcaaatgactcacttaacaccatgaaaggaaccaaggacaatgttcgcacccatgttagtaatgatccttcttccagctttggaagtttctcatctttacaggaccgaaatgcactgtccaaacacatttcaaatagtgatgttgatgcttcacttacaagtagtggacagccccaaagggaaggttttggaatcattgatgatgattggattgcaaacactattgcaaaagctgctgctgcagcagcttccaaagaggcaggttctttggaagctaccatgacaaaggaacagaagctgaaagctgataggcttcgccgtgcgaagatgtttgctgcaatcattaagagtggagacaacaagatgaatgatttagctgcagcatcgaacccaactagtgaagctgccaaggccattcctgatatgaatgcctctggacttgatctgcaatctgtggctaaggaacgtgaaggtagtagctctgttctgtttgaccatgaggggccaaacttgacaaaacatagtaaagactctgatgatgaacagaacagagtgcggaagtatagaaagaaacaccaagaatccgacgaggaaaaagatgaatctgaggatagctataagcactcaaggaagaagcatcgcccagagcattcaagagaccagagcaaggatgttcacaaacataagaacaagagtcactccaaggacagggaatccagacatcatagacaccattgtagctcttcggaagatgagcatgagcatgaacgttggagttccaaatcaaggcataggcatagagatgatcaccgctactctgacgaggaacactctgatgaggaacacaggaggtcacacaagcatcggagggagcatcactccagttctaaaaggaagcacgaggaagactgataccaggttcgccggaagtgtctgtctagatcaggtgccaagtttgaatcagacaagctgtctgatgacactgcacaaatcaactcagggaacaactgaagcgccgagtaaactgagagcaaaaatcagagcaacatactgtaatattttgtatcacagcagtaacattatgtccttaggcctctgttttgtagccaattgctctttcgatttctgtatttgtttcgaacgttctaactaggtgtctgtccatcttatttgaaatcagtgacctgctcgccaagttctaactacatgctggcgtttctgatgcatgcatagctttattatttcaagtggtctacatgtagcgtcatactccgtcccaaaattcgttttagttaactaatggttgatatgtgttttaagtatgtgtctagattcattttcatgtatttgaatatagatataaaaattaatagctaatcaatggcta

SEQ ID NO: 32017 - DNA, 2581 bp, Zea Mays
cagaaaatcgccgcgtggtcggtccatccgggtcgacttgacttccctctgcaacctcggaacccagccaatccgctgatctcaactgccgggcactccgatccggcaacgatggaggggagcgccgactccttcgggtccttgacggcgccgcttgcctggcacgacttcctcgagcgcatgcgccagccttccgccgccgagttcgtcaagtccattaaaagctttattgtgacattctcaaacagagctcctgatccagagaaggatagtactgctatccaggagttcctggaaaacatggaaggggctttcagagcccacaccccttgggctggcagttcagaggaagaactagagagtgctggtgagggacttgagaaatatgttatgacaaagctgtttaatcgggtattcgcatcagtcccagaagatgtgaagagtgatgaagaactttttgagaaaatgtctttgctacagcaatttgtaaggcctgaaaacttggatataaaaccagagtaccagaatgaaacatcctggctgcgttgggtgagcccagcgtaactacggttgtcgggaacaacggttgcctggacgtggaggtaggcgacaacggcagcctcacagtctgcagtggggttgccctgtgatggggtccgacggccatggggggtctgtaagcccaaaccctgcctgacgatggtggccttttgcttgagggcagcaacgacagccttctcttgctcgagaagtgtggctgcctggacgcgagcgcgtgcgttgacagcctccttttccatagcctaagctgcgacgagcatatgtcgttgatcttgccaaaggccgtgtcctcctcaacgtgggtgcgttcctagtcactcgatgaggtccctgtcatgggtgcaggaggaaggagatgcttttgcatttttgtggcgacgtggcacaaggggagaggaggcgacaggtgacaggcgacaaagatcctagagggatgactgccctggagaggcgacagtcctagaggggtggcgtccagggaaggagcaaaagcgagattagactcatgataccatgttagatgagctcgcacagaaggagctgcagaaaataaacatgtataaagctccaagggataagcttgcctgcattctgaactgctgtaaagttataaataatttacttctaaatgcttccattgtgtccaatgaaaccccccctggagctgacgaattccttccagtccttatctacgtcaccataaagctccactcaaatctgttgtacatacaaagatatagacggcaaacaagattggtgtcagaggctcaatacttttttacaaacatattgtctgctgagtctttcatatggaacattgatggggaatcattatcgatgaatgaattggattttcaaaggagaatggattcagcaagggaacgcatgttggggttatcagctgactcagaataccaggataatcaagccaatcctgatgtccaagatcgtacgtcacaaagtcttggagctaacagaaattctgatgccagtttatctttgaaagaccacgtccaaggttcagggcaggatatgagaagggacagtgatgtgactgtgagtggtaaacaagctgagcaggtgcaatctatttctgaattagagaagaaaggaactgcggagctcctcaatgaggatgacttgaacaaaaaattccaggagtacccgtttctgtttgcccgtgctggtgatctgactattgctgatgtagagagcctattgaattcgtacaagcatctagtacttcggtatgtagcacttgcacaaggtatgggtgtcagtcctgaaaccactcttactcagaacgggcagacatctgatcttgtagtatctgaggagccagaaattttgaatagcgtggtaaaggacaacgagaacagtgcaataattaacaaaaatgttgatgatgttataagcttaaaccatcattcagaagcagttgacacagaagcatctgaacaaatgaaccagagaactgctgttgattccagtgatgatctggaggcattgggtcggcctgagaatgcatgacctgctggttaagccaagatgaaatggccatacatggcagaagtactctgaagtttgttcttatacctatagacgacaatgatcacaaaacagagtgcacatttccctgagtgatatgcagcagctcctcgaaccacaattttgtatgctggaggcttgagcgtcaacatagtggaaattaatctactctgccgaagctgttcttagatccaaatgttcattgcattgaagttcctggactcttggctctgttgtaggtccaatttgtggtgaacacaccctttcatgtttttatgtaactataatttccgtaagtgaagattagttcatataaaaaattatattcagagcaaagagtgaaaatgccatgagcgtatggtgccatagaaaaacctgttgcttcaggtttcggcagtcgctggccttcgagagagaatttatcacctgtacaaacgtgaattgtaagccagtttttttactttatccaagc

SEQ ID NO: 32018 - DNA, 2553 bp, Zea Mays
gcactcagaacttcaaaagtgtgaagcaaacagtgaagcgattggaagaggttgcggtttcatcacgcagggatgagagagttcaagtgctaaggcgctggctcggagccctacaggaggttgaggctgaagttggaggttcgggtgggtctcagaggcagaatgtctcttcaagcgagccaaactcttcgaaaccatcattggccaaagtgtgcatctgcctaccagatttcatgttcttggctcttgggttttgcttaatcatgcatgaagctcactggctttgtattgtcatttatagcatataggctccacacttatgtgatattcttatttgggaaatttggatccataccattaaaagatcaccactttggatccataccattactatctcacttacatgtgggtccacatgagtcaatgacatgtggggtccatggtatatatctaaagtttggatcttttaatggtatagatccaattgttccttcttattttcatccataagaacatagtagatacaactctgcaggttttgttttatgatgctgatattggagggcctcctatgaacttccgagatatattcctttatagccacgcacttgagggtattacgttgtccatgattcttgaagctcctaaagaagaagaggtttcccttcttctagaaattttcggggggcaaagaagttaataatgctatagtgagcagtatacaggacctggcaaagtcattctcaaattaccatgatgaggtcctggtgaaacgtgaagagttacttcagttcacacaaagtgccatttcaggtctaaagaggaatgctgacattgtgagattctgaagctctagatttgtggaagaaactacatgagaaggaggcatcacgagctcaatcaattggcgatcctgataaagttacagaaaagacttcaactattgagtctttcaaagaagcactcaacgaagtccgattttgctctagaatggaggaacttctattgaagaagaaaacaattaatactggggattccttagagatccactcccaaaaggttgagaaattaaaggtattggcgacttcccttgctaattcatcctccaaggcagagaagcgtattttggatcacagacgccagaaagaagaggctcttaactttcgtgctaaaaaggagaacgaagtgattgctgttgaaaaggatttgactgctgagatttctgaattggagaagcaaaaggatgaacttgaggctcagttaaagaaggtcaacatttcactgaatgctgctatttgtcgactaaagcagacaagagaagagagggaccagtttcatgaagcaaacaatcagatgatatttactttacaagcaaagaatgacctgtcaaaatctattgactcatgtaacatggaggccagtgtagtcaagacttgggtaaatttcctcgaggatacatggcaacttcagttgtcatacaatgaacagaaggaaactaaaacgaatgacgagctggagagatgcacaagcagttttctgaagttgaccaagcatcatctttcctatttcaaggaagttcttagcccgtcaattgagcggatacgcacatacgtggataatttggcagtcttaaactctagggaggagtcaatagaacatgaaggggatgatgagatttctgtgcagacaagtccacaaaagtcccttgaggaggaatatttggaaactgaaaagaagatcgtgattgccttcagcattgtagatcgcatgaagaagatgttttattctgagcaagcggctaattctaggcaagatgatgcagaggtcaggaccttattttctgagattgagaaactgaaggaagtgtttgagtcggtagaaaggccgacactagacattgaagtccgcaaggcaaaggatccaatgaaggacaagtctggatcgaatcgttcagccaaagacaaatctgaatcgagccattcacctgttcaggtgccctcttcacctaaagatgtgcccgtggagtctccgaaatctccagtgaaacctgagcagacgatggacccagattcagagtttgcaaagttagagctagaattcggaaaagttaacagagaccatgaggagataggcggttgggatttcgacgagcttgaagaggagctgcgagctgacctatctaaatcaaccaatccaaaataaccacgctcaacccgacatctctgaacgcgcattccacctaactttccttgtgctggcttcttctgaaaatttgtagactttgaattgttgaatgtacatagtattgttgtttcattgtgtccatggacgttctatagattatactcactacatgggaggtggagattgttacactgtagactgacatttcattagcttatttgtttggtcttgtcatgtgcattcatacatgaatgaatgaatgataaacattatgtagcattccacattttggacattggaacatatattaactataacgataaaatgctcttggtcttggatgtccctgccaggttttaattaagcaga

SEQ ID NO: 32019 - DNA, 2955 bp, Zea Mays
tctcccccaagttgttgtccatgtacctgagacaccttttctcgccctccatgcacattgatacagccgtctatgcaagcagtttcacaagaacctccacctgtgcctgacttcggtcaaaatttttgccctcctatatatccatttggcaatcaactattagactttgctgctggagttcctttgttttccctctattgtcttcagaccaccccttctccatcacctccgaagtttgcttcaaaaacagtcatcacatgccagtctatcatggtaaccctccaggagcaatcgtgcttaagaattgcttcattcttggctgatggagttgtacccaatcgtggtgccatattgccagagtcttcaatcaacagcctgacattttcacttaaagagtttgatctctctgttccattagatactgatgaaatcgcaaggtgcagtggaaccaagaatactaacccccaatcatcattttcgggtgcaagactgcatgtggaagacctatacttctgccagtcaccatcaactaagtgtccattgctaaaccttgacagagatccagcttgcttccttctgtgggaatatcaacctgttgatgcgagtcagatgaagtgggctacttggtcttctcacctaagtctctcacttgaaacttctagcacttcaaatggacagagagcagtcagtgattctaatttgtggaaatgtattgaactagatgatatccgatttgaggtagctatggttacagcagatggtgggcctttgttggatgtaccacctccagagggtgttgtaagaattggtgttgctttccaacagttcaagtccaacacctcagttgagcaattgttttttgtgttaggtttttatacttactttggtcaagtagcagaacgtatctcaaaggtcagcaacgctaacaagtctgagtcagtgaagtcatcggctgacaagtcggagaataaactgccaagtgatacagctgtgagtttaactatgaataatctccagctcaatttcttagaatctttgtcagcaagtgatgtacatatgcccttggttcagtttggcggaggggatctgttcctgaaagtttctcaccgcactctaggtggtgcctttgcagtcacgactaatttgatgtggacaactgtttcggtgaactgtttagaaggagaaagtgctattgtttgtgagcatggcactgcagtgactggtgaacacagcattttagtgcatggaaatgggcaccccaagatgagagctgtcttttgggttgatcataggagcaaacaccaggttaaagaacctcagttccttgatataaacatcactcatgtaatgccttacgatatccaggatatggagtgccatagcttgaatgtatcagctaaggtatctggtgttcgtcttgggggtggaatttcttacactgagtctttactgcatcgatttggtatcctgggtcctgatggcggtccaggggaaggtctcttgaggggtttgaaggatttatcttcaggcccacttgcgaagctgtttaaatcctctcacctcactgaaaaggaagatgaaaggtccaaaattgatgatcacaattcaaagtttgatctcggggtgccagatgatcttgatgtatcaattgaacttagaaattggctatttgcacttgaaggaactgaagaagtaggataccttttttctcctcgtggaggtgatggtatcagtagagaagaaaaatgctggcattcaaccttcaggaatctacatatctctggcaagagcagtgaccgacttaaattgggaggcagaagaaaggtgtcacccgaaaaggcatttccagtggaacgctttacggctggaattgaaggtttgcaggcaataaaacctcgtctgagagatcagtgcactaaaaaaggaccatcaaacaatcatgagatgggcagagattttaatagttcaagttctgttggtgaccatggagttgatgtcgaagctaccatggtcattggcgaagacgagattgagggtgccaaatggacaatggataatgtcaaattttctgtcaaagaaccaatcgaggcggttgcaacaaaagaagaactagagcaccttgtgatgctttgcagatctgaggctgatgcaatggggaggatcactgctggaattcttcgtctccttaaacttgacaaatctcttgggcaaggaactatagaacaactacgtaacctaggaagtggaggcatggacaatatcttttcacccaggaggctcagcaggcagaacagttttggtagcataggcactcctcggactccaactatgcaagccattgcagacgtcatgggttcgaaaaccacactggaagcaactatttcctcattacaaggcgagatttccgaatccaaggccaaatgtatggcactgatttctcaggcaagcagcactgaggatcaaaaccgtgccgaggacatcaggcagcttagcgaaaagctcgagagcatgcaatcgttggtgacacgattgagaactttgatcatttgatctgactatctgagttgtgcatggttttttttgtgtacagtacacaaggtcgttctgttcaaactcggaagtggcaaatgctgcttcctggtggctggttgagttattcttttgtgtacatttatatatcttgggaggcggtgtgtaaagattaaggggggtggaataatcggttgataggcagctggaggaaattttgtaggcagctggtactggcaaatatgctttgtagcacggcatcatatgatcaaacgggtcactaagaagagtgcagtgccatttatatcattgtatgtataaaatgtgcacagaacgtgcttttcgcgcacaaaaactttgttcctcctaagtcactgaagtgtttatatgccacttgtgtcaactatcgaagtgtttcttgccgtg

SEQ ID NO: 32020 - DNA, 697 bp, Zea Mays
cacctcctgcagcattgggtcgtcgcggattggctagaagtcatggctgggcaacacctcgtcggtgccattgctgatgtcatttgtgttgtcgtggagggagcgatggtgcccagggcggtggcggattgcctcctccagcgggtccaaggcgcatcaaatagaatagctcgtcggccctgcatgtcagtggcgatagagacgacaaggccctagatctgcttgcttctcccacagctgcctcccaccatcaactacgacacgttcatcgtggcgattccgagcttgcttcttccgacactgcctcccgtcgtggctcacaaggacgaaaagaagcgtggcaaacaggtcggatgtgcacgctctagataattgggggagactttccctcacgtaaatatgcgggacgaatcgccagagaaatgtcgcagcaaaaaaaattgggaaggttgtgggatctgttggaggcggagaaaatggagcccccccccaaatgtttttccagtgagttttggtgtcgtttttatagttgctctaactatttaacatccctaaccactccttttctctctcacatgcacccctcctcacacacacatctaaggctattcctagtcatgattttatttgaattttgtttttatcaaatgacctgtcattcgacaagtacaatgatatgacaaggatttaataaaga

SEQ ID NO: 32021 - DNA, 3414 bp, Zea Mays
tgtaagtatgattaatggaacccaagattgaagctaggaaaaaaaacaaggaactagagtacaaagaatgatttattagagacaaaaatctaaatttcttctaatatttatactatattaaagcaccagtttcaacggtcgtcccgcgtcaatatttttcaaaaaaatccctatatttatttagaatcaacccgcactcctataatctcttctctactactataataaaagagtttatgtaaaaaaaagttgaaattatgtataagtgagtgtttgaaccttggttgttgtctccacatttacaccaacctaatcaatagaaaacatatattttgtgctttattaaaacaaaatttattctatgtcatacatatatataaaccgtagcaatgcacggacatacgactatcatgatgtaatctctattactcaccatttgtcacggtttcacaattgtctcttttgcaaaaaaagtttctatacttctttctgtacccgtagtccaattacaactatttttgttctctatctctactactgtaatggaagagttttgtgtgtcgtataatttttgtgcatccttagccaacaccgcctccctcccccggcctgtcccgcacggtgccgttatcccctgcccgcgatcgtcgcccctccacccgcccgccctctccgcacggtgtcattatccccgcctcgctcgcgtatatacccataaccatgcttcattgtatctgtgcgtattgcgacggaggcggatgagcaggcggagcaacggaggcctctattccccgattggatctgtgtgcctccgacctgttgttgctctcacggcgagacgcagatccaaatgcaggtccgtcccatcgaatcggtcatcttccttcctttgttccccaattggatccacagggggtagaggaaccccgccggtgtagtggcccgagctgctacaagccggctatgcaccagacatcccgccgcggctcttggtgctggcggcttcacctgcgctcatggtcgacgcgccgtccccgcccccgccatggtgcccgagctccaggccgaggcgcccgtgccgaccactaaccccttgtctagctccctcctcacgaccccaaagtcgtccaagtccgccttcgacatccccgagggcgtgcagtggcgcaacaacgagttcctatccgcataaagcgtggaaaggtcgagcacatgcacttcttcaaggacggcagcctgctccagctcatggtcgtcaacggtcgtcgcgcggaaaggtgttttgtgaaatattttttctcgaatgactataaaatattacgagacactgtttatggtgtattcaagttttgtttttcttgtattctgcttgagatgatgaatacataaattgtccctgttactcttaagaatgaacatctaactgtcccaaatcccaatgccaaaaaaccataaattatcctaacaggataatgttcaggtagtcgatggcttggcatattaagttttatgatctgaaggatgtcttcatctgaagggccttgcctagaatgcctgtctagtgatcaatcagacactgtttatggtgtattcaagttttgtttttcttgtattctgcttgagatgatgaatacataagttgtccatggtactcttaagaatgaacatctaactgtcccaacgccaaaaaccataaattatcccgatgggataatttgcaggtagtcaatggcttggtatattaagttttaagatctgaaggatgtcttcgtctgaagggccttgcctagaatgcatgtctggtgatcaatcagagtgtcaggttgtctaagactgggaatttagagaagtaaagtagtgcttattctgaaagaaaggtttcatgactcggaatcatcttcaagaaaaatctcttatttacatggtgttatctacttgcacaagccatgttgttgggtcaaattactactttatgaataattcctcttattctatgaggatataattcctagaagggccatcatcatctctgtcatagataatcctgtgaagggagcatctggtcaggctttgcaaaatcttaatctaatgatgggactgcatgaaaatattgggctgcaataccagcccacgttcccctaatcttttgtgtcattatctatgattacaattaatttaggagtatggaaaccaatttcttgttactgtcaacagacggcaataagcccctcattagaattcaatcaaatcaaagttgacagttagtatagcttggtatgtattgttttggctttattaaaatattaagagaataatgataatgacaatttagcagtacaatggtagtattatgtgggtagcttggttccactaaaatcataagcctatacacatcttgttcctgcaatgttgtttgctattttaatcacgaaatcaatattgagtttgaatgcagttctgaagcagctatccttggcatcactggatataggtatggtgccttttttattgtgttcaagtcaaagtttagcccattacagttgtactttgagaggattggaatgtctcttagtataattctcaagtctcttagtatgattctcaagttttatcttatagctgcatggatccatagcattgctataaaaagttaattctctgatagttgttgttaaaccaaactatattgggtttgttgggtgttttgacagtctatatatgcttcgtgtcctccaatcgctggacctttgtctcactatattgtcttaataggtcgcacaaacagaagcaagtactcatatgctcctaaatctggtgtgaggtacgacgggttttacagaattaagaagtgttggaggcagtttggtgttcaggtaacttagctctcctcctgtatacagattgcagatgtagctatactttcatattatgcagctacttgtcacctacaaatgaagctaagtgtaagagggaagagcggaacaaacaacaacataaaaggtgaactaagatgaccaatcatttagttgaaaagctggttgttagttatttgtttgttggacgtgaataaccattcttgtgttgctactgcttactttgataatatattttttttgttttttttctatgcttccaactcatactatctctccttgtttatcctatccaggtaaaggctgatgtttttaagaaagttgctttaaactctatattgaatctgaaggtagcgttagatctgcccttacttttctttgctgtggtgtttagcaaccagtacttggaaacataaggagggtgaacattttcttgctgtcttgaggaggcttgtgagatttcttgatggttggattgaaacagaaaacgttgagaatgaaatgccaatttcctttgttgtctcaatccattcctaggctg

SEQ ID NO: 32022 - DNA, 6199 bp, Zea Mays
ggacccccccaagccaaggtgacacgtccagctcttatacaggacaaccacacttcacaggaaaaaacaaggcgtgaaagaaagaaccgattttgttctgtttaaatggcatttccggagaggtgttgtgctattcatttgcgtcttgtgaagtgattctagttcagagaaagaaagaagttgagaatgagaagcaagtgaggcgcgtttgctgggaagtggttcttgtgaggtttaggagttcacccttcttttcttccccttctagaaatggagatggtcctacggtcgcagagccctctctgccttcggagtgggccggtgctcatttttcgaccaaccgtcgcgggcggaggagggggcactcagtctttgttgaggactaccagatttgcgagaagaagggtcattcgatgcgttgtagcaagtccaggttgtcctaataggaaatctaggacagcgtctcccaacgtaaaagtagctgcttatagcaactatgcgccaagactcctcgttgagtcaagctccaagaagagcgaacaccatgatagcagcagacaccgtgaagaaactattgatacatacaatgggctgtcaggttctgatgcagcagaattgacaagtaatagagatgtagaaattgaagtggatttgcagcacatttctgaggaggaattgccaggaaaagtatcgattaatgcatcattaggagaaatggaaacagtggatgaagctgaggtcgaggaggataagtttgaggtagatacctcaggaattgtattgcgcaatgttgcagttcgggaagtggatccaaaggatgaacataatgctaaagatgtatttgtggtagattcgtcaggaactgcaccagataatgctgcagtggaggaagtggtagatgaagctgaggttgaagaggatatggttgatgtggatatcttgggacttgacttgaataatgcaacgatcgaggaaattgatttgatggaagaggctttactggagaacttcgacgtggattcaccaggcaatgcttctagtggtcgaacctatgggggtgtggatgagttgggtgagctgccttcaacatccgtggattgcatcgccattaacggaaaacgtagaagtttgaagcctaagcccttgccaattgtcaggttccaggaacaagaacagatagttttaagcattgttgacgaagaagggttgattgctagttcatgtgaagaaggccaaccggtggtagattacgataagcaagaggaaaactctaccgctttcgatgaacagaagcaattaactgatgatttccctgaagaaggcatatctatagttcacttccctgagccaaacaatgatattgttggatcctcaaaattcttggagcaaaaacaagaattggatggttcttataaacaagatcgatcaaccactggattgcatgaacaagatcagtctgttgttagttcacacggacaagataaatcaattgttggtgtgcctcagcaaatccagtacaatgatcaatctattgctggttctcatagacaagatcaatcaattgccggtgcacctgagcaaatccaatccgttgctggctatataaaaccaaatcaatctattgttggttcttgtaaacaacatgaattgattattcctgagcctaagaaaatcgaatccatcatcagttacaatgaaatagatcaatctattgttggttctcacaaacaagacaaatctgttgttagtgtgcctgagcaaatccaatccattgttagtcacagcaaaccaaatcaatctactgttgattcttatagacaagctgaatcaattattggtgtgcctgagaaagtccaatccatcaccagttacgataaactagaccagtccattgttggttctcttaaacaagatgagcctattattagcgtgcctgagaaaatccaatccattgtccattacactaaaccaaatcagtctattgttggcttgcccaaacaacaacaatcaattgttcatatcgttgaaccaaaacagtccatagatggtttccctaaacaagatctatcaatcgttggtatctccaatgagtttcaaacaaagcaactggctactgttgggactcatgatggattgcttatgaagggtgtggaagctaaggagacatctcaaaagactgaaggggatacacttcaggcaacgttcaatgtcgacaacttgtcacagaaacaggaaggcttaactaaagaagcagacgagataacaattattgagaaaatcaatgatgaagaccttgtgatgattgaagaacagaaaagcatagccatgaatgaagaacagacgattgttaccgaagaagacattccaatggctaaggttgagataggaattgacaaggccaaatttttacatctgctttctgaagaagagagttcatgggatgaaaatgaagtgggaataattgaggctgatgaacagtatgaagtcgatgagacatctatgtccactgaacaagatatccaggaatcacctaatgatgatttggatccacaagcactatggagtatgcttcaagagcttgctgaaaaaaattattcgctgggaaacaagttgtttacttatccagatgtattgaaagctgattcaacaattgatctctatttcaatcgtgatctatcagctgtggccaatgagcctgatgtacttatcaaaggagcattcaatgggtggaagtggagatttttcactgaaaaattgcacaagagcgagctggcaggggactggtggtgctgcaaactatacattcctaagcaggcatacagaatggactttgtgttttttaacggacacacggtatatgaaaataataacaataatgatttcgtgatacaaatagaaagcaccatggatgaaaatttatttgaggatttcttggctgaagaaaagcaacgagaacttgagaaccttgcaaatgaggaagctgaaaggaggagacaaactgatgagcagcggcgaatggaggaagaaagggccgcagataaagctgacagggtacaagccaaggttgaggtagagacgaagaagaataaattgtgcaatgtattgggtttagccagagctcctgttgataatttatggtacattgagcccatcacgactggacaagaggctactgtcagattgtattataacataaactcaagacctctagttcacagtactgagatatggatgcatggtggctataacaattggattgatggactctcttttgctgaaaggcttgttcatcatcatgacaaagattgtgattggtggtttgtagatgttgtcgtgcctgaaagaacatatgtattggactgggtttttgctgacggcccaccagggagtgcaaggaattatgacaacaatggaggacatgattttcatgctacccttccaaataacatgactgaggaagagtattggatggaagaagaacaaaggatctatacaaggcttcaacaagagaggagggaaagggaggaggctattaaaaggaaggctgagagaaatgcaaaaatgaaagctgagatgaaggaaaagactatgagaatgttcctggtttctcagaaacacattgtttacaccgaaccacttgaaatacatgctggaactactattgatgtgctttataatccttctaatacagttctaactggaaagccagaggtttggtttcgatgttcatttaatcgttggatgtatccaggtggggtgttgccacctcagaagatggtacaagcagaaaatggttcacacctaaaagtaacagtttacgttccacgagatgcctatatgatggactttgttttctcggagtcagaagaaggtggaatttatgataacagaaatgggttagactatcatattcctgtttttgggtcaattgcaaaggaaccacctatgcacattgtccacatcgctgttgagatggcaccaatcgcaaaggttggaggtcttggtgatgttgtcactagtctttcacgtgctgtgcaagatttaggacacaatgtggaggttattcttccaaagtacggttgcttgaatctaagcaatgtcaagaatctacacatccatcagagtttttcttggggtggttctgaaataaaagtgtggcgtggactagtcgaaggcctttgtgtttacttcctggaacctcaaaatgggatgtttggagtcggatatgtatatggcagggacgatgaccgccgatttggcttcttctgtcgttctgctctagagtttctcctccaaagtggatcttctcctaacataatacattgccatgattggtcaagtgctcctgttgcctggctacacaaggaaaactacgcgaagtctagcttggcaaatgcacgggtggtattcaccatccacaatcttgaatttggagcgcatcatattggcaaagcaatgagatattgtgataaagccacaactgtctctaatacatattcaaaggaagtgtcaggtcatggtgccatcgttcctcatcttgggaaattctatggcattctgaatggaattgatccagatatatgggatccgtacaatgacaactttatcccggtccactacacttgtgagaatgtggttgaaggcaagagggctgctaagagggcactgcagcagaagtttgggttacagcaaatcgatgtccccgtcgtaggaatcgtcactcgcctgacagcccaaaaggggatccacctgatcaagcatgcgattcaccgtacactcgaacggaacggacaggtggttttgcttggttcagcgccggactctcgaatccaagctgattttgtcaacctggcgaataagctccacggcgtaaaccatgggcaagtgaggctttccttgacctacgacgagcctctctcgcatctgatatacgctggctctgacttcattctggtcccatctatatttgagccttgcggcctaactcagctcgtcgccatgcggtatgggaccatcccgattgtccgcaagactggagggctcttcgacactgtcttcgatgtggacaatgacaaggaacgagcccgagatcgaggccttgagcccaacgggtttagctttgacggagctgatagcaacggtgttgactacgcgctgaacagcttggttcgatgcccggagctggttccactccctttgcaagagagtcatggagcaggactggtcgtggaaccgacctgccctcgactacatcgagctctaccgttcagcgtccaaattgtaataatccaaccaacggccaatgtagtgtgttgtctgcaggtctcagatgcagccattcagcttttgcaggttcctgggcattgctgtacagcctccttgtctttagttagctccattccccgaggagcacagtgcaattttttatcctcagttattatgcatagattgtctcagtagaatgctttcttcgggcatgtatgtttgtttcctctgttgttgaattctggtgttaagtcgtgtataggaatctacaggaaatgaaaaagtccatttcctgcttcaaccttttagggctaccatgcacatgagacctttcaaatgcaaagaatattaggactagactactagtctgtgaactctatttttttccaaggatttctattttttcaaggaaaaataaactaatttttcttcggaaaatggaaatctttttaaaaaatggggttcccaaactagcccgtagagtatagatctagaattggtctagtggtttctcaagaaaaaaaaacatacgccttttcttgtcatatgcttatttaagtttattttgtacaaactttgagatccttcaaaaacaccccaatggctggtgtagtgaccagtgaaataaagaggatcaatggggaggaatcccccacctctctcccgcagatgtcacccagcaccggccaacctcacctgtccagtgaaattaaggttggttgcgacgacagcccatcaatggaaaccaacctcgccccgtgtcgggatctaccttcctcaccaccacgccgatctcaccttccataggagctacctaggcactgttacctattataggtacatgacattgtacatctttgtatgaacttacatcaatgccaaaaatccttcaaacatggactatacagtcataggagggtatctttgtcttctc

SEQ ID NO: 32023 - DNA, 1023 bp, Zea Mays
catggatatggattgtgaattctgcctcttgatggaaaagacgtcaacggacgtgttctaaaataatttgatttgcagcaaatactgtctaagttgcgtgatcagtaccagtattgcctttattgtggatgcaaatatgaatcactagaagtgctgtcaaaggaatgccctggtcctgatgaggatgaccattgatttgttgtgtgaaggtgacaaataattgtctttgatacaaacaggtgggagtggatggaaagccacaaggagcgtctgcatatgacatgctatgcagcaaaactgaagtggagctacatcttcagaaatgcctcatcgaggcaccaatgcacttcagagccagaagtgaaatgttgccggtggtgaacaagcaaactttgattttgatctgtgataatcagataacaattttgtatctgctttccaactgagcgagagagggggctatacttgtggacatctgctcaattttgttgtcagaagagaagtaagtctattttatgaaacttccactgtacgatgttggaatggaatatctgtacattactgtcagtcctgtgtgtcgtctaaggatccatgattgctgaataaatgcctggaaagggccacgatcactgttgaacatcacagaagacggttctccaacagcaatattttcagcttctacagcacaatcaaaccagtctttggaaataaaaagggaaggaatggcatgaaatagtgattggacataaaaggagatagaagcatcaaactttccaagacattctgtttcgtgcaattccaagtcttgatgctttatgtagaaaataaaacaatcatactaatagctggatttcagtcctcatggatgtttgcagttatttgcttgcttgtgttcttacttgttattctttgttttgcttgtttgatttggctaattgtaaaataatctctatctgagttggttaggtggcttgagtaatacttaagtcttgagtttgactctgatcgggaggtctgccttgt

SEQ ID NO: 32024 - DNA, 6546 bp, Zea Mays
tgcaggtacacaaaagtaaatgaactaatgactcgctgtagtgttggtacagaattgatgcccatcggtgaagaaccttcttctcttggctttgagaacactcttgcttttactggtcaaatgggccctgtttatgcattttccgatgctctctcccctgaacaaataaggggcatttataacctaggaccaagttacatgtactctttccttggtgatcagaatttgcttacaaatgatgactcacggtacaagggaatacttgatgcaaaggatggcatttcatcgaaaatgatttttggcttgaatgcacaggctagtaacaatcggactttgtttaatgtatcatctgcactggatggtcttgacaagagtaagtttgaggcaaccaccatgggtgggacaaaattatgctcccggcgcctgctgcaagaaataatctattgtgttggtggcgtttctgtatttttccctcttctgatccactttgatgatgctgtggttcagaatggagagtttgccaccagagatcaattggctggtcaagttattgagcttgttgcatctgttctagatggaaatatagcaaatcagcaacagatgcatcttctttctggattttctattttagggttcctgttccagtctgtttcaccgcagctgctaaatatcaagactctttcagcatcgaaatacatgtttactattttgaagacctctaatattctattgagagatgctctttcacagttttacttgaatccacatatctgggcatatgcaacctatcaagtacagagagaactttttttgctaaaggtttctcaacatgatatcagagctcttgtttcctttcttgaacgaagtcaagatgttgcatgtgttgaggatatactccatatgattatccgcgccctttcacagaactcgcttgtaccatctttcttggagcaagtaaattcacttggtggttgttacattttcatcaatcttcttaagagggaatttgagccaatccgcctattgggccttcagcttcttggaaagcttttggttggggttccatctgagaaaagagggccaaaaatttttggcctccctgtaggacgacctagatccattgctgaagatataaggaaaggggcaacagcagcacctcaactgtttttttattcaatatctgatagacttttcaaatttccactttcagatcatttatgtgctagtctttttgatgttcttcttggtggagccagtcctaagcaggttttacagaaacgttcccaatctgatgctttaaaagataggagcatggctcctttttttgtccctcagattctggtttgcatttttaaatatattcaatcttgtcgagatgcttcagtgcgtacaaagattttaagtgatcttcttgatttgctggattcaaatcctgtgaatgttgaatcccttatggagtatggttggagctcttggcttgaaacatctgcgaagcttgatgtacttaggaactacaaatcgaattctgtagccaaggctgacggtttggagaccaatgagctgattcttgtgaggaacatgtattcgttggttctctcctattgcatattctctgtgaaaggtggctggcatcaactggaagatacaacaaatttccttctactgaaaattgagcaggggcagttaccaaattcctccatgctccgagacatttttgaagatctcattggaagccttcttgagacatcttctgaagaaagtgttttcaattctcagccatgccgtgataatatcttgtatcttttaaatcttagtcatgaactctttgttgaccaaattggaattaaactcttgtttccttcacctgacatgtctgcacatttgtcatctgatgacatcaactcggcagttctagaaattatgaatactgagggcaatggtctgcttacaagtcttccttggagtaatatattatttaatgatggagaaaagttgactgatgattggtggagcttttttgacaagatatggacgcttctgtgctatttgaatggcaaaggccaaaccagattaacaccaaagggtttaaatacagctggaccatctattgggcaacgggcccgcggattagtagagtccctcaatatcccagctgcagaaatggctgctgtagttgtaacaggaggcatcagtagcgcattaggtggaaagactaacaaagttgctgacaaagctatgatgctaagaggggagagatttccaagaattatcttccatctcatcattatgtatctctgcaaagctggcttagaaaacgcatccaaatgtgttcagcaatttatatcactgctccctaatattatctctgaagatgatcagtgcaaaaatagactgcatttcttgatttggtccttactaagggtaagatcccagtatgggcaacttgatgatggtgcacgtttccatgtcatgtcacacttgattcttgaaactgtgatctatggaaagtctatgcttacaactaatatagtaggcagagatgattctactgaagcaaataacagtaaggaggctgggttcattcttaatcttgtacagaaggaccgggttctcactgcggctactgatgaggcaaagtacatgaaggatgcaattgctgatcgcatgaagctggtccaggaactccattctaaacttgatgaacgctcaattcaagacgttgaacaactgcaaagttttgaggatgatgtacagtttgccaagactgctgctatagctgcggacgacagtagaaaagcagctttccagctagcatttgacgaggatcagcaaattgttgcagacaagtggattcatattctccgtgctctgagtgatgagagggggccatggtctgctgctccttttccaaataatattgtgacatactggaaacttgacaaaactgaagataaatggcggcgccgactgaagctcaagcggaactataagtttgatgagtgcctttgtcatccatcatccatcaaatctagtaacgataatgctgccccaactgttgacccatctgctaatgccaagataacagaaaaaatgaagcacttacttttgaaaggagtgcgtggaattacaggggatatcagttctgaatcatgtgaggatagcaacgacatgattgatcctccccagaatgtcccgccagagaaccacactgttagtgatacttctgattctgcagattcctcagattatcctgctattgttcaaaatagaaaagaaagttcatcaaccagtagtgataatgattatatcgaggtgctatcatcagttcactgtgttcttgtaacccccaaaagaaaactagctgggcaattgactatcacacgaaatgccctacatttttcttttgaatttctagttgaagggactgggggatcatctgttttcgacagatttcatgataaaaaagattcagactccaagaatgagatgggaggtgtggaaaaactgaagggcaatcttgatggaggacgaggcaatgctgctgaatctagcgacactcaaattaaaaatcaatctggtaaaatcaaacaccatagaaggtggaaaataactaggataaaagcagttcattggacacggtacctactacaatatactgccacagagatattctttgatgatgcaaacgcaccagtatttcttaacttttcatcccaaaatgatgctaaaagtgttgggtctcttttagtttccctgaggaatgatgctttgttccccaaaggaacaaccagagacaagaatagtttaatttcctttgttgacagaaaggttgcccttgaaatgtctgagagtgctagggaaagttggagaagaagagaaataagcaactttgagtaccttatgattctcaacactcttgctggacgatcttacaacgatttaactcaatatcctatatttccttggatattggctgactactcttcagaaaagcttgattttaacaaatcatctacattcagggacctttcaaaaccagtaggtgccttggatgcaaagcgctttaaggcttttgaagatagatatcttaattttgttgatccggatataccaagtttttactatggatcccactactctagcatgggaattgttctttattaccttctaaggcttgagccttttactgcgctgcaccgcaatcttcagggtggtaagtttgaccatgcagatcgtctatttcagagcattgaaagcacatacagcaactgcctatcaaatacaagtgatgtcaaagagcttatacctgaattcttttacatgcctgagtttcttgagaattcaaattcatatcaccttggcataaagcaggatggtgaaccattaggtgatgttggtctccctccatgggcaaagggttccccagaagaatttattcatatcagtcgagaagcccttgaaagtgaatatgtaagctctaatctacatcattggattgatctcatatttggttacaagcagcgaggcaagcctgcagttgaggcagcaaacatattttattatctgacatatgagggtgccgttgatttggagaacatggatgatatgttacaaaagtccgctattgaggaccaaattgcaaattttggacaaacaccaattcaaatttttcggaagaaacacccaaggagaggtcctcctataccaattgtgcatccactatattttgcgccacaatcgataacagtgacttctgttgtcccgaccatagtcacccctttatctgtattattcattggtttgttggactcaaacgttgtcatgatgaatgaggggctcatactctctgtaaagctttggctaacaacacagttgcagtctggtggaaacttcacattttctggatcactggaacctttcttcggaattggttctgatgttatttctccgaggaaaattggcacttctttggctgaaaatgttgagtttggaagacaatgcttagcaactgttcaaattcgtggtgacaattacttaattttgtgtggtaattgggagaatagtttccagatcatatctctaagtgatggaaaaattgtgcagagcatccggcagcataaagatgtagttagttgtgtggcagtttcatctgacggaagtgtgattgcaacgggaagctatgacacaactgttatgatctggtatgcatttcaagggagatcaaatgacaaaagatataggaatgcaaattacgatctatcaactaaggatcatgtcatcattgaaagcccttgccatatcttatgtggccatgatgatattatcacatgcttatttgtcagcacggaattagacattgttatcagtgggtcaaaggacgggacttgtatgttccatacactgcgtgaggggacatatgttcgatcgattcgacatccgtcaggtgctggtttgtcaaaaatggtaacatcacagcatggcaggttagtgatatactctgatagtgacctttctttgcatatgtattccataaatggaaagcatattgcttcttcggaatccaattgtcgtctcaattgcatggagctaagttgctgtggagagtttatggtatgtgctggtgatcatggtcaaattgttctccgctccatgcattctcttgatgttgtttggaggtacgagggagctgggaaaacaataacttccttagttgtgactcctgaggagtgcttcttggcgggaaccaaggatggtagcttgattgttttttcaatagaaaaccctttgcttcgtaaaaacgccatgcaacggcacaaggcaaaaccttccattggtggttagaggtgtagatcaaaacagtaccagaacttcttgctgcatttcaaataaaggttatcaatccgcaataattataacagagaagattctataactcctgtataaatgtacatacgtcatcagatcgagtttaccattctgaagagtgcatgtgccgatcacaatcaagaggataattcttctaactgcaaaacacatactatggtaactaaagtagattgatgtttcatgttcaagacaagagcaaggggataggaccttcaatatgatactcttgatatttgtagggtggtagctagttagtaatgggggtgcatttgagtgtaatataaacttattttgtgggggcattcttgctagataagagcgagccacagttttcctagatagaatttttaggtaaataggttgccactgacctgtaactattaatctgaacattgtaaatggaactgatgcgggttcataatagaaggcttgcaactttggaaaagatataattaaatcttatgagccgtctgaatttgtcactgaaaagctactaatgtgttgtatgagtgcacaacttgatgttgatttatcgttcgaacatggtagcgtcaatttcacaagcctaccaatatttcgagataacagttacaaaccgatactaatttttccctatttcccatctcgtcctactatgagctacttctgttcaaaaaaaaa

SEQ ID NO: 32025 - DNA, 1452 bp, Zea Mays
gaaattaagaaaaaagggaagaaaggttatcttctccggttctccctcccctccctgtccggctgtcccctcgctgtacacagggtgtctgtcaccgagcagcgggcagccggcaggcaatgcgatgatagtagctgctgctgcccctgcgccgccagttccagcaccgccgggcaaaccgcccttttctctctcctcctccagctcctccttctccctccgccgccgctccttcagcttgtggttctcaaacggcaacgcgcatggaagagacagcgccaccgccaccacgagcagcagggcgacgaggaggtggtggtggtccgatcccggcggcagccgagaagactacggctcctcttctctagaggaggaggacgtttacgattacgaggatgaggctgcgttccccagatttggaggggccgcggaactgttcgatgagccctggttctccaagtcagtcggccatatcgtttctgcttgacgctgtatggggaaggaggaaaggcaaccgcgacgacaggaggagaccattccaagaggaagattaccctgaggacgccgctggctttgcggcaggtggtcgaggcaatggataccgcagccgcagcagcagcagcagcaactattatgaggggagaaggaggacgagcaactaccagtcaagtgtttctaacaattttgctggtgctgcctcaactggtgttggagctgacgataacaccaagagcagcagcagtggatatggaggatgggatgagcttctggacaacgacactgctgctcaggagacaaagaggaggagctcattctcagctggcaccactgatcgaagcacaaaatcgcagccttcagcgactggggaggaagatgcagattatactgccactccttcaacaagaacgagaatgagacgacggcggacgccaggaacgatggggttgggcagtaccatgtacaagcaggcaccactcgtgatgcgcttgttggtggcagtcttcccgttcctgggatcatggttcaggctgctctgaattgattgttatatattcgtccacggtggttcgtttatgatttcagaaaaaaaaagatatatatatataagtggccagtggcattaagcaaaggattatgattgtgaaaaatatataagcgtagtgaagaagatcgattggttcaggcagtgtgcctgcagcatcagctctgtactgctgcatccgccattgcgaagggaaagaatcacagcatctgacttgctggtgcatgtgtgaacctttgcttcctcgcgcttgtgcagctgataatatgtttgtggtctcggtgaacattaactaattgtgtaagtggccagcgtagtgttgtgttgcttgtgtgtgtggtgtaagtgatgttgggttcttgcacccattcttcctttttaatataatgatgatacagatatctttcttt

SEQ ID NO: 32026 - DNA, 1909 bp, Zea Mays
gtaatcttcccacctgcctcggcgcctcctccctctctcccaacctcgcccgttctcgcctcgctgttctcctctgtcacctctccctgagaagcgtggctcctgcaaccggcctccccacctgctcctcctctacgcgccgagcaccacacgacgcgacacaaccgagcacggccgctccgccactccactgcttccgcggtggcgccgcttcactcccgtgctgcagcgagcgttacggagatccgtggggacatgaaccagggtttctcctatctgttggtgaacataaagctggatccagaccacagaatgcatgatattatgcaccattgcacacgtccccagagagttcagagttcccagtcatagatgccttttactgcgtgtcttgacaaaatgaacagtacccagtgcccttgaaatgtgctaggaatataaaggtgacagtgaaactggacagagttgtagaagatgctatctggtcgcaaatctactattcatgcagcagactttacactggaattttgttgtgagcaaaggaaagaggcccatggaaagtttcatgtggttacatttcaagttggctgcctttttaggatctaattgacatcagtatgcacatcagctgataaagaaaggatgtgatccacctctaatacttgctagctggtcaatgtaaataagcctaagtcagtgataaaaagttcccctctctcctgggattgcttatgtagtcacatgttttcacgcttttcagttacatgttactatcaagctacttgtgggtttttagagaaaaagatatgaactaaatttatcagtggtcctattgaatatggagctactgttatatgtcattgtctcatgcaaatgatggtggctgtaagttgtgattgaggaactccattgtctgagaaatggatgaaacaccaactagttctgggcaatctgaagctagttcatgtgaacctaattggtggcctccagacttcttggagaagatacagtctgcttccataccaaggaaacatgatgttttgggtaatcaaagttcctcatcctggaaggcttctcaattactgtggtcaacaggatcttattcagggttaatccctaatggtttctattcaatcatcccggataaaaagttgaaggagactttcccaactattccatcactagatgacttgcaaactcttgaagcagatgggcttaaggctgacataattattgtagacactgagagggataagaaggttttcatgttgaagcagcttagtgctgcacttgtgaaagggttaagctctagcccagcattagtgataaagaaaattgcaggattggccagctgattccgttttcagctaaggctatatttatatcgcacatatctgctgcgggtgaaagcgactcagctgaaaatgactcttgtgattctcctcttgagcccaacagcccactttatggattgtctgataaagttgaagttgaaggaattgaatcttcatcatatctatctggacgatcactgcgtaatatgatgttgagatcaaggacattctctgaggggaaattaagcacgtcatgtagtgaaccaaatatagcaaatgccttttggaggcgcagccaaaggagagttgccgaggaaccccgtggtgctagttccagcctttattgctgagatgaggacaaaaggatatttcaaattatggttgaacatacaattctaggtgctgttcctaacgatagccctgagcatccattaatgagagcaaggggaagatctatacttggtagtgagaagcaatcatttcaagaatacacagaatctggagctgcttcaaggcactctattctcagtttctccccatcattcatggaacacaacagcatcaggaggagccag

SEQ ID NO: 32027 - DNA, 683 bp, Zea Mays
cctacaaatgattcattaccccacaacgtgccagctggaactcatctgattgaggtctcctcaattggttacttcttttcccctgtccgagttgatataagtgcaaggaatcctggatatattcaagcagcattgactgaaaccagaagggttctgaatgagcttgttctggaacctctgaaagaagagcagtactatgaggttagggagccgttctccatcatgtcacttttgaagagccccatggggttaatggttggttttatggtcttaatggtctttgtgatgcccaagatgatggagaacatagatcccgaggagatgaagcaagctcaagaacaaatgaggaacaaccctgtatcattctctggcttgctcgccagagcgcagggctagagaagtagactgtagacatgaggatactgcaaaggtcaaacattctagaatgtgaatctttgacaccttgcttagtcatcatcagaccacggcggactgtggacatttttagacttgtgtagtgatgcgtcagagacctcgccaggatggacagagggatacccatgcaaatttgtgcacttatgcatccagctaggggtgtaatcggatcgaatacagagtatccagccatccgattcgtatccaacacatgtcagcgaatatgagtaatttttttaaaaaataaa

SEQ ID NO: 32028 - DNA, 1129 bp, Zea Mays
ccaaccctcccgacgaccaaaactctccccgcggaataaaagaagagatattttttttgtcacgccctcggccctccccgcggaataaaagctttttctctggcctcccttcctccgaatccatccatccatccatctattgtctcccttccaattcgatgcctttgtagcgctgctgcctcgccgcgtcgtcgcgggtccccgatttccgcttgctgctgcgcttccaacaccatggacggcgggggatccggcaatgcctccggcggcagcggcggcgcatcgacgtgctgctactacgcgctcctcggcatccgcaagaacgcctccgccaccgacatacgcgccgcttaccggaggctcgcgatgacatgctcacacgttccgatctattgccgtgggcgcgcagaagtggcacccggaccggtgggccagcgaccccggcgcggccggcgaggccaatcagcggttccagcggatccaggaggcatactccgttctgtcggacaaggggaagaaggccatgtacgacgccgggctcttcgaccccctcgacgacgacgaccaggatttctccgacttcatgcaggagatgctggtgatgatggatagcgtgaaaaacgagaagccggacacgctggaggacctgcagaagatgctggaggacatcgtgaagggcgacggcgggggcgggagcggcgcaggcgggcgggcgccgacggacggtgctcgacggacgcgcgttgcgccctacccgcagccgcagcgtgcgcgcaggtgaccggcgagcccgtgtacgagcgacgtacgcttcccttttggcgaaagggaccggaccccagcaacggacgggaggctctggaaaagaagaataaaaagtttcacctttctttttagttttaggccatcttcggatggtaatctacgcatcctttcatgtagcagtggtcgattgtgtaagctggggtttggggttgggtggtggtggtggtggataccggctgcgccgctgcaataacttgcggacgcgcggcggggactctgatttttttttatctcggcgacatttcgatttcgtgcccaattgtcactgaagatgatcctgactgttccattgccatttttgctc

SEQ ID NO: 32029 - DNA, 999 bp, Zea Mays
aaaaaaatttgctgcagcccggctgcaaactaggctgtttgcagcccctcacaaaaatgaggataggccccacctgtaggccaataacacaactaaaacgttatctagtagacttgcaggtgaggtctatcctcttttttgttaggggctgcaaacagcctggtttgtaaccgggctgcaacaaatttttttcccctggtggtggtggggtaaaacggaatggtaaactgaagccaactgccaacccaacgaaggccagaactgcgcgcgcggaacctgttcgacgaattggcgcactggctatggcgctgctacgcgccgcgctagcccagccgttatcgccgcgccccgcgctcccggtccgccaccctccgacctcgctgacaggctccaggccccggcgcgccccggcgcgagtaccccaggatcgaggcgacggcgaggcgaggcgcgcgaactgagagcgccaaggtcaggaaccgtcggctgcagaagaagttcaacggcacggcgacgaagcccagactctcggtgttctgctccaaccggcagctctacgctgtgctcgccgacgaccacaacaagaagatcctcttctatggcagcacgctgcagaagtccatctgcggcgacccgccctgtggcaccgtggaggctgcccggaaggtcggggaggagctcgtcagggtgtgcaacgagttgggcatctccgaggtctcctacgaccgcaacggctttgctcgaggcgacaagatgatggcgttcgaggttccggtctcacagcacgggttcctgccaagataggctgcaactgtagtgtcgcccccagaaaggaggcaccagggcttgcattgacagttctcaggagacagggaagttggtcacattccatgcggattctgtattctgtattctgtatgatccatcagtccttgatcaacaggcagttcatatttcactaacaaggacagtttctccgtactctatacacgattccag

SEQ ID NO: 32030 - DNA, 2923 bp, Zea Mays
cgtcccatcgccgtcgtcccagtccacgtccacgtccacgccgacgcacccgcatccctctctcgcctgcgccgcagctatgtcgggctgggacgagggcgccgtgttctacagcgaccaggcgcaattcccccgcggcggccctggcggcgacccagccgccgacctcacccgccactccgccctccgcaaattcaaggagtttctccgcggcttcactggccccaccggcgacttcccctaccgtgagagcctagtacacaaccgcgaccatgtcaccgtcgctattgaggacctcgacgccttcgatgccgagctctctgacaagatccgcaagtcgccggccgattatcttcctttgtttgagacggctgcggccgaggttctcgcaagtctccgttcgaaagtcgccggcgagaccggagagatggaggagcccgtcactggagatgtccagattttcctctcctccaaggagaactgcctgtccatgagatctgttggggcggattacatgtcgaagctggttaagatagcgggaatagcaattgctgcatcgagagtaaaagctaaggccacccatgtaactcttatctgcaagaattgccggagtgtgaggacagtgccttgcagaccaggcctcggcggggctattgttccacgttcgtgtgaccatgttcctcagcctggagaggagccatgccctctggacccttggattgccgttccagataagagcaagtatgtggatctccagaccctcaaattgcaagagaatcctgaggatgttccaactggtgagcttccaaggaatgtgctgctttctgtagataggcacctagttcagactattgttccagggactagattaactgttgttggcatctacagcgtgtaccaagcatccacaacccagaagggtgctgttggtgttaagcagccttacattagagttgtgggtttagagcaatctcgagacaataactcaaatggcccctcaaacttcactcttgatgaggaaatggaattcaaagaatttgcacagaggccagatgcatatgccaagctatgctcaatgattggtccttcaatttatggtcattctgatgtcaagaaagctattgcatgcttgttatttgggggatctaagaagaggctacctgatggtgtacgtttaagaggggacattcatgtcttgcttctcggtgatccctccacagcaaaatcacagagaagactgcacctattgcagtatatacatctggcaaaggatcgtctgcagctggtcttacagcatctgtaactcgtgatagtagctcgcgtgagttttatttggaaggaggagccatggttttggctgatggtggagtagtttgtatcgatgaatttgacaagatgagacctgaagacagagttgcaattcatgaggccatggagcagcagacaatatctattgccaaagctggcattacaacagtactcaattcaaggacttcagttcttgcagctgccaatccaattgcaggacgctatgatgatcttaagaccgcgcaagataatattgatctgcagacgaccattctttctagatttgatctaatctttatcgtcaaggatatcagaatgtatgatcaagataagagaatagcaagccacattatcaaggtgcatgccagtggtgctgcagcttcatccacaaacacagaggggagtgaaggagagaattggctgaaaaggtacattgagtactgccgcgccacatgcaaaccacggctttcagaaaaagcagctgagatgctgcagaacaaatatatcgagattagacagaaaatgaggcagcaagctcacgagacagggagggccgcagctatacccatcacagtgaggcagcttgaagccatcatccgtttgagtgaatctcttgcaaagatgagattgacaagtgtggctacaccggagcatgtcgaagaggcattcagactgttcaatgtttccaccgttgatgctgcaagatccggaatcaatgagcatttgaacctgtcaccggagatcgcaaacgaaatcaagcaagcggaggcacaaataaagagaagaatgggcatcggcagccacatatccgagcgacggctgattgatgatctaaaccggatggggatgaatgaatccatcgtcagaagagcccttctgatcatgcatcaaagggacgaggtggagtacaagagagagcgccacgtgatcgtccgaaaggcttgaggtggagaggccagtcagattcacggcatacaacgtacactggaggcggtccttcctcttcggacgtgtgtataccttcactgaaactgcacctttgtctgtccagaggacgaggcatgccttagttgatctctgacatgactcttgtaatctgcacacgagtggatgcaaccttttgcttcgtgcaaatggagctttgtagctgtaccacagtagtctgttgctgcctgtgatcctaaaccatagtgttgtgagcatgaagacttcgtttttttggaagtaaccataggttctgaactgcattgtgctgtgtagctcgtcaatcaattctggaatgcgaactttgtttactgcatcaccaggagtaggacagacagtgtgtggagcttagttgtaataattataataatatatgctatgtgttggggaccttcggcatccgaaggtcctcaaaaacaggatttaacagtatttctggagtacaatgtgtgagcaggtatcctcggacaagtcggcgttgctgtaaaccggaataatacgaaggttgatacagagccgaaggtgtgagcaggaaagcttcggcgtgacagcaaagagtggaaccgacttaaatatgaaaaggctatttagacctcggtagactactatagaattattatcaaatgtaaag

SEQ ID NO: 32031 - DNA, 820 bp, Zea Mays
ctgaagcagataagccgtacgccgtccccttgcacagcaaacatccatggcgactgcccgcttgccctctcgctccttcctgtccccggctcagcaatcctatccacggcttcccgcctccgtccgcctctgcctctctcatcacgagcaacctcccaccggccccaagcggcaccgacgcgccgccacttcgcatcctgccttttctgcagccgcgcggggtcgtgccaagaagattcccatcgcggacaccgatgagcccgccgccggagtccgcgtcaccgatcgcggcatctcttaccgcctcgatggcgcgccatttgagtttcagtatagctacactgaggccccacgcgcacgccccgtagcgctccgtgaggccccgttcatgccgttcgggcccgaggccacgccacgcccctggacgggaaggaagccgctgccaaagagccgcaaggagcttccggagtttgactcgttcgtgctgccagcaccggggaagaagggggtgaagcccgtgcagtcaccgggtccgttcctcgccggtatggagccgagataccaatcggtgtccagggaggacatactcggggagcccctaaccaaggaagaggtctccgaactcgtgaaagggagcctcaaatccaaacggcaactcaatatgggcagggatggtttgacacacaatatgttggagaacattcattcacattggaagaggaaaagagtttgcaagataaagtgcaaaggtgtctgtacaatagatatggataatatctgccatcagctagagggtactagtggtgctagtattggagga

SEQ ID NO: 32032 - DNA, 1749 bp, Zea Mays
gtgacagttgggcatctatgtggccattcattttttttctttgtctagagacttggtattaaaccgaaaagtcatgtgcagtcatatggttgtcttgtcatttgcaaaccagaattgtcttcctgacttacaatccattgttgtcttgtcagaacacaagatcaatcaattttggtatcactatttttgtgaactataggaaccagagttgtcttgtgacaagtctaagcatcatagaagttttgaatctttctaattggttgttgatctgtccccagactactcctgctgtttcttattgccaataagcacaagcacacttgagaaccggccatcaccatggagatgagactctttatcgcccttcagtgcgtgcagtgcgccaccatgcaggtgaagcagcagaagaagagcagcaacaagtgggtgtgtgtggtgtgcaaccagcgtcagtctgtgcttcatgtccatgccaggggctatcgtgctgctgatctccgccgcttcgtccaggacaccaaccttgcccgtggccgccgggagttcgcaccgttggccgagcccgacgtggacagggatctggcggcagttgaggagggagatgtgttccctatcgagaagagtcagacggaatggtccgagtatctggacgatccaggggagacaggtaaaggttgtggtggccttggcgcagatgcttcagatggagaatcggatgaaggaattgaggtgataactgaactgcctcagaaaagacctaaagttaggcctcgcaaagcccaatcagatgtagtaggaaagagaaccaagctgtcaacacatcccactttatgtaataagaggcagcagatcaagcaaggatcaaatccccactgtgcaactactactgctgaagcacaaggatcaaaatggaccaagtatttggacacgagccgttttggtgggaggaaatgcttcgatacctctggtctgcactggactgaacatgatgaatctgccactactgaggctactactgacgtagtggtggatgatgagaatcacagggtgcatccacggaatgtcacaagctcagtgtgaggtggctgagcacttgagctgaggaaaattcttgtttctgttctgcatcaactagagtcacctgaccatgtggcacagcacagagaagagccgaagacgtacagcatggatcacaggagcagtacaccttgatgactgactgttgtctgttggtacctataatcctgtgacaggtctgaacaaccgagtgattgattgatgtctccggcttccctgcagccaaaatgacgaatgggttaccctgcttgaatcctttgccactgcgcttgcgtgctactactattccatgcaaaacaacgtgttcggaaccaaaattaaagttccgaacatcgctgtgatgaatgggtgaatcgtcacctttttctttgaaatagcaactgtatgctcgaagaacagctgtgctggtccagctatctgggtaccgtactccctaccccgattgaactgtatttgggtcaaagtaatgggggagatactctttccatgctaggatataaggtgtaactacctttaattctaagatcaagaaatatatttaattctctttatcaataaagtattgttatgagcgtgcttatattatgggacaagaataaaaagtgtttacgacttatataacaagagtagtagatataggtcatgtttgtttcagtttttttagcttccgtc

SEQ ID NO: 32033 - DNA, 1444 bp, Zea Mays
atttagtttatcatgtttttgcttgatatgtatagttgcttgctacttgctggacctatattttatttgctagtactgctggataaatgggtgcttaggtggtcgcttaggcgtctggctggtgactcgcctcgctgtagcatcgtgataaccattaaagtatgggatgcacttactggtgatgaactacattcatttgaacataagcatatagttcgggcatgtgctttctctgaggacacccaccttttactcactggaggcatggaaaagactttgcgtgtgtatgatattaatcgtcctgatgcagctccaagagagcttgacaaatcacctggttctgtccgaactgctgcctggcttcatagtgaccaaactatattgagttcctgcactgacatgggtggagtaaggctatgggatgtgagaacaggtaaaattgtccaaactcttgaaaccaaggcttctattactagtgcagaagtaagccaggatggcaggttcatcactacagcagatggctcaagtgtaaaattttgggacgcgaatcacttcggccttgtgaaaagctatgatatgccgtgcaatgtggagtcagcttcacttgaacccaagtctgggagtaaatttgtagctggaggagaagatttgtgggttcatgtattcgatttcttcactggtgaagaaatagcttgtaacaaagggcatcatggaccggtccactgtgtccggtttgcacctggtggtgaatcatacgcatcgggttcagaagatggcaccattaggatctggcagcttagcccagttaatgctgatgacgacgaggcggccaatgcaaatggcaaggcaaatgctgcagtgaacgaggttacaaccaagctcgagggcggcttccacattcccaaggagggacaggctggggggtaggacctcatgtgctttgttgtggtgcttgtggttcttattgcgaggagattgcccatagggctgccacggtcattcagtttctccctgcagagccatcaacacctgtttgcgatccaagggtatcatggcttcaagagtcatcaccctggtaactggggaaaaaccatacccctcgtaagcatggtggtgggtttttggatggggccttcgctttgatagaacatagcaactgtagtgtcaaaaataaacaagagaatacaacttgggtaggtatcgtgtcttcggtcattaaagtgaagtattctgtatcgccgccagtaatttttgtggcttttgatgttggaacgccgattttcaaatcaaagctgacgaccacttcttgatcatgaggcaatatagatagcgtcatgcccatatcaaatgacagatttctctgctcactggacatgcttttttggtggcatccgcggacacgatacgtgaaatttagttttatgttattgtacacctacccgaa

SEQ ID NO: 32034 - DNA, 1309 bp, Zea Mays
cgcccctccctttcactctccatgtcctgccaggattattagtgttcgattcgccggtttcgatccattcgctgtccctgcccctgtggtttatgatgacggacaaaatcctcggggcgactccctgtctgttgtaccggccatctctttggaagtaaggtccttagcgatcccaagaaacgtgcaatctatgatcagctaggagaagaagggctcaaggggcagccgcccccaggagcaggaggttctggcgcattccccttcttccctggcggggctcattccaccgctccccattttaatcacaggagtgcggatgatatatttaaggagttctttggatcccctggcatgggtggcatgagagcggaaccaggattccagaggtcaatgtttggcaacgatatcttctcttcacgctttggcgctgagggttccaccagtatgcagcagccaccacgcaaggcagctgcaattgagaacccacttccagtcagccttgcagatctgtacaagggtgtcacgaaaaagatgaaaatctcaagagaggctatagatgccagcgggagaatctcaaacgcagaggatattctgacaatagaagtaaggcctggttggaagaagggaacaaagattacatttcccgacaaggggaatgaagctccaaacatgaaagctgctgatattgttttcatcctcgatgagaagccccatgatgttttcactcgggatgggaatgatcttgtggtgactgagaaaatctcgctggtggaagcgctgattggatatactgcacgtgtcactacgcttgatgggcggagcctatcattgcccatcaactcgataatccatccgagctacgaagaggtagttcctagagagggcatgccaatacccaaggacccctctaagaagggaaatctgcggattaagttcaacataatgttcccttctaggctgacgtctgatcagaaggctggtctcaaaaggatattgggttcttaggccgcctcaaatgacattttatagtgaaaggcgaagccatttttgcgggctccggctcctcctgtgaaaatgtgaaaagggcttcggctcctcctggaggattatgcacgacaggagctcaggattatgctgtaggcaaacttcggtgtttactggcacaaatcaagtgggattaaaacttatgatagaatgcttatttcttctttggccatgctataaagatatagggcatggatgtgcagtttaaaagtctaatgatgagtgataatgtacacttataaaatctagtaatttattgaagcac

SEQ ID NO: 32035 - DNA, 362 bp, Zea Mays
caggccacagggcgtcccggtgctggcatcggttcgatgaaaactacgtcccagaagagcgccacgttaatgctgccatcgccatgaacgcctacaatgtcgacaccaactggtacaccgacacgggagcaacagatcatgtcacaagttaactaaacaaactgacgatgagggagaagtatcatgggaatgatcagatccacaccgtctctggttcaggatcaggatacgaggagaacgattcttagggggccatgtcgtcgtggattgtatccccttcctgccgattcttcactcaagcaggcaaatgctgttgacaaaccaaccgtgtctaaatggcacaatcgcctaggccatccctc

SEQ ID NO: 32036 - DNA, 491 bp, Zea Mays
cgcggcatcctagctcattccacgccgactaaaggcagccatagccgatcatatcgatggggagcatcgagtgcgacatgtgggacgacggctggactgccgtgacgacggacggcagcttggcggcgcagttcgagcacaccatactgatcaccaggaccggagccgagatcctcaccaagtgctaggaggaaaggaaatcgcatgtgcccgatagccgacggtaggtaatctgtattcgtgaggtggtgaggatgcttgaggtgacctattttgtctcgcaaaatgggcgtgctacagaatagtgaagaaaagggttgagagattgcaaatggcaggtttgggcaaagaggaccaagttctaggcgtccgggacacgactctgtgtctggcgttcccttctgttgtcgacatcccgtggttcagttgaggccatgtctcgtgacgttctcctcccgccagttggcccaccgcttgccgttggcgcgttg

SEQ ID NO: 32037 - DNA, 3178 bp, Zea Mays
gtaactcggctgtttcgcacaggcacggcactcgttggaaacttggaatgccctatcagatcgcatcgcacccaaaaatcaagagcctgctggattcaaacggctgattcaaacgaccagagtccggacactcacactcccctgctgcgcctgccgcctgcgtttcggccaccgcactacttccccaatccccttgatatcgcccacccgcgctcgccgccgccgctgggcggcgatggaaaccctaatggtagaccgcgtccacagtagcctccgcctcttcatgtaccgcaacgccatattcctctgcgagcgcctctgcgcacagttcccctccgagaccaatgtgcaattgctagcaacctgctacctacacaacaatcagccatatgctgcatatcacgttttgaaagggaagaagctgccggagtcccggtacttgtttgctacatcatgctttcgaatgaacctcttgcgtgaagcagaagaaattctatgtccagtcaatgagccaaacatggaggttccaagtggagcaacaggacactacctccttggagtgatctacaggtgcacaggcagaatttcagctgcagctgaacaatttacacaagcgttgactctagatcctcttttatgggcggcatatgaggaattgtgtatattaggtattgccgaagataccgatgagtgttttagtgaatcgactgctctacgtctccagcaggaacacacatccacgtccactttggtgaagtcgaactttgccaatgaaaatcgagttctatcatccagtgtctctgcaagttttggggatattattcctaagcaaatcaaacagcttcatgctaacaacataacagaagtatctggttatcctcatgtaagaccaaccgcattgcatgtgcagaacagttcaacttctaatgtatcacagtttgacaccccatcaccagctgcagcacagacttctatcatgccaccaccactatttaggaatgtacatgcttaccagaatacaataagtggcgatgctcccactaagcagaaagctaatggagtaagccagccactcagaaggaaatacatggatgaagcaaggctaaagaaggtttctggaaggttgtttaatagcgatgcaatgcctcgaagaagtcaaagacttaaagatacaacaacaaattcaaatacatctcaaattggaggaaatggaacagatcatttgtcaggtaaattgcgagtaaactcgtccacacaatcaaaattgtgttcaacagccatacgttctgtgcaagttaggaaaggaaaaccacgggctacagaaaattttgatgaaggaagtagatatgaagtcattgatgaaatgtggacagacaatatgtcaggaacttcatcttctgtaagtacagctgatggaagatcctttgagcaagatagagctgaacgaattctgttgcaagactccaaagtggcacttggtattagggagctattgggacttttccgaacactgggggaaggttttaggctttcttgcttgtttaagtgccaggaagcactggaagtctacagaaaactccctgagtcgcagtttaacactggatgggttctatgccaggttggtaaggcatattttgaattagttgattatttggaagctgatcattattttgagctggcacaccgactatcgccttgtacgcttgatggaatggacatctattctactgttctttatcatctgaatgaggaaatgagactaagctaccttgctcaagagcttatttccattgatcgactatctcctcaagcatggtgtgcagtgggcaattgctttgccttgagaaaagatcatgagactgctttgaagaattttcaacgttcggtacagcttgactcaagatttgcatatgctcacactctatgtggtcatgagtattctgcactggaggattatgagaatagtatcaaattctacagatgtgcactgcaggtagatgaaaggcactacaatgcttggtatggccttggggtggtgtatcttcgccaggaaaagtttgagtttgctgagcatcatttcagaagggcatttcagataaatcctcgctcttctgttctcatgtgctatcttgggatggccttgcattctcttaagaggaatgaagaggcactggaaatgatggagaaagctatagcagctgataagaagaatccactgcccaagtatcagaagtccttaatccttctaggactaatgaagtatgaagaagctctggatgagttggagcggctaaaggagattgcaccccatgagagtagtatgtatgcactgatgggaaagatttacaagcaactcaatattcttgacaaagctgttttctgcttcggcattgccctggatttgaaaccacctgctgctgatcttgctataattaagtccgcaatggagaaagtacatctccctgatgaactgatggaggatgacctataagttcactcaagcatcgtgagaaatgaacatttacttcgggttcatgatgacccgcctgtgcttcgtgttcctggcctagtggcctgcttgggcttctcaagtggaactcggaagtcggagctgtaccattagccatccagtttggaatgaaaagaaaaaaaaattaaccatccagttttgtagatttagttttagcctgtaatcagagaacacatgcgcagaagctgcggtagtttaggactctgtacaagtgttggcgaaatgacgcctgtaccattatcaaataacggaaataattaaaggatgaggatccagctgattcaagcagattgtttgtcgcatctacaaaccttttaaaggtgtcacattcaaaggttgaaaacatttcagcccaagtaaatcgatttgaagaagagcggaggaaaagaggatgcttccgcgagtcagcctcctactaactactggcttggaggtgggggataaagctaggctcttcatgcaagcaaagtgtaaccatccgttttcttgctagtagcctgtatcattgctgcatatcctggcatcattaagaaaccatccaaaggagagtgtcagtgatgagcaatttctggaaaagttttactttgcattatgcgatgtgatatatatattttatttacatggtatgttgcatgggcttgagataat

SEQ ID NO: 32038 - DNA, 2774 bp, Zea Mays
aaaacgaagaggaaaatgatacggatcgagaggcatagcacaacggaaagcaacccgaaagcctctacttttccgcccccagcaggccaggactcttcaatcgctcgcgccgtttcttcatcccctcgccatccttccttcgatccagcgttgcctgtcgtcttcgcctgcacggctgcacctaaagctctgacctttttccccactttcccttggcatctactgccttgtccggtgtagaaaacaacggatttcgttgtgttgttttgctgcggtttttgtcccctcccttctcactcggcgagctttgttgttcactttggattccacgggtttgtttcggattaggaaggctcggtttttggtctgggaaggccccccttccgaggcgatgaatttggtgcgggttgatggcgtcctgtcaggagtccgctatgcaatgatgggttctttgaagccgaggtgaatctttgacctgcctagtttgcgattccaaattccgagctcccaccgcttcttgatccgccgggcgccatgggcctctgctacggcaagtcggcggcggtccaggagccggcggtagcggaggagaacaacaaagccgatggcgcggcggcgggccgaggcgatggcccgccggcgtcgccggtgaaggtgcctcggacgcccaagcagcccaagttgtccttctacttgccgagcccgctcccgccctccagctacaagggctcgccggcaaactccagcgtcgcgtccacgccggcgcgcggcgggttcaagcgcccgttcctgccgccgtcgcctgccaagcacattcgtgcgctgctggcgcggcgccacggctcggtcaagcccaacgaggcgtccatctccgagggcggcgaaccagaccttgggctggacaagagcttcggctactccaggcactttgcggccaagtacgaccttggtcgagaggtggggcgcggccactttggcttcacctgcgctgccaagtgcaagaagggcgagctcaagggcgaggacgtcgccgtcaaggtcattcccaaggccaagatgactactgctattgccattgaagatgtcagacgggaagttagaatattgagttctttggcagaccacaacaacctagtgcagtttcatgatgcttttgaggatgaagaaaatgtatatgttgttatggagttatgcaaaggaggtgaactgctggacaggattttggctagaggtggaaaatattccgaggaagatgctaaggttgttattcaccaaattctaagtgttgcttcattttgccatcttcagggtgttgttcaccgggatctgaaaccagagaattttcttttcatgtcaaaggatgagaattctgccttgaaagtcatagactttggtttatctgactttgttaaaccagacggcagacttaatgacattgttggaagtgcatattatgttgctcctgaagttctccatcgatcttatggcactgaggcagatatgtggagcattggagtaattgcatatattttgctttgtggaagccgccctttctgggcaagaaccgagtcaggaatttttagagctgtcctaaaagcagatcctagttttgatgaaatcccatggcctaccctttctgctgaagcgaaagacttcgtaaggaggctgctcaataaggattaccgcaagcggatgactgctgcacaagccctctgtcatccatggatccgtggtacacaggaagttaagatttatctagacatgataatctacaggcttatgagggcttacataagttcatcttctctacggaagtctgctttgagggctcttgcaaaggcactgacgacagatcaactcttctacctaagagagcagtttacattgttagatccaaacaagagtggccatatatccttgcaaaatatgaaggcggccttgatgaaaaattcctcgggtgcaatgaacgattctagggttcttgactttgttaactcaatatgcaatatccaatatggaaatattgattttgaagagttttctgctgcggccattagtgtatatcaaatggaaggcctggagacctggcaacaacatgctcaacaagcatatgaattgtttgacagggagggcaaccgaccgattgtgatcgaagaacttgcatcggagctcggacttggcccttcggttccacttcatgttgttctccaagactggatcagacattcagacggaaacctcagtttcctcggcttcataaaactattgcatggagtttcttcacgcacaatccctaaagtccaagataaccgtttgcattgaccaatccctaatctcagggccagtgcatgccatgtctggctgtagaagttgcatgagaccatcagaccagtacaaagattaacagatcaggttagggtaagagctttgtaactttggaatccttaccacaagaaggattatgcgacctctaccgtataatgacgaggctatgggaggtgatttgaggaaaaggccagaagctgggacatcttaggaaacagattccatgagaagaaatccaaatatatggtgaaatgcagatttgctaaagtcgccgagcttttgtatgcgttcgagatttccagtgagcgtggatcctttgttagcctgtttggcaactcacttttcaataccatagcattacagtaccatggtttactaattgcaatgtacaatctaacatctgtttggcgacaaagtattttgacatgtatagttttgatcaaattccg

SEQ ID NO: 32039 - DNA, 2290 bp, Zea Mays
acggagtgaataaaataaagagaagtagacgtcacattcaacgagtactccgcagtcatcggacgccatcggctccccaagtcccccaccgtccgctgttcttcagggataacactttcattgaaagccagtatttgcgagttcatccataaaaagaagagctcagacggttgaatatcgaccatcaacaaagaatgcctaataaaccactttcagcattgactctacaagatcgagacatagaaattcaaatagaggtccacaggaaatgggaatttcgaggtgctattgacaatggacccatattacacatagacatgatcctgacggattgcataggcaatgctatccattgtcaaataccatcattcccagcagctaaaagaggtgatgaatttcaagtgggaaaaatatacaagatgtcccgctttccagtagctcgtgcaaaatcttcctacaaacctgttgatggtgatctcatgttgtatgtgacaccatacacaacccttgaactttgtcataattcaccctcaagttttcctctctatgtttatagtctaacaagttacgacaagattgatccaaatgaaccaaatgcaaggaacttccatggtatgtttcctaaatatgacataaaatcctattctcataattatccaagcgctcacgtgatctaatcctggttttgctattgtatgaaacattagatgtcattagcattattacagaaatctctgcgattaaacctgtgggaaatgcacgcataccctcatcttacaatcgacatgttctaataaaaaacctcaggtcactgctatgcaacatactacatatttattatcttattttaccgtttttatattaatacttgatccaccattgttgaaaaatgcattaacacatatttagtacttattttgaaactgtctaacagtgatagcattctgaaaattactctatgggggaaacgtgcacaagaattttatttgaccaacacttatgacccacagaaacaaactcttgtcattgtcttatttgttggttgtttaccaaaagaattccaaggggaagtacttttaagtggtggtgcagcctaccattggtacttcaacccatcaattgaagaagctactgctttttacaacaagattgaatctgagaagataaacatagaattacccagccttgacggacaagaaattacacctccacaacttccacaacgagaacatcatgaccttaaatacatattacctctaaacccacatgatgtaccggatgaaggatatgaatgcacagtaaccattacaagtattcctgaaggcaagacttggtattatattgcttgcaatacttgcccaaacaaaccaagcattgatcctatcatccgtcaatgctccacatgtggatcaacaaaatactgcttcaggtacaagctcactttcaaggcatcagatggaactgcagaagctgaaatgtttgctttcgacactgttgcaaggacaattattgggaaaccatgtccaatggttgttgcatcattttccagatgcatcagctatcccacctgaaattacagcaatcgtttcacggaaatacacattcattgtagtgttcaacaaccaatcatacagatttctagaaaaagcattgctcataaaaggaattgtagcatcatatggaagaatgacatcactaccaagagttcaagaaaaacttgatgtgcaccttcctcccaatccagccaaaaacaaactgataacaacagctgctcaatctccctctacagtcatgtctagactttccacggcggactcaccaagtgtgagtcgaaagctaacctattctccagcaaaggataaacctgagacaaaccctcttgatgctgataaaaatagagctcctgcaacaacacttgaatcacctacaaaaaggatcaaacaagaccctaagaatcaacaagagtagacgttgtgtgcaacacagtaaggaatacttctgaacatcacgcccaaacttcaacaaacgaagcatattcctcactattttgtctataaatattatgtgtgccttcttctatgaagcaaaccttaccctcgatatgctatatataatatctatgtattgtcatgtaatataaccatctataaactcatcagttgctacaatatattctaagcaaaccttaccctcgatatgctatatataatatctatgtattgccatgtaatataaccatctataaactcatcagttgctacaacatattctcatgttatgcatataaaat

SEQ ID NO: 32040 - DNA, 2317 bp, Zea Mays
cctgttcttctctcccctcctgctactgccgcccggctccgctccgctcccctcccgaaccccgttccacctccacccgccgctcccgtcccgtcccgtccatacccgcgccgctctcgactcgctcctcgacctcaaggctacctacctcgacgggccccgcaccgtacccgcccgctagctcccgcggctgcagcagcaggacgagctcgccgccgccgtgcactaggttccagtgtctcgatttgccaggataacttgtataattgaagctttcctttgtacgatgatgggggcatgccatggaccagaactgagggggctagggtttgctatgtggtagtagctcctgcttcaggtggcgtcagctgttctgggtggggtaatatgatgaaacagatatttggacggcgcaaggcgtccaaaaccgcagacaaggagttcactggtgggaggacgttcagccagctgtcggggtctggagttgctgacctgagtggccaaccgccaattctgtcgagtactgggcacgcctatgggagtggaaaccgtacggggttccaagactcgaggataaatgataatttgttttcttccaacttccgtccgttgccgagctttaaggatgtgccgaatacagagaaacagaatctgctcatcaaaaagttggacgtttgttgcactctgtttgactttacggatgcgtcaaagaacatgaaggagaaggaaataaagacgctgatgttgttggagatagatgagtatgtaaggactgctaacgtgaagttccctgagatcgttgtggaggcaatcacaaaaatgatttcggtgaacttgttcaggacactaatttccccacctagggagaagaaggcgcttcaagcttttgatctagaagaggacgaaccgttgatggaccctgcgtggccacatttgtaccatgtgtatgagttgctcttgacatttgtccagtctccacaaaatgatgctaagctggctaagagatatattgactattcctttattctgaggctgcttgacctctttgactcggaggacgctagggagagggatcgccttaagatggtgcttcaccgtatctatgggaagttcatggtgtatcggccatttatccggaaagctatcaataacatattctaccagttcatatatgaaacagaaaagcacaatggaattgcagagctcttggagatttttggaagtatcatcaatgggtttgctttgccactcaaggaagagcacaaactgttccttgtaaggaccttaattccacttcacaagccaaggtgcactacaatgtaccatcaacagttgtcttactgcattacacagtttgttgaaaaagattgcaagcttgcggattctgttattaggggcctcataaaatattggcctatcaccaacagcacaaaggaggtactgttcttgggtgagttggaagaggtactagatgcaacacaacctggcgagtttcaaaaatgtatggttcctctttctcaccagatcgctcgctgctcgaacagccctcacttccagcaaaacagtaaggtgatcctgcctatcgtcttccctgcattggagaaaaatataaatgggcactggaatcaagtcgtgcgaagcctcagcctgaatgtccgaaagctattctccgatcgtgacccccaaatgttcaatgaatgcttgcggggttatgaggaagacaaagacagagagaaggaatttagactgaagcaagagttggcatggaaacgtctcgatgagattgcatcagcaaaagtcacaagtggtgaggctgtcctcgtgtctccaaccttgcatcgtcaaccttcagtcttgtaggaacctgcgctacatgagtggtccttgcagagtcgttagacattgtacaggattgggttgtagataaaagcgggtatatgaagccaccaaggcaggtgtgcgaaatcgaggaaagagagatgaggagccagtagtgcatcatttctgtacatcccgtgccatggcttcttttggcatcctggtggttcactttgctgctgtagtccgttgtttgggagaatggatgttttttttcttcttataatggaaaatgtcgagatggcgtgcagtcagtttaaatgataaaagttataagcttttcctttcgcatatagttttgatacaatttgtcatggttgtgaatgcaagcgaatcatatcaaatccctgagaatgctgtaacgcggtggtcacatgtgtggggatttttttattttatccccaggaaaaaatattttaattttcatcacagggagtgc

SEQ ID NO: 32041 - DNA, 2027 bp, Zea Mays
tatttgaagctgatactctaagagcatctccaacaagggaaattctgtgtcgactacgaagtacaacatcctaactttcttacctaaaggattattcgagcagttcaggcgggttgcaaatctttactttctcatgatctcaatcatgtcaactacacctatcagtccagttcatcctgtcactaatgttgttcccctaagtcttgtgcttctggtgtctctcatcaaggaagcttttgaggattgggtcaatgttgggaaagtactccatggaaacgactgcaggttggagatattgtgaggatcaagcaagatggttatttccctgctgacttgctcttcctatcaagtacaaaccctgatggtgtttgctacatcgagacagcaaatcttgatggggaaacaaatctgaaaataaggaaggctttggagaagacttgggactatgtaattcctgaaaaggcttctgagttcaaagggatgcagccttcgtaatacagaatacattgttggtgttgtcatattcaccgggcacgagacaaaagttatgatgaattccatgaatgttccctccaaaagaagtacattggagaaaaagctagacaagcttatccttgccctttttgcaaccctcttcacaatgtgtgttattggtgccattggaagtggtgtgtttattaatgaaaaatacttttatcttggattgcgtgggcatgtggaggaccagttcaatccccaaaacaaatttgtggtgaccattttaaccatgtttactctaataactctatactcaaccatcatcccaatttctctttatgtgtccattgagatgatcaaattcatacagtgcacaaaattcattaataacgatcttcatatgtaccatgctgagagtaacacccctgctttggcgcggacttctaatcttaatgaggaacttgggcaggttgaatatatattttctgacaaaactggaacgcttacaagaaacctgatggaattctttaaatgctcgattggtggagaaatgtatggaactggcatcacagagattgagaaaggaggagcagagcgggctggaattaaaattgatgatgatgagggtaaaaggtctgccaatgcagtccatgaaaaaggattcaattttgatgacgctagaatcatgcgtggtgcatggagaaatgaacctaatcttgaggcttgcaaggaattctttagatgccttgcaatctgtcatacagttcttccagagggtgaggaaactccggaaaagataagttaccaggctgcctcacctgatgaggctgcacttgtggctgctgctaagaattttggtttcttcttttacaggcgtacacccaccacagttatggttcgtgagtcacatgttgaaaggatggggagtatacaagatgttccatatgaaattctgaatgttctggaattcaacagcacgagaaagcgacaatcggtggtttgccgtttcccaaatggaagattagttctctattgcaagggtgctgataatgtcgtatatgaacgattggctgatggaaatcatgatatgaaaaagacaagcagagaacatctagagcaatttggttctgctggcttgcgtactctttgtcttgcctatcgggatcttagcagggagcaatacgaaagctggaatgaaaagtttgtacaagcaaagtcatctttacgagatcgtgataagaagctcgatgaggtggctgagttgattgaaaaagaccttatattagttgggtgcacagctatagaggacaaactgcaagaaggcgtgccaacctgcattgaaactctctctgcagctggcataaaaatttgggtgttaacgggagataagatggaaacagcaattaacattgcatatgcatgcagcttggtaaacaatgacaccaaacagttcatcattagttcagagacagacactattagggaggctgaagaccggattgacgatgaaccgaagatccggtcgacgaactagaagcgcggtgacgaag

SEQ ID NO: 32042 - DNA, 1815 bp, Zea Mays
ttttccggtgccttgcttgttctagtagccggttctcaatcctcacccaagcgcctctaggccgaggctcggaggccacggcgaggaggagcagcagctgccagcaggggaggacacggatagtagccggcctcccgccgcccgaggcccaaccgcccccgcaattactgttgttgctgcgtgcagagcggttttgaattgccgtctcctacccaggaataatccatggccccgcctccgccatggcttgccgccctcctcttcctcctcctacccgcgctgctgccggcggtcggctccgtctccggcgcggcggctgccggcatcttccgggtgcggcgtaagttaccagccggagttggaggggacactggcgccaacatcagcgcccttcgtgcccacgacggtcgccgccacggccgccttctcgcggctgccgacctcccgctcggtggcctaggtctccccactgacaccgggctctacttcacggagatcaagctcgggacgccgcccaagcgctactacgtccaggtcgacactggcagcgacatcctgtgggttaactgcatctcctgctcaaaatgcccccgcaagagcggactcgggttagacttgacgttctatgaccccaaggcgtcctcgagcgggagcacggtgtcctgcgatcagggattctgcgcggccacctatggggggaagctgccagggtgcactgccaatgtgccctgcgagtacagcgtcatgtacggtgatggtagctcaacgactgggttcttcatcaccgatgcgctgcagtttgatcaggtgactggggatggacagacacagcctggcaatgctaccatcacattcgggtgtggtgctcagcaaggtggggatttgggcaactcaaaccaagctcttgatggaattcttggttttggtcaggcaaatacgtcaatgttatcacagctagctgctgctggtaaagcgaagaagatatttgctcattgcttggataccataaagggtggtggaatttttgctattggaaatgttgttcagccaaaagtaaaaacaacaccgttagtagctgacatgccgcactacaatgtgaaccttaagtcaattgatgttggtggcactacattacagctcccggctcatgtttttgaaacaggagagaaaaaaggcaccataatcgacagtggtactaccttgacataccttccagaattggttttcaaacaagtaatggatgtggtatttagcaagcatcgagatatagccttccataatttgcaagattttttgtgtttccaatattctggaagaatgacatatactgtgtgggattccaaaatggtgcattacaatcaaaagatgggaaggacattgtgcttatgggagatcttgtgctttcaaacaagttggttgtctatgacttggaaaatcaagtcatcgggtggactgactataactgttcgtcgagcattaaaattaaggacgacaagacaggcacaacctatactgtcgaatcacatgacatatcctccggatggaaattccactggcacaagtccctggttctgttgttggtaacaatggtgtggagctatttatagtacactaactctattgtacaacacgaacacgcacttaccgaaattcatttgattcgtattcttttcacaaaaaagaatatctagggttttaacttgcgttctctgaccacggaaaacgatgaaaacaaaaacgttgtgtgccatacaatgagcctgtgtgtcactagtgttatgctgagacaagtgttgatcccacttttgggcaggc

SEQ ID NO: 32043 - DNA, 1063 bp, Zea Mays
atgaccatggagcggctgctgtgggcgtccacgcaggcgctcggctgcggcggcaagcgcgacgaagccgggctggtggggcagctgggcgagtggctctgccgggccgcgctaccgccaccgcgggtgtgcggggcgcccggggggccgcccgttacggtgcgccgggtgcgcctgcgcgacggccgccacctggcctacgaggagtccggcgtgcccaaggaggtggcgcgctacaggatcatcttctcgcacggcttcgccggctcgcgcctcgcaggaagttgcggaggagctaggcgtgtacatggtgggcttcgaccgcgccggctacggcgagagcgacccgaacccttgccgctccgtgcggagcgcggcgctggacatggaggagctggccgacgcgctgggcctgggcgacaggttctacgccgtgggcgtctccctcggctgccacgccatgtggagcgcgctccgctacatcccgcacaggctggcgggcgccgccatgctggcgcccgtggtcaactactggtggcccgggctccccgcgggcccggcggcggaggcgtacgcgcggcaggcgcgcggggaccagtgggcgctgcgcgtggcgcaccacgcgcccgggctcctccactggtggatggcccagcgctggctacccacctccaccgtcgtcgacaacaccacccacctccccaacgggcgcgacgccgaggtccgccgcgcgctcgccgccgacggcacgctccggcggaagcgggaggcggccacacagcagggcgtgcacgagtcctaccaccgcgacatggccgtcatgttcggcaggtgggagttcgaccccatggacctgccggagccgccctgccccgtgcacctgtggcagggcgacgaggacggcctcgtgccggtcgtccttcagcgccacgtcgccggaaccctcgcgtgggtcaactaccacgagctccccggcaccggacacttcctgtccgccgtccctggcctcggggacaccgttctacggacactcttcggttcatcagccgccctggtagcgtag

SEQ ID NO: 32044 - DNA, 967 bp, Zea Mays
accggctcgagcctgaccgtcccgtactgtcgcacgaaccctaactactagccgtccctgccgccttccccttcggaggtactactggattcaacaacaaccccctctcgcgggtcccgggccgacgcgacgaaagacaaaggcagcggaggtggcgctgcagtccaccagttcttgggctcttggcaacgtcgccatcgtcatcggccatggttcttggcaacgtcgccatcgtcatcggctccggaattgtcggatcagtacttacaggcggtgagtttggccttcccgacttcagggatgcaatctctggtgctttcaagttcttgaccaagagtgcaaagccaggcaaggatgggccgtctaccagcagtccacatactgctgagttgttcagccaggtcaatcatctcagagaggagctgcaaatgttgtctaaatcaaatcatgtttccattgtcactgttgatggtagacctggccctggtgcatacggtataacagctgttgttattggaggagctattggctatttattcataagatggaaggggtggaaactttctgatatgatgtttgtgacgaagcgtgggttatcagatgcttgcaatgtagtggggaaacaagtggatcaggtttcagaaagtgttaatgttgcaaagaaacatcttgctggaaggattgatcgtgtagattgtagtttagatgaatgccaagaaattacagaagccacaaaggaagaggttacaatcatccatggagatctaagtgccttccagaaggaaatggaaacagttcatctcgtagttcgtagtctggagacaaagcttggacgcctagcttatactcaagatcggacaacacgaggaatatatgatttgtgtgaattcactaaaagattggatcagagcccgaaagctgatactcgtcaggtgcccgttgttgcacagatttccgagtgacacct

SEQ ID NO: 32045 - DNA, 1302 bp, Zea Mays
tttcacttcaccagaggaacacaagatgtatgctagggatatatttttgcttgctcagaataattaagtactataagaactggtgcagcggtagagcctaccgtctattatgcgggtaagacttggcgtttaaagatacccttcttcagatcccgcacaatgctggaagtgtacgacactgggaagaggcagaccaaccttggattggccaacaagactaaaaattgctttgggttctgcgaagggattggcatatcttcatgaagattgtcatcctaagattattcatcgtgacataaaggcctcaaatattcttctcgatctaagatttgaagctaaggtggcagattttggacttgcaaaattcacttctgatgcaaacacccacgtttcaaccagagtgatgggcacatttgggtatctagcacctgagtatgctgcttctggcaagctcactgagaaatcagatgtcttctcttttggagtaatgcttcttgagctaataactgggcggcgccctgtaaattcaagacaagcggacgacaacctggttgactgggcaaggcctctgatgataaaagcatttgaggatggtaatcatgatgctctagtggacccccggctgggaagtgagtacaatgataatgagatggcgaggatgatagcctgcgcagctgcatgcgtccggcattcttcacggcggcggccacggatgggtcaggtcgtccgggcgctggaaggcgacgtatctctggacgacctgaacgagggcgtgcggcccgggcacagccggttcgtggggtcgtacggcagttcgacgtccgactacgacaccagccagtacaaggaggacctgaagaagttccggaagatggcgctgggcggcagcgggctccagagcagcagcgcgcagacgccgacgagcgagcacggggagaacccgtcggtgtcggtgtcgagcagcgacggcgacggcggcggaggaaccggcgaggagcgtgaagacagacggcaggcagcgtcgtgaggcgtgaggcgtgcccagcctacggcccccgcgcatgcatctgtagatcctagtcctctcgacatcgctacgtacatgtctaattgatagctgacctgtggccgggaggcgggactactgagagattcatgattgctttcttttcttttgtgtgtgtgattctcttggtgggtacactggtctcatgcatgcgatctctgtataaattcaccgactctttaggaactgattactattggctattcgtatattatgagtatactcagtgttgcacg

SEQ ID NO: 32046 - DNA, 3400 bp, Zea Mays
gacgagagacagtcagacagcagctcgaacctcgaaaagcaggagagtccaaagccgaatggacaactggcaacaaatcaacagagccacagaggaaatgaatccgatagccaccgccgccctcacgccatcctcatttttcgcctcaaaccgccgcttcgcccctcgcctccgctccgtcctccccgccgctgccatgtcttacgccgccgtatccgcctccgccccaagccccagctccggcactggggaacaggtgaaggcggccccgctcccgcactcgaccctcgagatcgcgggcgcccgccggggcctcctctcaggcttcgccagcctccgcgccccgtaccgtgccttccccgtactcgcgtcgaaccgacacgtcgagaccatcttcgctgcgctcacgcgatcgctccccgccgttaagctgcggcgcgagtgcctccgcgcccctgacgacggagccgtcgcgctcgactgggtctctggcgacgaccgtgtgcttccgaatgatgctccggtgcttatactcttgcctggtcttacaggtggaagtgatgatacatatgtaaggcatatgcttatgagagctagaagcaagggatggcgtgttgtggtgtttaatagccgtggatgtgcagatagtcctgtgactacacccaaggtacttcaaataccttttccaattcttttattagcactgtaaagcttatttatagctcctatagctcttacaaagcttcgaagctatgcagtggaccatattttcccttttgatacttgtcagggaaaagtgctaagatctcatttatatggtttgattgattgagaagtgcactgcccacttttaagttaattatcagcaacagtagacacacccattttgttctggtaagctacacagaactgaacctctttctggcttatagcataacatgtgctgcctaaaagttggctcatcccagttcatatgtgcaaactgtccaaatatatattttttccatgttggcatctggtgtgataaatgcactctatatgatattgcttctgtgtactttttcctacttagggtgtaaccagaaactgactaaagggtgagtgaactggctcttactgtaaaacttgacagaattggagttttgaactgaaagtaggaaaaggttaaagaacattgaagtgtattattaacaataaattgcattgttgctcaatgttgaagggtttttttggtttttattttgtggctacttgctgccctagtaaaatacgacatattgtgtccttaaactgaattgtctgtcataaatttctaagcttcaccctgatgtgtacagcatatcaataaagtgtcgatatgcatgttggcaatcaacgtctttaaccatggggccttgaatcaaactcaatggataaacctttggaaacctaggggttaagtggttaacaaagagtacataataagtaaggagataaagatagcaaatgaaatcgaggctcgaagctgtaggggtccatcttctttttaggacatacgttgacttgcatcttctgtcatgtgcagttctattctgcttcatttacaggggatctccgccaagttattggtcatattttaggacgttatcctcagtccaatgtctatgctaccggttggtctcttggagcgaatattcttgtgcgctaccttggcgaggaaactgataaatgccctttatctggcgcggtctccttgtgcaatccttttaatttggtaattgcagatgaagatttccacaaaggatttaacaacgtttatgataaagcattggctagggctttgacgactatatttaagaagcatgctctccttttcgaagggctggagggtgaatatgatatacccaaggcagcgaatgcaagaactgttagagattttgatgaggggttaacccgagtttcatttggtttcaagtcagtggatgattattactccaattcaagcagctcggattctatcaaggatgtttgcatacccttactgtgcatacaggtcaaacttcactctatctgttctgtgcttcattagacgccaggacattaggaacaacagatacagtttaagagcctgatgtgtaccaccacttcttagttttggatcacgcgttactcagtactatgactgagctttaacccaaagctgttaaactacttaaattaagaatatggaagttcagttaatctgtggccttttggttctatcattggaataaaacctggagaaacatttcaacaccagcttaggtcttgcatatttagaaccctgacttgagaaagctggatcattttgcggtaaagttgtttgtaaaactctagaaagcagtatgcgtggtaattttagccaaaaaagagatttgtcagattcaattattagtgtgcctatgtgcatatattgtgaaggtcaaagcatgtcttttctgttataacttcaatcataatttagtatgtgcaggctgataatgacccaattgcaccatccaggggaattcctagagatgatatcaaggcaaataagaactgtctacttatagtaacaccacagggtggccatcttggatgggtagcaggcgacgaagctccattcggatgtccttggacagacccaatagtgatggaatatctagaacatctcgagaatgagaaggactctagtaccaaaaataacacatcctatgagggtgtttcagaggcatcagtatcccatctaactgtgcatggccaaagataataatatctctcttctcatagtactcattcgccacattatgttttatatggaaatagtttagtagagttcatttagccgtgttgtctgctgctgcctgctggttaattgagtacatggctcttcgtctacaggtctagtggtctacacatgtgcgagaagatttctgtgtcaaataagatgtctggttctgagatcaaaatagaacatgcgttatccaattgttcgttcttagggggtttcactttcatcccgtgtttgaaagggattctctgtaaatgcatgagctgttacggagttggcctttgtatccctcttctgcaacgcgtgaaagttgatggcgatgagcacggcagtgcatcatgtaaatttgacaatgtcattcagcgcaaaaaaaaaaaaaccccccgaaaaatgtgttggaagagtttttgtgtgcgcatgctaacaaatatctcatgtggtaaacatcatcttggattaacatatggcaatgtgatgaaatagtaacagttgttgaaattttatatgatcctactattccttttacagatggtaccagatatagatgatttcattgaaccctttgcgccagaaaaattaatatatcttactactactgtgtctagattttcc

SEQ ID NO: 32047 - DNA, 1879 bp, Zea Mays
gaccacagtaagaaaaaggacatatgctgtttgcctgttctgcaacaaagattgataattttaggagctatgataccgtgagcaaagatgtaattcaaaggtggacatatcctatggtgcctgatgtagtatccagtcgtgattcctcggagagtagacttcataggcagggaatatacaaggcatcagatgtaacattgtcaccttctgcacaaatcggtgcaaattctgttgttggtagtgtgactagtattgcaggtcactgcaaagttttaaattcagttattggacaaggctgcaagattgggaaaaatgttctgattaacggctcatttatatgggacaatgtcataattgaagatggatgcaaagttagtaactctttagtctgtgatggtgtccatctaagagctggtgctgttgttgaacctggttgtgtactgtcatttaaggttgaagttggaaagaatgttgttgttcctgcccactcaaaagtttcattacttcctcagccttcaaatgaagatagcgatgaagaacttgagtatgctgacactaactctggaattgcagatagtccaccattttccagtatgaggagtaatggtgatcaagcaactgttccttcagaagaagatgagttgggaacatccgagactggcacctgtggtgttgtcggttacatatggacaagtgttgatagtgggatcatggaagaatggagacaatcaattgcccctattcctaaagaaaagcttgaagagctgcagcatgctgtgcctgatgatgataggtcagaagatgaatccaacaatccaactctaccagataaagatgattcttcagacagtctggttgaggatgatgatcatatttctaagtttgagaaagaggtggaagagacattccaacgagctctgggtggcggcgttaatcgagataatttgatactagagattaatggcctaaggttagcctacagccttcaacatgcagattgtgctggagctgtgttctattctgtcatgaagagtgcattactggctgcacaatctaatactcttttgaagacaactgctgatgcacttggcaagtggaaggatcttttgcgcaattacaccaagacagttgatgaagagatggagatacttttaaagtttgaggaaatgtgtcaagagaccacaaaagatttttctccgctgtttccaaagatcttgccatacctctatgatacggaggtagtaagtgaagatgcaattttgagatgggcggaagagaaagaacatgctgatgagtctgataaagtttttgttaaacagtcagaggcttttattcagtggctcaaggaagcggaagaggaggatgacgaagaagaggaataaccctggagttgagctggcactcgaattctttcatgcattgtgagcgcaggatctgatttgagtgggtctctcgcaaaaatcgaaggacgatgaaaaaaccagaagggccctgggggccaaaagaagaggaaaaagccggcaggagtagcagtggaaggttgcacttgcactgctgggctaagcaatctcgctgtgcgttcgcacatcttctgcagcatgtgctgtttcgagtttataagctgcatactgtgactagtgtgcattgtttaatgttggtgatggttttactatgaccatgagaagagaaagcatgcagttttcctaatactgtttgacctttgtaatcttctggtcgtaaagagttaccgcggaatcacactggacaattcgtcgataagaggaatcgcattttggacttgggatgtgttctgtgcggataagaggaatccatctttagttctggttctgacctcacagccacgctggtcgatcgagat

SEQ ID NO: 32048 - DNA, 1371 bp, Zea Mays
aaatttctcaatttgttctatcttacctgatcctacctagtactcatgtgcccaactcaattttcttcgattttctgcccaactctattttcttctgtttttttttttgcatgattgggagtccaatgcaagaaatttctagagcccaagccaactcacattgtcttttgtgctacacaggctaggatacttcagcagtcagcacctacatttcaagaaatgtacccacacgagcaaagttcaggcatggaaacatgggttccacaacaacaaccagcagtgctacaagggacagaagaggaaccaacatcttatgaatcagatgctactgctggtcaggagccagagaccctaactgctgctgactacctgcgtgaactggaccaactccgagaaaaatccagcgatgttgacaaaatgagctttcaggatgaacatgcatcctgtcttgccacgtgcagcacaggagacattgaagatgatccatacccagcctcctactctgacgatatggaaggcataggtgaagattctggtgccttcacttcttgtgttggcactaggtggttcagggctcctgagcttttatatgggtcaacaaactatgggctagagattgatctctggtcgcttggatgcattttggcagaactgatgaaattggaggctttgttcccagggatatctgatattgatcagattagtagaatcatcaatgtcctgggcgatataacagaagaaacctttccaggctgttcaaacttgccagattacaacaagatttcctttaacaaagttgagaaaccgacaggccttgaagcatgtctgcctaacagatctcctactgaggttagcatcataaagcagctaatttgctatgacacagcaaagaggaccagtgctgttgatctgctgaatgatcggtactttaccgaagagcccttgccggcacctatagaaggattacatgtcccggcatcaaaggacgaggatgatgacagctcaactgaagaatggggtaattacagggatggtgtctctcgggttgactttgatgagtttggtagtatggatgccaccaaaactgagaagggtttcagcatacagttttcgtgacgaagaaagacgtagacgtacggaccatgcgtgccatgtccaaactaagaccatatcatggtatttatctacatgggagttgaattgctgtcaacatagacgaacatcagtaagcgatcaaaggttgtgcaatgttgctttgggtttaacatttttttagtttctatggaactttgtgattctttgtacggcagaaccagttttttccctggcaagaataaaactgtgtgtggtagtctgaagttcctatcgaga

SEQ ID NO: 32049 - DNA, 1543 bp, Zea Mays
cggctacccaactagcccttctccaccctgtgcgctgcgcgcgcgagttttctagctaggctgccgcagtagctggagctgctgctggcctcagatcaggcaattcttgggatgtgctggcctcagaggcgccgtacttgccctggaccaggcctgattctgattctgattccatctcccctgttgcaaaccctagttctttactcctcttttctcgattaagtagcagcagaatccaggaccacgaaatcccgaactagttgtttacaatttcttctctgcttcccactttccgccctctcgaaagcttctctcccttctgcacaagctcaggattatagatctggggcgggagtggcaagcgaaggacatgcagatgcacgtcggaggaggcgcggccgacagcccggaggcgacgcggccgagccgctacgagtcgcagaagcggcgggactggcacacgttcgggcagtacctgcgcaaccaccggccgccgctggagctggcgcggtgcagcggcgcgcacgtgctcgagttcctgcgctacctcgaccagttcggcaagaccaaggtccacgcggcggggtgccccttcttcggccacccgtcgccgcccgcgccgtgcccgtgcccgctgcgccaggcttggggcagcctcgacgcgctcgtcggccgcctgcgcgccgccttcgaggagcacgggggccggcccgaggccaaccccttcggcgcgcgcgccgtgcgcctctacctccgcgaggtccgcgacagccaggccaaggcgcgcggcattgcctacgagaagaagcgccggaagcggccgtcgtcgttcgcgtccgcctcgtcccagtcgtcgccgcaggccgcgaccagcccgccgcagcaggccgctcccgcttcctcgccgatcctgtcggacgcggcggctgagagggccgacgtgcgggcgttcgtgtctgacgccggggcacggggcacgggcacgggcaccagcaacagcaccacttcttcatgccgcacccgcagttcctgcacgggttcagcctgctgccgggaaaccaccgaagcggtggctggcaatggcaatggcagcagcagcagcgctagcgtcgccgccagcagcggggacgagatagcgctggcactggcggcggcggaggaggcgcacgcggcggggtgcatgctgccgttgtcggtgttcaactaggcaggcgtatagccaaaagcgaggtagggcgaatgaatagtccgggtgcttgcttatccggttccggtgttcatgcatgatcgttctcactgtcgcgatggagttgaggcgatcaacacacgtacgttctgcttgctgttcttaagtaattcctattcccatctcttttttgctcatgcatttcctgctgtgctgctgctgctgggaaatagtattagtagctgtgcttggtactgtagggtttgcagaatcctgcttggtttgtgtatgcaatgcaaatgatgacggaggtataatataatggaaggcttaatttccaggctaattaatgttcgc

SEQ ID NO: 32050 - DNA, 3482 bp, Zea Mays
cgagattaaacaagaatgaggtgctctcacctgacctgacattctccgctctcacggtggggtcgtcgtcgtcgacggcgacgactgttctgccaccgtccacccgttctttgtccagcgcggtgcccgcctccgcgccgtccgtgtgctagtgccgcactcgcggcgcacgcgggagggcgcgcggcaccacaagcgcggctcacggcactcgtggccacgcgcgcgccaccccggtgacctgagtggcctgctattgaccatccccccgcccccaattcctcttctctcccaaccactgaaccaccaccaacttcacgtctgtccagccggccagtcagttgccttctcacatcgcaacccccgctgcccgcccgctccacgcttgccacgccggcctcgcttcccacctcccaccagagacgctgctgcgggccgagtccacaccacagccggcatggaggctgcggcggcggcgccgcatctactgcactgcggcggcttcggccgcgtagcgcacctcccagcgctccaccgccgaggacagttcccacgcgtccgcgccgtcgccacggagcccaagctgtccacctccacctcctcctcctcccgcggcaggaccaggagccgtaatgacctctctgacaccaggttcggagaggtgtccaaggagatccagcgcgtgcgtaagcagatggagcaggacgagcagcttgccacgctcatgcgcggtctccgcggccagaacctccgcgacgagcagttcgccgacgacaacgtccgcctccgcctcgtcgaggtagaatccgcggacaacaatgagggcctgcctcttgtgtatagccctgaaatcatatcagcctactggggcaagcgtcctagggccgtcgccacccgggttgtgcagctgctgtctgtcgctggtggtttcatctcccatctcgtatccgatcttattaacaagaagctcaaggagaatgaagtggctcgcgcaattgaactgagagaaatcgtgacgtctctgggtcctgcttacatcaagcttgggcaggcgctaagtatacgtccagatattctgtcccctgcagcaatgaccgagttgcagaaattatgtgataaggttccttcattcccagatgatatagcaatggctcttcttgaagaagagcttggtcagccttggcaagcaatctactcagagttatccccctccccaatcgctgcagcatctctgggacaggtttataagggccgcttgaaagaaacgggagaactagtagctgtcaaagttcagaggccatttgtacttgagactgttaccatcgatttattcatcattagaaacttgggtttggtactcaggagatttccacaggtgtccatcgatgttgttggcctggtagatgagtgggctgctcgattttttgaagaacttgattatgtaaatgaaggggaaaatggcacttactttgctgacgtgatgaaagaagatcttccacaggttgttgtaccaaagacttaccataaatacacgtctagaaaagttcttaccacacaatggatagagggagagaagttgtcacagagcacagaggacgatgttggatcattggtcagtgtaggagtcatttgctatctgaaacaggttagtttgaaaagcatttgtttacatcttataaatactatccacatcttacatgattgaacatatgcatgcactcacttgctgaaggtaaggaataacggtcttcaccatcttatccatagtattcccgtcctacatgattgaagatatgtgtgcactcatgtcaccttttttagaggaagtatcttcatgttatatttatttttatttgcagttgcttgatactgggttcttccacgctgatccacatcctggcaatatgattagaacacctgatggaaagctggctattcttgattttgggcttgtaacaaaactgacagatgatcaaaagtatggaatgatcgaagcaatagctcaccttattcatcgtgattatgatgcaattgttaaggactttgtgaagcttggttttattcctgaaggggttaacttggatcctatcttgcctgtactggccaaggtttttgatcaggcactagaaggaggcggtgccaagaatattaacttccaagaattggcagcagatctagcacagataacttttgattatccattcaggatacctccgtattttgctttgattattagagccatcggagtattagaaggcatagctttggtgggagatcctgaatttgccattgtggatgaagcatacccatacatcgcacagaggctactaacggacgaatcgcctcggctaaggagcgccttgcgttacaccatatatggcaaaaccggtgttttcgacgcggaaaggttcattgatgttatgcaagctttcgagaattttatccgtgcagcgaagagcggtggtggggagaacttgaagggaaacatggctgagctggctgagttgggaggtcaacctagcaccagtctggttcctgtatttgcaatggccgtagcgcagcctgagcagccagttaaagcccgtgcggctcttgcttttctactctctgagagggggaacttctttcgggagtttattcttgacgagattgtgaaagccatcgatgcgatttcaagggagcagttgatccagatcgccgcgtcttttgggataggaaacgcggccccagtttttagcatggttcctgtcagggccagggcattgcttccgacgatcacagaggaagacagggtcatcctgaacaacgtcgagaaggttgtgaagttcctgacatccgggactgcaactccaacagtgggcggggacgtgaacgtggtgtctgtggtgcaagagcttctacctgtgttgccaggcatctcgtcgaagatcctacctgatgtcttgagccggttgtcgtcacgggtatttgcacggataatccgggagacatttttgtagagtgttctctttttgtttgccccttgctaacaggaaaactacaagtagcaatatctgcccaaacaacacgcaaatgaatggtgatagaagattgtacagcaatacaatgtatagaatttgcatctaagtaagttaacaaaagcagcaaagcttaaccaacacgtactgtctgtagtgagcacacgagggctcaacacgataaaactggagaggttgtgttggcttgacaagtgcttcgacctctgcgattgtactctcggcttctccaatctcagcaacttgctcattcgactcctccacctcagcctgcaacgttgaaatggcctaagaaaacaaaacaacgcacagcatctaaaatccttttttttatgtcgtaccagcgttgttttcaagtcagacagtgtttaaaaatgttgtgttgtgttggcttgacaagtcgcttgtggcagtctgggtccatcatccttgactcagctataaaac

SEQ ID NO: 32051 - DNA, 199 bp, Zea Mays
ccccccataggtcaagaacaggtatcgctggatgaggcgcatggaggatgctgtgatgagttcgtgagaggtctaggtcgtcatctcccagtaaactttgggttggtggatcattgtcttcatatgatgtaattatttaaactacttgtacagaactccgttatatattaaggttgtgacattcgtttctgtaccatga

SEQ ID NO: 32052 - DNA, 972 bp, Zea Mays
ggctgtctccgtccggttgtagcgaagtccgacggcgggatccgattgtggcgaagtcacgcccgtgcagtgcgcccacagcaaaaagctccgcggcggtcgcgtgacgtcgcggcaaacggcaaacagcgaattcacagcagcaaacagtgtgaatcctgcaatctccaaacccaagcccggcggcgagatccgcgcggcaggcggacggggccgctcgaccgccttcgtgccttccaattcatgacggtgcggccggggtgggtggtgagggtggcgcatggctcggcggcggcgtggcagcgcgtggcgtgcaacccggagacgctcccgcctgaccgcgtcctcgcgctcatctgctgcgcgccactccacctcctcgcgcgcctcgccgccttcctctgcgtccccttcctccccgggcccgcacacaccccgctccgcctccaccgccgccgcttcctcgtcctccgccccccggagtttgcgccgcaccctttcgcttactccccctcgtcttcctcttcttcgtcggatgaggaagaggacgacgacgatggggacggcatccacgaacacgtcgattgaggttgcttgaggttaaggctcagaaaaggagaatttggggttgaggagggaagaatgaacattggcatgttgtgctggatgctgaactgctcgcccttctatgattctatctcgtagttctcaggatatggcattatgacgacgctcattataaaaagccaggtcagaagctctgcaaaaaggataccaacggatgaaactggtttgagttgtcattattgttgctgttgtttaaacgaactactgatttttttttttatattgaaaagaagaaagtggatgaggttaaaccttggtaaagaggatggttgtgttagacttggcgagtcaacgttaaacttagtcattttaatagtaatggaatctgaaagaaattcattgtgg

SEQ ID NO: 32053 - DNA, 3264 bp, Zea Mays
cgtccctaccctctcctgtcctgtcgttctcgtgcaagctcacggtcccccacgcccacgagcgcctccgctgcgacgaagagaatcatcaggcagagcgggggtggggcggggcgcagatggatctagagaggtcaccgccagcgtcgtcggcggaggcgcccggggacggcggcgggggcggggccgcggcctgctcaatctgcctggatgcggtgctcgcccgcagcgctggtcgctccgtcgccaagctacaatgcggacacgagttccacctaggtcggatcccccgcgccgctgctgggctacgttttttcgtcatccggatctgcctgtgatggccgccttggtcgggtagcgtgcgtcaccggcgtaatttgccgtaaaagaggctgaatttggcgtagaagaggaattctgatgtgtcgttttccaggatttcatagcgtcgtcgacgtggttcagacttaataacggagatgctctgacacatgttcggatggtgagcctgatgatgctgatgctgatgggagtgaaaactgcacgtgtaagagcaagtagtgctgttcctgcataattggagctccaggttgacttgcgaatccgaggcttggatttagcggtaatttaggttgcttcactagcggttggcctgttgccttgagggttgtcgtgatttagcttagttgttattaggcctataacggcttttgaaagcagggacaacatcaaaggttcggacctttgggtcttgttcttcccattcaggtcacaccttgtgttaagtactgagtacttccctagagcaaatttagaaaaaaatgggagcttcatctcgtgtgatgcaaatttaaaattcctatgacccaacttctcaaatttcttctatctgatctgttagttgcttctaatgctgcccatcctttaagtttatgcttgttttaaccgacttaggttgtttgcaaaactgaactgatgtcttgtgatacctaactttgctaaatgatggattggttccctgtgcaagtcatttgattgacatttacagcgcgaaatacattctgagtttattggaaaatttgatcgaacaacgaaataacatattgtgattagggatttgaggacttaggttttaattctccattgaaatttatatgcactgaatttaatattttctcacacgcctgtacataattgattaatcttatacaggtcaaattgctacatatgtaattgaatgaaaatgaacctgattatcctcagttatcaaccacaacttctcatcatgtagttatgcaagtgaatatttttaactgatgcccaaacaaacctttaaatcatgccttagcaattttgtcaagcaccaattttagttcaacttgaacaccaacagcacagttctattgtcacatcagtttttttccacttatctccaagaatgtctctgtcccctcacccttgtgtgtttatgcgataatgtgcatgaaaaatacattatgataccttacgcagattgctgaactaatcaagattttgttgccagattgtattgggtctgcattcaatgcaaaaggagcgatgcaatgccctaactgtcggaagattgagaaaggtcgctggctttatgcaagcggacatcgcgcctctgttgatattgatatgggtggctgggtgaccagtgacaactatgatatcacctccgagcttccttttggatttcaatggtgcccctttagtggattcacccggctagcatccatgtttgaggagcgtgaagctgagcttacttatcacacaactggagatcgctcaagtgctgcaagcagttcacttgtttgcccatatcttgccctgcgtggttttctgcatcctgttcatgtgccttctacatctaatcctggtgctgaaagcacttcatttcgtcggcatgcaactggcttggaaggccatgccactcttgatttgaataatgctcaacttttccatgcgattgagtcaataaatcatgacagtgagcacagacatttgagtaatcttcctgtatcaggaattcctgagtattctatgactccatttggtataggactaccaagatatgacagtggcagccaacagagattcagatcatatgcacatcatcatcccctaatccataggccagcacctcgcagtgggagcaatttggtggcaccaccattggggtcggttccagctgtggtggcggcggcggagaccgcaagaggcagccacatgtaccaacgctcgtccgtgcatggcagcccgttccctcctaccaccactagaagggtgaggccgagagccttgacgatcacatcgttcatcgcagcgacgtcctcaggtgagatcggaggcccccatggattctccgctcctggagccgccatgaacaggagcgtctctgacgctgagggcatctctagacccattgaccggccgtacaatgcatggggccgggagggcttcgctccgttcccctggatccccgctgaaggcgagtctcactggtggggcaccttcaaccctgtgcagaaccatgcgcatggaggctttagcagaaggcctgctggggagcggatgccgccgcagagccaaagccacccggagaacagctatcaggctgtgccgccgtcacagaggatgccgccgttcttgtgattcgacaaggctgttcctacgtccgatcgctgtgtataaaatgaagtattcggttcggggcctgagagagcacattgagcgaagatcgactgcactgcagtctccagcgttgggacctgtgtgatgtttatgccgctggtatttcagcgcttttctttttccctccggtccagcagcactctggtttcattgagcgctgtagactgtctgtcctaactgatgttgtgttgcgttgaggaggacgatttggaaacgtgagccgaagctgaactgcatctctggtctccgggactaaaaaatgccgtttgctgctatgaaagttgtatcgatttgcgaccgcaggtcgcctgcaaatttgttagaacaggtgaaatttagtgaacacaaatgttggagacctgcggcgtttacattttttttgttggttaccgagattgtatttaaaggtcgtgatgcgccatcaagcgattgtgatggatcaatttatctccctattgtagcaatgggttttttttgaaaccgatggatgtatatgtcactagaagtaaataccagacaaatatagttgtatccatgctaatttgacca

SEQ ID NO: 32054 - DNA, 1680 bp, Zea Mays
ctccaagtccaaacccctctcctcccccgcgtcccgcgagctccgtcaccgccgccgctggcgagatgtcatcggtgacccgccctcagcgggaggccgactttgcacgcttcccgtcgtccacccccatcgtcatcgacaacggcgcttctaccttccgcatcgggtgggcgggcgaggcggagccgcgcctttcgttccgcaatgtcgtgcagaggccgcgccaccgcagcactggtgaaactgtctcaattgttggggacactgacccatctctaatgaaattctttgactgcacaagatcggcagttcgctctccatttgacgatgatgttgtctatcagttcgagtacatggaatatattcttgactatggctttgatcgattaggtgtcgattcagaggtgggccatccaattcttatgacagaatgtgaatgtaatccgtccttttctcgagcccgaatgtcagaactacttttcgagacatatggtgtaccatccatagcatttggcattgacaacgcgtttagttataagtacaatcagaaacttggaaactgtaacgaagacgggctggctatttcatgtgaacatggaacttgtcatgttgttccagacaggcctggcgcagtggtgagaagccttcccactgagccaaagtaccattttacattgaacagggcaagtatttcatgggaaaaggctgaagagctgaagaaggaacattgttatatagctcctgattatatggcagagttgcagatatttaaaaacaataaggaagaagctgatgagaaaatgaggtattggcagctaccatgggtccccccaccaaaggaagaaccaccatctgaggaagaacttgcaaggaaagcagctttgaaggaaaaggctggtcagcgtttgcgagacatggctgctgcaaagagatctcagaagatagtggaactagaaaaacaactttcctatctggaggaactaatggaacaacttgatgaagctgaggaagaagaagcaacagctattctaggtagctctggatatctttcccagcaggaaatcagatctgccattttaaaagcatcacaatctttaaggaaagcaaaaggggagtccaatggcaatgatgagaaaacagatgcctcagcagttgataagtatccacttgtatctgttcctgatgagacactgacgccagaacagttaaaggaaaagaagaaacagatattacttaaaaccacaacagagggcaaattgcgcgcaaagcagaaacgtgctgaagaggaggctttgcgggagaaacaagaagaaaagaggcgtgcggagaacccagagttataccttgaagagcttcgggcccgatattcagaactttctgataaatttgagcagaggaagcgacagaaagttaatggtagtcagacaaatgggaaccatagttcatctgcaggtgtaggccgtggagaaagactaaatgcagctcagaaagaaaggatgcggctgcttgcctcagctgcttttgatcggggcaaaggtgaggacacttttggaatgagagacgaggattggttagtgtacaacaagatgagcaaagacaatgatgatgacagcaatgatgatgatgaatcggaacttgttcgaatttcatcgaagctccaggtaccatttgatgttccac

SEQ ID NO: 32055 - DNA, 139 bp, Zea Mays
cgaaacccatcgctgggtcgccattttctccgtgattccgccctcagattccactgcgtcgacaccgagcttgtcctgcgccgtccaccttcgcatcgcaaggaagaattacgtaatccgccgcgcgggggagaccccg

SEQ ID NO: 32056 - DNA, 2061 bp, Zea Mays
gtgtgattcctcgggtagataataagacacaagacgcgctgctccaccttgtgcttcaccccgcccccgcccgaaggcagcatctgccagcagcaaccgtatacagagagagagagagagagagcttcacgactccggtcggccgtcagctcgattcgccttcccccccacctcccccgccctccgatgacggggcgtccgtgggcgggcgcgccgccgccgcctcttcctctcgccgtcgccgtgggcgtcgcggcgctgctgtcctgctgctgctgctgctgctgccagggcgcgtcggcgacggcggcggcgtcgttcggcgacaacttcgagatcacgggcgccgaggaccacgtgaagacctccgccgacgggcagacctggtacctatacctcgacaacaagacaggcgtcgggttccagacgaagcagcgctacctgttcggctggttcagcatgaagctgaagctggtgggcaacgactccgcgggcgtcgtcaccgcctactacgtacgaagcagcgatgtgctccgacctggacgcggcgcccctgcgcgacgagctggacttcgagttcctgggcaaccgcagcggggagccctacatcatccagaccaacgtgtaccacagcggcgtcggcggccgggagatgcgccactcgctctggttcgaccccaccgccgacttccacacctacgccatcctctggaaccccaagcagatcgtcgcgtgccgacttcaatgcggccacccacctccacgttcgaccccgcacccctgcactggttggttggcatgaggcatgaggcatggcacgttggatttggatacgatcccgtcggcgcccctgcaaacttggtacacgcccctgtttggggccgaaccatgcacggcgtctcgcccatgccctcccccggtcgcggtcggtccatgcctattattcccggtccacgacaccgcacatggatccactgcctgcctgcccccagggcccaggccccagtcctgtccgatccttggcatcggcagtcggcaccaccgaggatcgagatccataccctaccctaccctaccatacctcatcacgagtggtccatgacggtgctggcaggttcttcgtggacaaggtggcgatccgggtgtacccgaacgacgcgtccaaaccgccgggcggaggaggcggcggcgacggcttcttcccgatcgccaagcccatgtacatcttttccagcatctggaacgcggacgactgggcgacgcgcggcgggctggagaagacggactgggccaaggcgcccttcgtgtcgtcctaccgcgacttcgccgccgacgcctgcgcctggccgccgccggccgcgggggtcgccccgtccccgccgacgcccgcgtgcgccgcggccacgggggacagctggtgggaccagccccccgcgtgggcgctggacgccggccagcgcctggacaacgcctgggtggcaaggaacctcctcgtctacgactactgcgacgaccgcaagcgcttcccgacgccgcccgaggagtgcaagctccggcccgccgcgaccgcatcgtgatcatactatactgttggattggttcgtgcatgatgatgagatggttttttttttggggtttgtttcttggtgcgtaaaaccgggctgattgttgggggtgggggatggagaaaggccgtattatgcgtacattgtgtgtgggcgcatggacagtccggaccgatggttgtggcgttggaacggaccatgtcggccattcttttgttacgaggaaacgaggaatggattcagttttgtaccaccaaagcaattttgtttcccgttggcaaagccgccattttcacttagttaagttagacagcggaccgaacagacctaacaaactgtacagtaaggtggtgtttggttactgtacagtaaggtggtgtttggttagccatgcacagaagcggcaccgtcgtcctccagcagggatccatgcatcgcacatgcaactagtcaccaagcatcaagcaagcagcttaattagctaccacctcacgca

SEQ ID NO: 32057 - DNA, 894 bp, Zea Mays
ctaacagtttaacaacatcagctatcttctgaacttcagctggacccacatctgggcatgatgtatagccaaagtacatcagattccactttccccgaagctttgattcagtcacctcactgttttctgtatcatacagcttaaatggccctcctattgcaggtctattggtagtacatcttttgggaacattggtctgtcctgaactcttaccgaagggaactgcacgcctctcatcattgtaatgaacaaatgtggctatcccagcaaaagcaagcagagcagatggctgcaaaaccaacatatttacaaaagaacggtgttacttaaaatgctattatgactttactcaaaaaaacttgagcccatgtgagaacaaccacgattgaggccagatcttagacctttgctttgatgtgggacaaacaataggattttgttaacaccagcctaaaatttgctctcacaggaagtcaaactcaggacctaaggagtggtatttagaccacctaaccaactcaaatagagtccctttcactatggctttactcagaaaagtgagtgtagaatggtgctaagattcaattaggcaaaatattgtgaacatgtccaaagaaataaccgtaatgtgtccaaaggcataagcatcaaagaatctcttgctgattaatgattatttgacattagacaagactctagatagcatcgtaacttaaatataataagagaaatcagacaagcagtctttagagacagcatacagcaatgtaatatattaatggctgagaggttgactcattctgttcggaaaactgtctcattggcctatcatacttggagcttcccccactagaatagcctctggaatggtaaacccgcacaggtaggatccta

SEQ ID NO: 32058 - DNA, 800 bp, Zea Mays
cggccatggaggccgcaagcccgcaagcaatcaggagccggggagatgtggagacgccggcgacgaggcgaagaagaaggaggcggcgcttgcatcaagcaggctcctcgacccggcgttcaagccctccaaactatcccaggaccggctcgacaagtttaaggaattacacaagaaacggttacagataactgaaaagccgaagtataaaagaaaactgaaaggaaccgctgggagaagtaccaaagtaaccagtgattacaaattcactaatacggatgcatctgctgatagttctccaagagatgtacatcatacgtcatcaattacaggaatccaaggggatcctgcatcaggcctgtcctcgaggaacaaaagaaagctacattgggggcttgatattaaaggacgatggggaaggaaggcaaacatgtaaaaatctgaagacccaaccgcaaaagcatatccacagttccacaccccacttgattcagatttgaaaggagaaggacagaggaaagtggcaggccttttccacggatcatcaggttgcttgtaaggttcatgtttgtgacagcaaccagaaacactggagcgtggacagcagtctcagaactaagcaaaatttgatggagggtggaaccgtttcgttcagttgatccaggaggggggaaaagaagctgcagtgccgtcttctgcggacagcatgatgaattggtggatcgagtggtgactggctatttgtttgactcgcaaatgtgaaatgcctcccacttcccaggacacgtatccggcagctg

SEQ ID NO: 32059 - DNA, 1623 bp, Zea Mays
aagacatcagcctctgttatcctggcccacacatcagcctccctggagtaagcgtggtagttgccactgccgtcccctccagaagtgcgatacagttcggattcagatcgcggccggtgcgaacccacgaaggcacgaacggtagaacccgaccgagcgcggcagcgcaaacctccgatccctgctgcgagcaagggattccgctctgatgatgctaaggaggtagtccattatcaaacaatctcaccaaagaacttagctaaatctgttcttgaggaaggtggctggtcaacctttatgtgttcaagggaggatactgagaagcatgttgatgttgccattgtttttattggctcaaagctacaatcatcagacatatcgaaagataagcaagttgatccagctttagcagatacattgaagctctccttcacagaatcagagttttctatggcattcccctacgtttccacatcagacgatgagaaactggaggagtcattgctatcaggcttcactgagaactgtaaaagtggttttggaagaaaccgtatcacctacacagacacgtgcgccgtgagtggccaagatctgaagacgtatcacaacatggatgctatcaatgacttggtagtgtcaggaagaaccaacccgagtggacagactgatgtaatcgtcttctgcagcggcgggttcgagaagttaggcaccacggaatcggaaggttaggcgaaacactgctagtactgttctttcgcttccattcaatcttactgctgagaagctcgatttgtgcaatggcaccacaggggagctgctttcccagcttgtcgacttgctgaagctgtctggggctagacacacgattctctacgcttcccagccatctggttatctactggagaacccttccggctcgccagtggctaggcaccttgcggagaggactaacggtacaaaaactggcctactgagcaaatgtgacggagagtgcctagtcaaatcaactcttcttgaaggaacctttgtcggaatagtgctccttatcatcttgatatcagggctcatgtgtatgatgggaatcgatactccctccaagtttgaagctccccaggagtcttgatctcccttcgaagcagaacccttgttttgttggtctgcactgtggatagatattattcagtttccccctttgaaagcgcctttcgtataattattattatttttttactgagccatctgttatttacgatgtgctcaaacttttgacaccaaacgaatgcatgtgtgtgaggcttgtgctgtgaccagacatagcattgcctccaggtgttttctgtgaataacctggaatttcaggtgggtactgtgcatcaaataaaaaagatgaaatcttgctgttgcaccttgtgcctcaaccaaaaactgtaaaatgtcatggtcgatgttgtcagcatccatgattaggacagaaacaaaagccaacttttgtagctttcactgcttgcgcggttacggtcactgcgcagccttaccgcgcaagcaagtgatcaagtcaggagccatgcatcgattatgatctgcttctaaaagaaatgggatccactcctgtcttgatttccg

SEQ ID NO: 32060 - DNA, 3339 bp, Zea Mays
ctgcaacacaatcccccgacctaacgttcaccttcctatttatttcggagctccgcttctctctcctcccgtgcatccgccgcgggcctcctccagtcctcttcctcaccccgacgactccgcctcaaatccaatcccactcccacctagcggtccggctggcctcgcctcctcctcctcgcttctctcagcctcaggacgacgcctgcctaggcttccaccgctgatctgaccccgaaacctcgttcccttgtccgcttcctgccgtctcagtcgtcgatacttgtcccccaaaaccccgggctccggccgatctctgcgcgttgaccggggcgccgctgatggtggcgaggatgatgcggtggccgcggccgccggcggcgcgcaagttccgcgtgcggctgttggtgcggcgtgcggaggggctcccgcctccttcaccttcgccttcgccgtcgccctcgcccgcgacagcggcctcgccggagcgcgagccgccgggcgccgcgcagcccagggccgccgtcgccgcggaggtgaggtggaaggggcccagggcctccgcgctcggctcgctgcggcgtgccgcggtcaggcgcaaccgcacacgggaggacgccggcgcggcgtgggaggaggagttcgagagcgtcgtcaccctcgcggccgcgtcgcagcgggagggcgccgcgttccacccatgggagctcgccttctgcgtcttcagcgatattaacaaaggcccaaagaacaaaccatcaattctgggaactgcttctctcaatctagcagattatgcattgacggctggagagacaattgagataattcttccgttgtctatacctggtggtgcacctgaacgagcctcatcccttcatctcactctgagtatggttgaattaagagcttttcaagaaacatctgatgcatcacagcgatctgctgcaaccttgccattgtccccatcatctggcgattcttttcctggaggaaaagatgaggtttcggttattaaagcagggttgaggaagatgacagagtagaggaagatgaatttggagattcaactatcaggaagtctttcagttatgggtctctgcaatctgtcaactatgttggtggcctagtttatgcccatgcaaagattgatggggagcatgaggactggatatattatagtaaccgaaaaactgatgtcggtttccaagtagagaaagtattgccatcaaccacagagaatgggttgctaactgctaagcgcagtatacttccttggagaaagaggaaactgagtttacggtcgctgaaggctaaaggtgaacctctgttgaaaaaggcatatggggaagagggaggtgatgatattgacaatgatcgacgcttgctaacatcatctgatgaatctgtttcagagggatcaagaggagatggatcagcaaatactatggtgtcagaatttggtgatgacaattttgtcattggaaattgggagttgaaggagataattagccgcgatggccgtatgaagctttcatcccagatgttctttgcatcaatagaccagagaagtgagcgagcagctggggagagtgcatgtacagcacttgtggctgttattgcagactggttccaagcaaatcagaatatcatgcctatccagtcacagtttgacagccttatccgtgaaggatcactagagtggagaaacctttgtgagaatgagacgtatagagagcgttttcctgacaagcactttgatcttgaaactgtccttcatgccaagattcgcccgctgacagtttcccccagcaaatcttttatcggattcttccagcccgaaggcgatgatgacatgagtggttttgacttccttaatggtgccatgtcatttgacaacatctgggatgagattgcccaggcggcagagttctcatccagtgatagccctaacttatacatagtaagttggaatgaccacttttttctactcaaggttgagcatgatgcatattacattatcgatacccttggagaaaggctccatgaagggtgcagccaggcatacattttgaagttcgacaagaatacgacaattcacaaggtacctggggaaaagaaatcttgtagccccgactcaagtggaccaatgaaggattcttcaggttctgagagctctacgactgaccaggacagtgggaatgatactgaagaggaggtgcttgtgtcgaagggcaaagaatcatgtaaagagtacatcaagagtttcttggcagccataccaatccgggaactacaggcggacatcaagaaaggactgatggcatcaaccccattgcaccaccgcctccagattgagttccagtacacccagtcgtccccaaaagagactgcatcagccactcagcttcttaccatggaggccccctttgagttctcatggcctgaggcaccgccaacaatggaagtcacactaacatctgccgtctctgttgtgtagcttgtcaccctggtggcgaagaacccaaagacatgagacaacggcctgccctgatgttcggcatggagaacccttttttccttggttccctgcatggagggggagcctagatgaagattttggttcttctgtttgtactaatttgtttaatatgaactgactactacgggttattcctcctgggcgtaggagcgttctacctgcttttttttagagatgtaacatgataatatggtgccaacaagcaagaagctacgagttatgaatctgctagttacaagcagcatatgtttctcagggcctctgtgtgctgtatatggaagtaactggacctgctgtgaccaaaattagtttataacttaagttccttgatgatgcatttgcacataaaatgctgttcagtagtcgcatccaactggaagtcatttttcagagaatgcgcccacgagttgctgacaatatccacttcttttcgggattgacatgtgagagagagatggggctgtgatgcgtcaagatggttctatgcatagcttccgactcctgatcagcacagcagcactcctcctttccagtttcagttcctgaatcccaaacttcggtgtaactcttttctatagcgagcagcgaaaaccactaggagttcattttatacggaaaacaaaatggtgattttttttaaaaaaaagaatgctctgtacaacatacacaggtcgttcatcatggctgctcatacaacgtctttgcttagaacatggttgtatatcttgaatgtgaagtgagcatcattgcacgcgtccccatgatgcacgcgttggaatgaaaataccatcttcgac

SEQ ID NO: 32061 - DNA, 2321 bp, Zea Mays
ccaacgtgaagaagacgaagcagacaagatctcgcgcggaagagcgcaaaagccataaacgcctccctcttcgtcccctcctgatggagctctggccgtttcaaaaccccctaccccctgcccggtgccacgcggccgcgtccccgcagcctcagcccccggcccgcgtcgcctcgcgccggacgccgcgctgcttctgatttccgaccgttcctactcggtgtcggccggattccctagtccttgtcgtacgggagggtgcggtttcctggcgcggatgtaagtgaaggccgtggcaggggcagggaaggaatgcagaggtcgcggcgagcccttctgcggaggacggcggcagcccaggagcagagcgctgtggcggaggctgccgctaacggaaggaggaggcgtttgtacggcttctccgcctccctcgtcgtcgcctcgtgggtcgccgtgctcctcctccactccctcgtcggacacggcgacggtcaacgagatggaggaggctctactgtagatcttactgttgtagagcctactgtaaatgttggtcctattaatccggttgtacaggaagagcatggaggtgatttggagatgccaggtgatagctgtgttaattctgacgaaaacgctgtgctttcagaggatacactggtgcaagcagatcaattgtgttccagtgatgaggtgcagaatgagaacacagaagctgtaaccatagacagtcaggttgagctttcaggagatcagggtgggtatcttcctcagtcgggtgttgattctggagttcaaccaggggagaaggtagagagtaaagatttgcctagaccaccgagactatcacgggttgctcctcctgatctcgatgaattcaagacaagagcaattgctgaaaggggacctggtatttctagtcaacctggtaatatcatccaccgaagggagcctagtgggaagttgtataattatgctgcagcttctaaaggggccaaggttctggatttcaataaggaggctaagggtgcttccaacatcttagataaagacaaagacaagtacctccgcaatccttgctcagcagaggggaagtttgtcatcatagagctttctgaagaaaccttagtagatacaatcgcaattgcaaattttgagcattattcttctaatccaaaagaatttgaactgctgagcagtctgacatatcccacagaaaactgggaaactcttggaagattcactgccgcgaatgcaaaacttgctcaaaatttcacttttcttgaaccaaagtgggctagatatttgaaactgaacttggtaagccattatggttctgagttctactgtactctcagtgtgcttgaagtgtatggaatggatgctgtagaaaagatgcttgaaaacttgattccagttgagaataagaaaacggaacctgatgacaagactaaggaacccattgagaaaatttatttgaaagatcctgctggaggaaaagaattctcacaggaaacccttgatgaagatgaatttgaactagaagatgataaaccaaacggtgattcattgaagaatggtgctaatgatccagtttcagaggcaaggacacttcaggctggcaggattcctggagatacagttcttaaggtgctaatgcagaaagttcaatctcttgatgtgagcttctctgttttggagaggtacctagtggagttgaacagcagatatgggcaaatctttaaggatttcgatgccgatattgatagcaaagatgtcttgttagagaagatccaatcagagctgaagaatcttgagagcagcaaagataacattatgaatgaagttgatggattcctctcatggaagttagttgcttcctcgcaactaaaccagctggtcctggataatgctctactcagattggaatttgaaatatttcggcaaaaacagactgacatggagaacaggagtcttgctgttatatttctcagttttgttttcgcttgcttagctcttgctaagctgtctataggcatcatgtccagattttgtagattctataactttgaaaagttccataattccatgttcagctggctccctggcttgtgcacatggcctcaacactggactgctcttaaaggcaccattgcgctggttttcagctggaaaggtgtcgctgataacttcagtcagcagcactcagcggcaaagtcaatcccgaaaatactgcacaattgtgtgaagtgaaatctactcgtgctggagctctttgagttggttgatatttgagacttgagaccgtagttggtttgcag

SEQ ID NO: 32062 - DNA, 2162 bp, Zea Mays
aagccaattggcgtcacgtcgtcgcctctgcggaaaccggcggtccacgggaaaggaaagaggaaacagggaggcgacgccgtcacaattcgttctcgcgatttgcccttctccacctccccgtccatgtcgcgggaaatcacgcgcggcgacgctggattcacttagatccaacagggtaatcggcacggggcagcctctccacccattcccgcagccggttgggcgagtcgtcggttcagataatagactgggcgtgtggatccaagaggtttgatccctttaatttggattgaagtgccagctttcggtcaggaaggtgatgctggatgatgctgacggactttgaaagcataccggttcaaagaagtgttgcctgtcaccatgaggctcaacgttgggctcctagtgcccttgatggcacaatactccgcacccacatgggctactttagttgctgggttcttcatgctgcttgcgctttcgctctccacgtacctgatatttgagcatctctcagcatacaacaatccagaggaacaaaaatttgtactgggtgttattctcatggtcccttgctatgcaattgagtcatgtatttctttgataaatccaagtacaagcgtttactgtggcatcctacgtgatggttatgaagcatttgcaatgtactgctttggaagatatattactgcatgtttaggtggggaagataaaacaatagcctttttaaagagggaaggtggctctggttctgggcagtctctactgcatcacacgtccgagaagggaatcatacaccatcattttcctgtaaattatgtattgaagccctggagactggggacgcggttctacctgattatcaaatttggaatcttccaatatgtgatcataaagaccctcacagccaccttatctcttcttctagaatcttttggtgtttattgtgatggagaattcaatttacgatgtgggtacccttactttgctgctgttctcaactttagtcaatattgggccctgtactgtctagtagcatggtatacagccaccaaggacgaattggctcctataaagcctctggctaagtttctttctttcaaatcgatagtgttcttgacttggtggcaaggtgtggtgattgcaataatgtatgctttgggccttcttagaagccctttagcccagagcttggagttaaaatcaagcattcaagatttcattatttgcatagaggacagatgggcattgcttcagttgttcacctctatgtgttcccagccaagccctatgcactcttaactaatcagtcacacggaaacatttctgtacttggggactatgtatcctctgagcccgtggacccttttgaaataaaggaaagcaaccggcctaccaaaatgaagcttccacagttggaaccagatgagagaagcgtgacaaacataaaagaaagtgttcgggactttgttgtcggcagtggtgaatatgtgatcaaagattttaagttcactgttaaccaagcagtgcgaccagtggagaagcgcattgataaattgatgaaaaagaatgataagagtaagaaaagccaggacgacaactgggtgagtgcagcaacaccagagaggcctgttcgtgggattgatgatccattattaagcggaagcgcaagtgacagtggtgtcacaaagggcagaaaatatcgcagagttgtgagctcagttactgctgtggacagctggggaggtggtgatcaagcttctgacggatatgagatcaggggtcgccgctgggctgtaaaaagctaacgatttacatagcgagatggtaaattcgaaccatatcgcgtggggggaaaaggacttttaggtttgcaactgtttctgcgatactggccatttaggagccttcgcaagttcagattgtctttgtataggtacttaggtagctgataatgatatgtaacctttttgcgtagattgtttaattttcttttctttttcttggtcgagtcgtactgacatttggtattgcaaaatttgaaagtacaatagtttttttcattctttggaaatggaaacagagttcagcgagtgtgtccatttggacggatttgtatagtttcgttacacgcttacatgcatctttgatctgaaaaa

SEQ ID NO: 32063 - DNA, 2297 bp, Zea Mays
gcagcatccactcacagcgggagaggggaccggtcatcacggttgatcgtggcaaatatcaaaatctctcccattccactgcccctaccacagttccactggccttcgcttcgccacggttctcgcctcctcgcattctaaacatcgccatgattcggtggttctgaatgcatctcctgtaaccaccgggcccggagcttctcccaagcccgcgtcgccgtcgagggctgttaacctggcaacactctcaccaaccaacaaacaaacgcgcggggtcgctgtaatggccgccgccgccgccgctgtgaatgggagcctagaccgcctagacgtgcatgagaggaaggcgcagaagagctactgggaggagcactctggggagctcaacctcgaggccattatgctcgactcccgtgccgccgaactcgacaaggaggagcgccccgaggttctgtctttacttccttcatatgaagggaaatctatactggagctgggagctggaataggtcgctttactggtgaactggctaaaacatctgggcatgtttttgcagtggatttcgttgaaagtgtgattaaaaagaatggaagtataaatgatcactatggcaacacgtcctttatgtgtgctgatgttacatccacggacctgatgattgaagcaaactccattgatctgatattttcaaactggttgctgatgtatctttcagatgaggagattgacaagttggtagaaagaatggtaaaatggttgaaggtcggtggttatatcttctttagggaatcttgcttccatcaaactggagatacagaaaggaaatttaacccaacacactatcgagaaccaaggttttataccaaggtatttaaagaatgccaaacctttaatcaggatggcacttccttcaaactttctttgattacattcaaatgcattggagcttatgtaaacatcaagaaagatcaaaaccagatatgttggctatggaaaaaagtaaactcatcagaagatgggggatttcaaagttttttggacaatgtgcagtacaaagccactggaatactacgctatgaacgtatctttggagatggctacgtgagtactggtggagctgagactacaaaagaatttgtggagaaactgaatcttaagcctgggcagaaggtgcttgatgttggatgtggaattgggggaggtgacttttatatggctgagaagtatggtacacatgttgttggtattgacctttccattaacatgattatgtttgcccttgagcgttccattggatgtaagtgcttagttgagtttgaagttgctgattgcaccacaaagacatacccagaccacatgtttgatgtcatctacagtcgtgacactatccttcatatacaagataaaccctccttgtttaaaagtttcttcaaatggctgaaacccgggggaaaggttctaatcagtgattactgcaagagtcctggaaaaccatcagaagagtttgcaacatacattaagcagaggggttatgatctccatgatgtggaggcttatggacagatgctcaagaatgctggtttcagtcatgtcattgctgaagaccgaactgaccagttcctcagtgttttacagaaggagctagacaaatttgagaagaacaaagatgatttcctgtctgagtttgcccaggaggattatgacgatatcgtgaatggatggaaggcaaaactgcagaggagctctgctggtgagcagaggtgggggctgttcgtcgccaccaagtgatgcgcgtgcgtgtggctttattacaaataacatttggagctctgctggtgagcagaggtgggggctgttcgtcgccaccaagtgatgcgcgtgcgtgtggctttattacaaataaatttgaagctctgctggtgagcagaggtgggctgttcgtcgccaccaagtgatgcgcgtgcgtgtggctttattacaaataaatttgcttctgcaattcaccgatgggattcgcttcataacgtgattttacataactgaactcagagagcctatcctattgctttgtgttttgggacaatgagactgatataacttttacggtcctgttaaatatagagtgtgctgtactgatgctcctcatggctgtggctacatggttgacacgtgacatgagatttgttattttcatatttttttagaaaaatattttgcatctcaacttttgaccaatgtgcatcagatgcattgaatctgtgcatcattttataatttttttaaaacttatgtgtac

SEQ ID NO: 32064 - DNA, 2674 bp, Zea Mays
cgcgattctattctacgccgctataatcagtcgtgcggcgtcgtcggcgaccttgccgcctgcggcgcggaccacgcggttattatacagctaaccggggctttgagctacagccttctcttgtggggaggcatccccgtcctctacttcgtcgctgccctctgctgcgcctggactggcgtggagtggagatccatccacccgcacttgccacgatctcttccttctcgtgtcgagttggttgcggatttgcttactttggtgcgccgcccggcaatccaaacaatcctgcttgggttcgattcgcttcgccttcgtcttcagcgctcaagatcagtttagccgaggtgccgggcgcggtttggctgtccggaggcttttagagttactggaaccccgatgccccaagtgaagtccagctacgatggcgccggcggggactacattaagtggatgtgcggcgccggcggccgcccgggcggcgccatggccagcctccaccgcggggtgggctcccttgttcgtgacatcagcgacccctgcctcaatccctccccagttaagggaaacagaatgctgaaaccagaaagatggcacgcgtgttttgacagtgacgggaaggctatatgtttccgtaaagcccttaagttcattgtcttaggaggtgtggatccttctattcgagcggaagtttgggaatttcttattggctgctacaccttaagtactacagcggaatataggggaaaactaagagctgctcgaagggagaaatatcgttatttaattaagcaatgccagagcatgcatacaagcattggtacaggtgagcttgcatatgctgttggatcaaagctgatggatgtcaggaccttgcccaaagaaactgaaggtggagaagtcagcacaagtcagcaagctgaacatgaagtgccttgcagtttagcagaaaattcgaatttgatttatggttctggttgcacaacgcggccccataaaaggaaaatttgtagtaaatcagctgaaacagttggtttcaatcaacataatgataactctagaggttctggagattgtgatgtcattggtgaaccaaggtatgacagtgatgccttcatcgattttccttccctaactggtacaaacttggtcgcaaatggtgacggggatagcaatggagttgaagaaaatccttgcaatttcttggtctctgaacatagagtaaggccccatgatgaacacatgcacagcttccagatcaataataacatagatctcataatagagtcaaatacattctccaatgatatatttcgacctagcagtagtgactcagccatctttcactcagatgcgtacaagcatgatagatggttagacgatactggctatagtgaagaaattatagattccttgaggatatctgatgcaccagaatcagatttagttgatggaatgaaatcaaatggttcaatagctgacaaagatagagtctctgaatggctttggacactgcatcgaattgtggttgatgtggtgagaacagatagccaccttgatttctatggagaatcaaggaatatggctagaatgtctgatatacttgctgtttatgcatgggttgatccttccactggatactgtcaaggtatgagtgatctgctgtcaccttttgttgtcatatatgaggatgatgcagatgccttttggtgctttgagatgctactgagaaggatgcgtgaaaatttccagatggagggaccaacaggagttatgaagcaattgcaagcattgtggaagataatggaactgacagatgctgaattatttgaacatttttcggcaattggtgctgaaagccttcattttgcttttcggatgctgctagtcctttttcgtcgagagctgtcctttgaggaatcacttatcatgtgggagatgatgtgggctgctgattttgatgaagaagcagtcaggcatttagaagagaactgcctagaaccattgctagtagatctgagcaatggcttatcatctgaagtcaaagaagtgcatcggatcaacagttccacaagaagaaaacccagaaccaggaaatgccatagtagaaatggtgaaatctgtggagcttgccaccctggaatgaaatctagtacaagaaatcatctctgtggcttgtccggtgctacaatatgggcaagacctcagcagatgccacatccaagtgcaagtgtgctagcaaagggtggagattatgaacttcctatattctgtgtggcggctatcttgataattaaccgccagaagataataagagggactcactcaatagatgatgcgatcaagatgttcaatgataatgtgctcaaaataaatgtaaaaagatgtgtacgcttggcaatcaagctaaggaagaagtacttgtacaagtcattgaaaggtggctctagtgatgataaagaaagctgaagaacctgcacttcccttgtagaaaaaactagatatttctccatcatgcattgctatctaggtgtgctggatcagtattgacctgaagtatggtacatgtccaagatccggcattattcaggattgcaagatgaagctgtggaattaaagaaaagaaatcaagtccactgaatggttgtatttctggtggtgtcattgttttttt

SEQ ID NO: 32065 - DNA, 2353 bp, Zea Mays
ctccagtcctccctcccggctccctcccagtacccacggtcccaccccacccggagaaaacgaaacaaaccaaatctcgctgcgagctgggcggcgagggcgcgcggcgccatggcgaggagcaggacgtcgggcggcggcgagtacgagagcggcagcgaccacgacggcgcgctgcagaagccgctgctgcccaacagcgggagctggtaccggatggggatggggtcgcgccagtccagcctcaacgccgccggcacctcctccatggccgtcctgcgcgagtcccacgtctccgccttcctctgcacgctcatcgtcgcgctcggccccatccagttcggcttcaccggcggctactcctccccgacgcaggccagcatcatccgggacctcaacctctccatctccgagttctcggtgttcggctcgctgtccaacgtgggcgccatggtcggggcgatcgccagcggccagatggccgagtacgttggccgcaaagggtcgttgatgattgcagcaattccaaacgtcattggttggcttgcgatctcctttgcaaaagactcttcatttctgtatatgggacgcttgcttgaaggattcggtgtcggtatcatttcctatgtggtaccggtatacatagcagagatatctccacaaaacatgagaggggctcttggctctgtgaaccagttatctgtaacccttggtatcatgtttgcctatttgctcggcttgtttgttccttggaggcttcttgcagtaataggaaccttgccctgcatagtgttgatacctggccttttcttcattccggaatctccaagatggctggcaaagatgaatatgatggatgattgcgagacttctctacaagttctgagaggattcgatgctgacatcactgcagaattgaatgatataaagagagcagtaatgtcagcaaacaaaagggctacaattcgtttccaagagttgaaccaaaagaaataccgaacgcccctaattataggaattggtctacttgtgctgcaacagctaagtggaataaatggtatactattttatgcaagtagcatcttcaaagctgccggtaagctgtgcacttgttcactggcttgtgattttcattactagttggacatcatatttttaggtgaggaagcactgtatctagaaaagccaaaacgtcttatagttcagaatcgagggaatatctaattgataattcggaacagtgtattggactacaaatatcaaaacagcgaactgggataaagtggacttattgttcctaatgcattataacaggttcagaaaagctaataactgtacacccttataagtggtaacatggtttatcattctcataccttgatgaaagacggcacttcgctgtttatattatttcaaaagcatttaagcatcacgtctttgtgtttgtctacaacagtgctggtgtagttggtttagattttaatttaacaataaaaggtcttcaggtctgaaggacagtgacttggacacctttgcacttggagctattcaggttcttgccacttttgttacaaccatgttcttggacagagctgggcggcgaatcctccttattatttcttctgctgggatgactctaagtcttcttgtagttgctattgtattttacatcaaggataatatttcacatgactctgacttgtatgacatcttaagtatggtgtccttggttggtgtcgtggcttatgtcattgccttctccttcggtatgggtgccattccttggatcataatgtctgagatcctcccagttagcatcaagagtcttgcaggaagcttcgcgacccttgccaactggttgacatcctttggaataacaatgacggcaaatttgctgatcagctggagtgctggaggtacgtttacctcctacatgattgtgagtgccttcactctcgtgttcgtaatcgtttgggtgccagagacaaagggaagaaccctcgaagagatacaatggtcgttccgctgagcaccaacatcgtcaaaatgcgaaatggttcttcgagttttgtcgctttagatagtaagaatatgctcaaatcactcgacgaaggccacacattctttctgttcataaaaggtcttgtacatgagattgcatacaccgttgttataactttacccccaatagacttgtaaatgcttgtgcagtaactcttatattacttttgcttcaacattgtaagatagaagacttgccaaaataaaatctgaaccttgggtccaatattccatgtaaacacgagcatgtttcttgatcaatcaaaatctcaagcatttttgttgaagtctg

SEQ ID NO: 32066 - DNA, 543 bp, Zea Mays
cggactggccggcagccaacaaccatggtcgattttagtgctgcccctggcgctggtcatccccataaatcgtcccgcctgagcgtccttggcgattgtctagctaagagaaagagagagagaggcaggacatatgagtgggagccgccatcaccgtgtgttcgggccgcccctgtggatacccatcattggcgtggttcgggctccaatgtggccatccgagggttgatcagaccgcacagaagctgtgtgagggagtaatcggtgggaagctaactggaaccataggaattcctcaccggagttgggaacccccgccgaactcacgctccgccacgtccaacatcgatcacgctgcgattcacggtcaagaacaggtgctactggatgaggcgcatgaagaatgttgtgataagatcgtgagaggtctaggccgtcgtcttccagtcaactttggttgctggatcattatcttcgtatgatgtaattatttaactatcttgtacagagctccgttatatattaaagatgtgacattcgttt

SEQ ID NO: 32067 - DNA, 4542 bp, Zea Mays
cttctcgccatacagagagactccctcacgaaaactcaccgtctcccgctctcgatttcgaaacactcgccactcttcgcctcccgttccccagcccagacccgaagccctgcgcctccccctccgccgctcgccgggcgagatgtccccgccgttcgtgttcccctcgaccctgcgggatctggagctggacaccgacggagacagagacgaggagccctcgctccggccgcagaaccccgtcgccgtcgccacgctccgcgctgccgacctcgaggagttcgtcaagggtgcatcatttgatctttctgataaggagctcttctgcattgaggaacaggaggtgtttgatgccatctactctatcgtgcgtgatttcaattgcctacccccagcccttaagtttaacattgttgagaccttgcgctccaacctcagtgtccttctacccagcatagactcactttcccgggcatccatgtcatccccttctgatgctaccgaaatcactgaccgcattgcctcacaccgcaatgccctcaagatctactccttctttctcatttccattgttctcaccgcggaagctggcgctgaaagctgcacagcggctaaggcaacagcacatggtcgaaagaagaaccatatatattcttggaactgggaagcacaaagaggcaggatcatgagtctagtcgctaattctcttgaagctaacctttcgctactttttggtcctggaggaaccgatgaacgatatctctcttttgtttcgaagtgtacttttgttctctgtgaaaatcaaaatgtgttaaaagatgaggatacaagaaatggcctgtgccggataattggagcaattgccacgaagcatcagaggatttctcaaatcagtgcatctgtttcacatctaatacacaaatttgatttcactgttcctcatcttgcggaagcagttgcttctgcggagaaaaagtttggtgatggaagccttgcaatttccctgattagggaaataggtcgggctgatccaaaagaatacacgagagatagtgttggtgcggataatgttgggagattccttgtagaacttgcagaccgcttgccaaaacttatgtcaaccaacattggtgttctgatacctcactttggtggtgagtcatataagatcagaaatgctcttgttggagttttgggaaagctggctgcaaaggctttcaaggatgttgagggtgatagcaatgctcggcttcgaagtaagcaggctatgctggagattttgattgagcgctgtagggatgtgtcagcatacacaaggagtcgtgtgcttcaggtgtggtctgagctttgtgaagaaaattctatttcaattggcctgtggaatgaagtggcttccgttgcttcagggcgactggaggacaaaagtgctattgtgagaaaatcagcattacagcttcttataacaatgctgcaacacaacccttttgggcctcagttaaggactgcaacctttgaggcaactctagaaaagtacaaggaaaaattacaaggaatggagccttcaaattcagacaaagatgaggccgcaaatgatagttcgcctggtgaagtgatcatggggcaagatgaaagtgtcagtgatagctgtttagcatcaagtcaggatcaaaatgaccgtgatgctacgattgtggatataacaaacttggaacaaataagagctttagttgcttcacttgaagctggtctgcggttttcaaagtgtataacttcgttaatgccaattcttgttcagttgttggcgtcatcctcagctactgatgttgagaacaccatccttttactgatgagatgcagacagtttcagatcgaaggatcagaagcagcactcaggaaaatgttacctctggtatcagcactgtgggactatttttgctttaacataaatggagtgagaccagtgcaaagccgtggagctctatctattctttgtatggctgcaaagtcgtctcccagcattttgggtaatcacttgcaagatattattgacattgggtttggacgctgggctaaggaagaacctctgcttgctagaactgcatgtcttgctttgcagagattatcagaggaagacaaggacaagctgataagtaataatagtagagtatttgctgcattgcaaggtttggtaacaagcttctcgattcctgagaaaatatggtatggagctgcagataaagctataagcaccatctataccctacaccctgcacctgaactttttgctactgagactgcaaagaagtctctcagttctgtattcagcgttttaggaacaaatgatgtgtcaaatggagatgaagctcagaatggtgcctctctgtcatcagtatcaccttcaaagctgggtagatttctttttgttattagccatatagcactaaatcatttggtgtacattgagaattctgttaggaaaattcagaaacagaaacggaagaatgaaaaatctcagcccaccactgaggatctccaacctgacgtgtctaaaagtttggaggcacaaggcataaatgccgaactgggacttagtgcaaccatagatattgcaatcgagtcccttgctgaaagagcagaaaaggaaattgtttgctgttcttctgaaaagaatctcataggacattgtgggccatttctctcaaaactctgcaggaatcttgcattgctgcaaaagttcccagaccttcaagcttctgcaatgcttgctctttgcaggctaatgatcattgatgcagagttctgcgaagcaaatcttcaaatcctgtttactgttgctgagagtgcgccttctgaaactgtccgatccaattgcactatagcccttggtgatttagcagttcgcttcccaaatctcttagatccttggacagagtatatatatgcccggttacgtgatccttcagtgtctgtgaggaagaatgctgtgctggtcatttctcatcttatattgaatgatatgatgaaggttaaagggtatataaatgaaatggctgtaagaatagaagataaagatgagaggatatcaagcctggcgaaactcttctttcacgagttgtcaaagaaaggaagcaacccaatttataatcttcttccggatatcttgggtagactatgcaatcaacacctcaaagaagaaacattttgcaatattatgcagttcttaatcaactcaattaagaaggacaaacaaatggaagctcttgtggataagctgtgcaataggtttgctggagtaaatgatgtcagacagtgggagtatatttcttattgcctttctcagctaaccttcactgaaaagggcctgaaaaaactcattgataattttaagatgtttgaacatgcattatctgaagattctgtgatgaaccacttcagaagcgtaatatcaaagtgcaagaagtttgcgaaacctgagctaaaaatttgcattgaggaatttgaggagaaacttagcaaggttcatcaggaaaagaaagagcaggaggaaacaacaaaaaatgctgaggcacacagacagagaattgattcgcttgatgaatttctggttactaaggaagttagtgagaacagtgggaattctgctgaagatgaaactagcgaggtagttgatccttctgtggatagcagcacggaacatatggagaacacgccagaatgcagtgtcaatactagtgctgagaattctcagacaacagccccacttacagaatcagaaggtggcggtgaagagattcaatccgcacaacctgttagcaaaggcatgtcacggttaagggcaaagaaaaccagagatcctgttgtagatccttcggtggaccgcagcaccgaatataaggggaacacgccagagcacagtgcggatactagtacggagaattctcagacatcagtcccacttacaggaacagaaggtggcagcgaagagattcaatccacacaacctgttggcaaaggcgtgtcgcggtcaagggcaaggaaaaccagagaccccgttgtagaggactcagcagctccagtgagacgcgccacgcgttcaaccagaagacaaggaagctgatggtgcagcaaagcggcagctcaagccattccgtgccgatctcgcctcgaggtcccggagtactggaccacagcaaagcggtgcctggacgtctggatcggagagttggctggctctatcctttttgcgtgatgcgtgtcggtctagttttagctcgctgattcccggacaggccaataatgatctctcgtgaatctgtctaggggcagtatgtttaactgctccatacgaggagctcttgtgtttggttgttgcagtaggtcggctttcatatggattgtctactacagacattgctcccttggggagcgtatgtataatatctggcctgatctttttgaggcctgatgacgctatgatatttttgaacgtgttgttcttatgaatccagcaggctcagctgatttccagcctttcaatgtgac

SEQ ID NO: 32068 - DNA, 286 bp, Zea Mays
ctcgggttttgtttgctaaaaatgattttggcgatgtttacatccggaagaagaaaaaaactagcgcttttgcttttgagttatttgggcgtggtctaatataaataaatatacatctatattaaagccatgtatatatatacctacacctaaaaaaataagagaagagaaaagaaataaagaatgggagaaaacaaaagaaaacccttttcccactcgtcctggccgtcgacccatttatcaggcacgggggcgttctgctccatgggccccgcccgtcagtcag

SEQ ID NO: 32069 - DNA, 427 bp, Zea Mays
taacgtttgctccgtcctgacagaccccagcatgttgtatttgaagagcaatttggcagtgggagattgttggcctacatttctgctcgtcctgggcagtgtggccgagctgatggctacatccttgagggtaaagagctcgagttctacatgaagaagctccagaggaccggggacgccgaggaccggggagacgacgaggtttcggggctgcgtgtggcggccgaggcgtgggcgacatttcggaggcagtgaggcttgtgtgagggggcgagaaggagggaggcagaattacggtgcacagatggtctacgttagagtcttgtagagtagtagagattatcgtaatattatatattctcgttaaaacagttgtacataagttattgtagtattatatatttccgttgcaacgcacgggcactca

SEQ ID NO: 32070 - DNA, 1738 bp, Zea Mays
agatcgtttcttttcgttcaggattcccccttccgtcggctgcattcctacgcgcgtgttctgtctgtttctctcggccccctctcgctctccgacgactggtgggccgctgccggcgccgccgccttaacccaggtgttgaggctttcgttggtctcctcgccgtcgacgagcacccaccagaacttttcatgtaacaatcagtgatgcattttggttgtgttgccagtaaacatgatgtttggtgttaatactggtttatgcgcttcaaagtcctattaagttgctgttcaattgatcgacactcttaagtgtaggatgaattctaaacgtaggaggagtcatagcccagttgaatacaaggaaggccgtgacaaagattatgggacttctggaaagaaggataagtcaagagatctagatgacacatgtgatgctagaagaggtcatgaaaccgataggcactctgataagcattcctttggaacatcacgtgaatccaagaagcatgatgactatcggaggtaccatgataagtatggtgatgattatggtaggagccatccaagagcctctcggtcagaccgggaatcaagggctgatacttattatgatcgctcaaagcatgataacacatctggtagatcacgtggtgatcagcgagatgttggcagtaggtacggagaaaaatctgttaatcgagatcagaggagtataaatgaaggaaagcaggagtcccctcgtggctatcaaaagaatgatggcggagaatacaataaacatatggatgcaagaaagcaagagtacaaaggttatggagatgatagagatcattacagggttgttcgtaagaacaaggaaaccatcaaagaggaggaggactcgaagaggagaaatggaaaggaaattgagaaagaagctttggtggaaactagggataagaaaagaagtttattcagctctactgggccaaatgtggataatccaggcgatgtcaaactatcctcagccacaaatgaagccttggataacgctgcagaaaccgtagacggtgtgaatgcagctaaagttgcagctatgaaagctgctgaattagtgaataggaacattgcagcatttggtgctggaactgggcgcctatcaactgatcagaagaaaaagcttctttggggtaacaaaacgagtaatccctctgaggagacaagtaaacgttgggacttattttctgaccgtgagcgccaagagaaatttaacaaactcatgggtgtgaagagcagtgccccagttcaggaaaacacggtcgagaacaaggtcgggagctcggcggaagaagccaagaaactggaggagctcgacaccaacctggagaaacattacatagcaggcctccgcaggagagatggcaggacagtcggccttggcctgtagaaactctgcttgcagttgcagatgctgcggcattgaaaaatgcagagagcttgctctgtacaatctacagtgccttgtttattcttgcacttacaaaatttcctgtacggcttacgttgactgtttccgggttatcttgaagctctagaacatgtgtccctgattgacactcctgtactgcgtttgcataaccccgtcattcttgagtagtaattcaccggttattgttttctctttgcatccaaagatgttttgcttgaggcctaactatgcctatctagaaaattggttacgactaacgcaacgcccg

SEQ ID NO: 32071 - DNA, 1648 bp, Zea Mays
tcactagacttaaagtgtgcgaaaagtatttaaaaacacaaggaaggggttgcatgcaccggggcttgcctgagtaacactaggttagtgtttgttaggtggcgaccacttggcgatcatcttttaacttggcactcgttccgatcatccatccttacgttcgtccttcagcttcaccatgcggagtagcccacgcttggggccgacttggaccgtcttccacatcacgcgattatttatcgtacctcatgagatgcatgatgcacatgtatgagcacatgtataacgtgtataatatatataatctacgctaaaaaggatgaaacacttaaaaccaagcattaaacaccatagatatcacagcaggacatcaactacatccattaaccaaattgatataataacactagaaaatctatttttattcctagctttttattaactctttaaattgtgtatcttatatattaataaaacttcccatttttaacacctacagtcccgcaacactaagacctattgagacctcttttatcctacggcatcgaccaatttactaaaacgactcaggcaatctaataaatattagacctagtcagatcatttatttatccactcgcacgaataacaaatctgcttaccctgactaatttgacgagatagtcagaagcatggctacgggtttcggttgacgtcaccaggggcctttttttcttcggtaatcaactgctgaagatcttttcctcgtctgaataattttgacgaatcgaacttgagtcgcgcaggatgtccgagctttttgtcgcgcagtcggtgaatattactcggttagcttcgtcttcacttgactcttggaatttcttgatgacacgtaggacgatgacgagattaaacatgaagcgagctggcgaggacacgaatctagtgagggctctggcgatgacgaagttacgagcaagtgaggacgggttcaacagctcgacgaacacgaccacggttgtttgttgatgactgacgagctcacgacagaaacgataacgacgtggaatgacatactgaaatagggacgctgcaacatgggacgttttggtgagcagcaagcacgacgaggacacacaggcttgcgacccaggcgaactcggcacggaaacttaacgcgcgcagagaaacagcatggcacagtggagcacggaccaagcgccagcgagcaaggaaatttcgcgcgcgcagggaggaaacaccagagagacgtggctgctggcacgcacagaaaagatcgcgcgcgacgtagggacgacacaagaggacgcacgcgcaggggcgagctcaagggagacaagctgggtgcggccatggacgtgacggggaatacgcagggcaccggcgcgaggaagcttgagctccaagcgagcagaggagctgggggtcgtgagctgcagcaggaagggtccggggcgagctcggccgggcagagggaaatcccacagcgagggagcacggcttgcaatggcgagtagaggatggaagccgcggggaagagagaagcagggagggcagctgggagtagggaatgcacggcggctggagattgaggataaggaaactgcgcgcggggaaggggataaagaagacacgtcggctgcatttt

SEQ ID NO: 32072 - DNA, 1152 bp, Zea Mays
cacgtcagcccagaagacgttcgacgaaggtcctgacgcgagagcgtggtcttcactgacggggtagggacgcgcaggcaggttacggctcccgctctcacgcccgcgcacgcgtaactgccggagcagacacagcggcagcagacgctggggtaccatgactctggaggatttcctggtacgcgccggcgtggttcgtgaggacatggggcagcagaccctcgtgctgcagccgctcgcgcagggtctcttctcccaggggaatgcggtcgcgctcgcgccgcagaccatgcagctggggaacggggtgttgaccggggtcgtcgggcaggggctcggaggagggatgacggtggcggtgccgacgacgccggtcgtgttcaacgtgatgaggaaactggaggcgggggatctttataggccgctgcagctgacgatgcccatcggcactacactgagggtgaggacaagtcgagccgaaaggaaggtggtggagaggatgaagaggaggatgatcaagaacatggagtcggcaaccaataatagtctgaataagcacgcatacataattgagctggaagctgaggtggcaaaactcaaggacctgaatgacgagttgcagaaaaagcaggtcctgagttcaaatcgtccgacgccaaagcacaagatccggtatctgtcgcggtcgttctcacatgagctacggtgccactatgttgaaatgctgaagaagcaaaaggatgaggtcctggagcgaatcaacaaccaacatggaccgaaggcaaagaaactttgtcttcaccgcaccctgactggcccatggtagcctgctgaagcttgcacagacctcaccgaagtcgagatcgtcggcttagatgtgctcgtgtgtataccagatgatctcaagttgttctgtgacgtgggttgttgtctgtgcctgacagttcaccgtttaggttcagctgcgcaatcctcatataaacaatgaggcgtactatctaatctgttcatttaactccctcctattgccatggtgagatcatgcatgtaacttaggccttgttcgtttgtgtcagattgtacccggaatcgttccagtttatcaaagtctatataaattagagaatcaatccggttaggaatcgtttcggc

SEQ ID NO: 32073 - DNA, 1871 bp, Zea Mays
cccacccctcctccccaccgccgccgcaacaaatccgcgcacctcgatctgctcaagtgagcgtggctcaacgagaaggccacgtcagatatcctcagcttcgaatcgcccctcgcgttacgtgtccgcgagcagatccagcacctcatacgctcttctccctcccccttcttgaccacgttcctccactcccccccatagctctgggatctggccatggctccctctcctggtgtcgtgtcacccaggaggcggcgctcgatgacttcgtcgacgatggcgttgacgacctggtggtctcgctctaccagatggacctcgatctcacgctcttcctcctccgctcctaactcctcccggagaagatcaagaagtacacgatgcatatctctagggccacggccgaggcgactggtgaagttgcggcaatctgatgcgggaggtggccgacctcatccttagcttccctgacgagacgcccgtcgtcgtcctctctgccatggggaagaccaccaataacctcctcctgctaacaaggatagatgcgtgtgtgcctgattcgttgtctgtggaggccggagagaatgcggtgagctgcggtgcccccaaggcgtccgaaatccctaagctcgctgtcatcaaggacctgcatcttaggacggttgatgagcttggtttagataagtcgattgtttcagagaaatttttgaagtacttctggtggtgctggaacaagttgaaggagaagactgatgatgatattcccatgccagcctatttcaggttcctcgcgctgctcgcattcaagatattttctgctgagcaggtagatgttgctgttctcgaggttggcctaggagggaagtttgatgcaactaatgtggttaaagcacctgtagtttgtggcatatcttcccttggatatgatcatatggaaattcttggtgaccaaatcctgttcttggtgataaacttggtgtcgataaacgggttaattctgttggcaaaattaggatgacacaggtgacatgaagatgccaagtcggtgcatccatactaattgcgactttggtctgtttggacctctggtaaacgacgtagttgttagttctcatgaatgtcatgttgtctcgaaataaagagcttctgtccgcacctaatcgcctaaaatggaaatgtttgactcattgtttaattcggggggaagctgaaggtggtctgatccggtaagagatcttaatctgcattacacttgttggattttgatgtcgcttctgggagtgtttgattgaattctacaccagttctaggaagagaaagcctgaccaagtcatcatctccaggtttgttattgtttggatgcaaaaatcgtcgttagttaacttttttgtgttgaagtaactgtttggttgagaaaattagttgcctatcttctattttctctgttttgttatagcagcaagctgatttgtgtctaatttatagggacgatgttagcgaaagtcaatttaatcaggtgctgaacattgagttgcaacaaatcatcgatggagactgtcaccgcagccagaaaaccacggtctcaatttgaggagcctttccatctatgtttgttagaaggcatataatgcctatttatctcttgtattcgaacatttggcaattaagaaatagaagattacttccccaatatcccttattcctaatctcacctttcacggcttctggtgaacaatcacttgctattaccgactgacatgtccactcctcatatgtgagatattggggttgatatatatgttgttcgtttccatgtaattattgtgtactaacatttattgaataatttttacgccgtaacaacgtacggg

SEQ ID NO: 32074 - DNA, 929 bp, Zea Mays
catcgtccgactccgacggcttctattgcagttgcagtgtctcctgtgccttttctagcacagattgtaggtacttcccttgtgcttcaatgcggagttgcaaatgtctttgtacctgttgaaaggcgtcgtttatgtgtaaggtttaagtggctagctggtgatccatttccttcaagtggtttgtccattgccatggtgcaaccaatcactgaagagcagaaagggcattcagtattaagcttaattggaggccgataactgctagagtctggttttataaggaagacaagtgaggagagaatttcgaatcgttagaacaaacactcaagcctggaccaatcctggcagcaactgaaaagagggaaacggaaagtgggtagacgaatccgatgggctgtgcatctgtatggagtcctctgagtttggctactatctgttctacataaggcgcagaaagttggggcttaaaaatgacggcgagcgcgcacgcgatcccgcgggaagggaataaggaaaagcgatgttgacaaagctggatgggaatcctgcgcttttttggaggcgaagatgagaaggaatatatcgcctgtgtcgacctcgccggcctgcttcttctgttccgtggcttggttgtgctcccgctggatcgtgccagccgccagcaggatgatgagcacgtgtgaaccctggcgtgggtatgttgttgtttgctctgggagtgttttgctcagtagtcgttctttgtttatttgtacaaactcgtccatttgtgtcggttgcagaaatacgaaaacacttcaaatggtacgaattggaatttggaaagtacagagtatagaccgctggataagctgtttttattgtttggcgtaatgaactggtgatccatatgttcgccttaaaaaaaaagacctgatggttcaagt

SEQ ID NO: 32075 - DNA, 2520 bp, Zea Mays
gatgtgaaaaaaattgagtgtggaagagctcaaaacactcaatttgctgcaaagaagcttgatagaaggcttttacatcttggtgcagaaccagttctagagataggtcttggagatgaccaacacccttcaggatatgaaggggctttagatccttggttgctatctatgtggaagtctctgaatgaaattaatccgtcactcttacctagagtgtctgatatcaatgatcctaatttgagttttttgggggatccaaaagttcatgtcatttattactcttccaatgaagttacacaagatcctatacttttggattccaataaaataataagtagcgcaagatcaatgtcccctgccctacggttccatgctgatggagagccaccttacatgcttcaaatggtaaaaaaacagtgtttgactaaggagggtactgatagagatgttcgccactttgaattggaagatccatcttcggccatggccatcaactataaaattggtgatgctcttgaaattctaccaagtcaaaatccatcagctgttgatgccttcattgaacgctgtaacttggatccagattgttacataacgattcgagtgagaagtggggataaagttttcaagggttcagttgagcagatggaccgcatcaaattaagaacctttgttgctttgacaatggatgtcgtgtcagcttcccctcggcgatatttctttgaggtcatgagcttttttgcaacaagtgaacgtgaaaaggagaggcttcagtattttgcttcaccagaaggaagagatgatctttaccagtacaatcagaaggagagtaggactgttctagaggtgttggaggattttccttcagtgcaaatgccttttgaatggctggtgcaactaacgcctccactgaagaaaagagccttttctatctcatcatccccactggcacacccaaaccaaatccatttgaccgttagcgtcgtagcatgggttactccattcaagagaacccggcgtggactctgctctacatggttggccgggctcaatccaaataaaggcaatcttatcccgtgttggatacaccaagggtccctgcctcctccacgtccattggttcctctcgtgttgattggaccaggaacagggtgtgcaccattccgtgcatttgtggaggaaagggctgcacaggctgcagctgaaccaacagccccggttctgttcttcttcggctgtagaaaccaagaaaacgattttctatacaaggatttctggctaactcatgcgcaggatgagggggtgttgtcctcgaaaaggggcggtggtttcttcgtcgctttttcccgggatcagccgcaaaaggtctacgtgcaacataagataatggaacagagttcaagagtgtggaacttattactgtccgatgcagtgatctacattgcaggctcttcgacgaaaatgcctgccgatgttacagctgcgctagaggaggttatttgtaaagaaggtggtgtcaagcaagcggatgcttcgaaatggctcagggatctagaaagggctggtagacttaacatcgagacatggtcatagttgtgatgggcaagaatagagatggcaatgggtacccgcgacccaatacccgatgggtatttactccattagggtatgtatgtgggctaaatattctacccgtgggtctgttattgggcaaaaatcttcacccaatgggtaaacgggtattagaacgttccgccttcacccatacccgttaacccgtgggtataaaatacccaatataaacttagtccaagcatgaactttgactttagtcatccatcttttttactctttaacaaccttttaggccataatgtcatagaaggcttaacgacaatttaatgaacatgtaatgggacatgtaatgtgctatgtagtactatcctagtgttactactttatccaattatctttggtgtgttgaatggatggttaaatgattctagaaattttgtaatggtatttagatgttgacatttgtatcatataacattttgatagatgtttagcttttatgggtacgggtgacctgatgggtgacccatacccacatgggtatgggtatgggggtaaatccatacccgccagtgtatatgggtgacccgatggggttatttttgtgttgtgggtatgggtatggggtagtaatacccggtgggtatttacccattgccatctctaggcaagaaagtacatattatccatgtttgctgaatatggaaccagtgagaatttcatttcactgtaaatcaaaggcattggaaatgtggaaacatgtagatgttaaagcatccaatacggagaaatagttggaggatgatctaaagtttcctcatttagccctctgtacgaaacaccatttcatttgattaagtgagaacagtaattacatcagcttttgttgcatctgactgttagtgtgcattcaactcgtctagccctgtttcagttcagttaacg

SEQ ID NO: 32076 - DNA, 1545 bp, Zea Mays
gtccattgccctgccctgccctgccctgcccagacactggtcaagcgacgcaagggaaggatgtggttagctagcagcctgaaattctccgcccatcaactcagtcagcaggaagcaacccgcctagcgccctcgatccaaggacctcagagattcggccgtcgccactccggggccaagaaatgctcctcctgctcttcttctctgtcctcgccgccgttgccgccttcctcctcttcaagttcgccaccgtcgtcgatggggacttgacgctcgtatcccgcggtccgccgctgcgggagagggtcgacggcaaggtcgtgtggattactggagctagccgcgggattggtgaggtgataaatttcctgactgcagtgttattttttagcgagccttatgcctttgttagttcattgaggaatggggaggttcttgcaatgcacttcgcaaatttaggagcaaagctgatactatctgcacgtaacaaggacgcgcttgcgagagtgaaaaaaaacatcctcagcaagaatccagatagcagagttgaaatgttacccatggatttatcagctggtgaagaatctctgaaagaagtcgtacatgtggcagaatcatttttttctaatgcaggcgttgactatatggtccataatgcagccttcgaacgtcctaaacggagggctctagaagaaagtgaggaaggtcttaaggctacattgaatgtcaatgtcttcggaactattactttaactcgccttctagcaccttacatgcttgatagagagatgggccattttgttgtgatgagtagtgctgctggaaaggttcctgctcctggtcaggccatttactctgcctccaaacatgctcttaatggttactttgcttctctgcgatctgagttgtgtacaaaaggcattaaggtcactgttatctgccctggaccgattgaaacactacaatcttctgctgcagcttcttcatcgcaaacacattctgctgagaaacgtgagaaacgtgtttcggtggaacggtgtgttgaactgacaattgttgctgctactcatggactgaaagaagcatggatatcatatcagcctgtgctgactgttatgtacttggtgcaatacatgccaacaattggttattggctaatggacaaggttggtgcaaaacggctggatgcggccgcaaagaaagggaacacgtatagttggagtctcattttcagcagcaagaagtcagcatgaccaaattgctcgtagctgctatcaccatctttctcgattcatatggtcacgtgacttatattgttgtacgcaaaaaggtcggcctgaaaaggatcagatcatgtatagaaacaatatagtttagtgaaaaattggacccgtcactatgaccaataattatgattcagttgtgttagatttattgtgtggcgtaatgatgtactgtgtgtaatatatctttgtaataagcatatacccattttactctattattaatacagctttctaccctgtctagggctaaagttttcat

SEQ ID NO: 32077 - DNA, 2977 bp, Zea Mays
gaaagatgggattcagtttttcatatgtttcaccagtatgctcttgtgcacttgatatttcctattttgtacaaggaccatatgtttagatgtttaaattatatctattattttctcattttcagtatttggtcgtcaagacagtcttgaacatctaaatgctactccaagggcagtgattatatcttaccagatgctaagtcgccttagagaaagtatggtgaatagaacatgggcactgatgattgttgatgaatcacataacatacgctgcacgaagaaactagaagaaaaatatgagttggcacttactatttattttctcctaggcgataatagaccttttgatatctaccaccagataaatatgctatggccccacatgcttggtactgataaatttgattatgcgaaaaaatattgcttgctgcatgttgcacgaagttatcaggggaaaatgtttaaggacttctctaagggcacacggttgacagagttaaatgttttgctcagtcaaactgtcatgattaggcgactgaaggagcatttgttgaatgaactgccccccaagcggcgacaaattattaggttgaagctaaaggcaccagatatcagggcagccacatcttcatgcggcaaaagggtgaaccctaacagttgtaatggaactcttacaattgaattgcccagtaaaagcaatgatgatgaaaatacaaaagaggaagaagaagatgattgcaagaaatctccaaggagtctcaccccacaagagattggtatcgcaaagttatctggatttagtgaatggttctcaaatcatttcatcatgaatggatttgatgctaaccataacctggatccccagtctagctgtcagaaaacaataatatttgcacatcacttaaaggttctagatggaatacaggtgtttatctctgagaatgagatcagatttgttcgcattgatggaagcacacttcaaagggaaaggaaagaagctgttgattctttccgtttggatccagaggtgaaggttgcaataattggaattactgctggtggtgttggcttagacttctcatctgctcagaatgttatttttgtggagctcccaaaatcagcttcagaattgcttcagaacacattggatgaatcacactggctccagttaaaccagagtctgttccgtgtctcgtctttgatgaatggaaaaaaggatgctgtaagggagattgaggttgatcaagtgtgccaacttgaagaaatcaaggacaccgaggaaacacaacgcaaactgcatcctttggagaatcataatgcagatttgacccacgtaccaaaaaaacttctggaaagtgatgatttgtccattgatggttttcttggcatcgaagatttggaatttgacttggatttcaccattaggacaattcctcttgaatttgaggatgaaaaccccggcacatccttgaaaaataatccaactccaacagtacttgaagacagatcttgtattgatgtttctctttcaccagctgcagtcttttgctctgtactatctagttgtaaatcaataaagtctcgtaagaggctttctggaaattctgggtccttgagtcaagctgcatctgttccagattttccaattcaagtggagtctctgcgttttgaggttagccggcacacaggacgaatccacttgtacagttgtgttcctggacatgattcaagacccaaaccactttgtgaaaattttctgccagaagaattgaattcacctttatgttctcccagtgatgttaaaacaagaactcttctcttgaaaaagattccttcattttgcaatgtgttcaatgcattcatcaaagagtggttggcactaagaccaattgatcaaaataaattgcttggaaagccattacaacttccgttgaaccttgagttgtgttttctgaaagatagcatcaatcatagcacagaagggatacttaaagggggaagtaagaggcgtgctgcatcattgaatgatgtcagtaatcctttgccagaaaatgctgaatggagacaggtggtgttgcgtaatggcacctgtaaagagagacagtacactcagggctggaccattgatgatgaacctctctgcaaactttgtcaaggactttgcaatggaaggcttgcaaagtcaccagaatattttgaagatctattctgtagtttagcttgtttccaggaatacagattaagaaccagtggcagggccctccggcaggcactgtttcaaatagaacgtggcaagtgctcccaatgcaagctcgattgttgcaagcttgtcaaacacattaaactcttacctttgggaaagcgagaagaatacatcagaaaggttgctccaaacattgcaagtagaaagaaactcctagataaacttgtccgtgaaccaattgatggaaatgcttggcatgcagatcacataatacctgtttataaaggaggaggggaatgtaaactcgagaacatgagaacactgtgtgtggcttgtcattatgaggtcaccagaactcagcacaaggaactaaaagaaataagaaagaaggctaaagagcacttgaaaaacgccttgaataaacaaaaggataaaccaagtgaagcaacagaagaactagatgacgaatcgttgctgatagctgtcccgggtagtgcctactccttaggatttcctggcaacggatctgatgaaaaggctgctgaatagggcatgtttcatttaccttgattattgttcaaaaagggcgctggtattttttagctcgcgtcctttttttgtacatgttaaatgctaccaagcgtttgtaagctgttcggctgctcttataagcagcactgataagcaacactattgcagctgcagagctagaattatctcacatttttgggcttgttcgttttgatgctaaaccatgtggattgagttggattg

SEQ ID NO: 32078 - DNA, 2915 bp, Zea Mays
cgcgaagcaacgcgggcgggcatttgctcccaccaggcaccagtagagtgctgaaaattttgtggcgcatgatgcggaagttaggtccctgtctattggcaaaaagtctaggcgtgtgttcatcaccggtggcaatgatcgcaaggtcaaactgtgggccattggcaagcaaactccacttctgaccttgtccggccacacaagtgcggtggaggctgtgcagtttgattcagcagaggtgcttgtgcttgctggctcgtcaaatggttccatcaagctctgggacttggaagaagctaaagttgtgcggtctctcactgggcacaggtcaagttgcactgctgttgaattccatccatttggcgagttttttgcatctggttcgtcagatacagacctgaagatatgggacataaagaaaaaaggatacatacacacatataagggtcacagaggagcaattaaaacaatcaggtttacgcctgatggacgatgggttgtcactggtggggaagataacattgtgaaggtgtgggatttgacagctggaaagcttctacatgatttcaagttccatagtggacaaatcaactgtattgattttcaccctcaagaatttttgcttgcaacaggctctgctgataggacagtgaaattttgggatcttgaaacttttgaattgataggttcttctggacctgaggtattctcttgggaaccagtaaggtgccatgatgttgttgacatgggttggagtaatttggctgaccttagtatttatgaagggaaactcttgggatgctcctaccatgagtgccgtgttggtctatgggctgctgatatatcactcattggaccctatgctcttggtgtattgcccaaagcgaatttttttgctgagcttgtgcagtctatggaagataatcctgtgaaaccagttgatagcactgcaaattctcgtcctgcttcagcaatggcacattcaagaagttcatacaaaatcaaggagtctgggattgctcaaagcagggttcgtggctcacatttgactccagcaagtacagataagaccaagaaagataggagcagcactattccacgaagacctgattcgtctttaaagtcatctgttcagagtactaccctgatgaggcgtatgaagcttgttgatagtccttccaccaacacaaaaaatgtggaacgtaatgttgggcagagagacatttcattagcgtctcgtgcagtgatggctaataattctgcaactgctaagaaaagcaatcttacagaatcagctttagtgaaagatatttacactacatctcaggctgtttcagcacctattgttgtgcccagagacattttagaggacaaaacagtaagcaatgttcgtcgagggactggagagacagctgcagtcccagatgattttcggatccctgttcacagaagaaaaccctcacttagtggcagtgctgctgatagtgatagctcatcaagatcagtgttcactgaacctgatgtttgctcagagggtttgtctagcttaaaattctcctttgggctaactccatatcacaagaaagaagaatttggcgatgtggataatgaaggtattgcacaaatagcagaaaagatggaaagaacagtgtcgctggaccattctcagcagttaaatgatgataaatcctttgaatcaccatgctcaacaacagagactgccaaggtcaaatatgttagaggagttgctgtgccactggggaaaacaaagtctcttgttgagagatgggaaaaaagagagacttctagcactgattattcaccacaaactggttcttgtggtgatcgggcatcgagaaatgacaaccatccattccatctggcggaaccaagtacaacatttgaaaaggacctgtcaactgtagatgaagcgatggctcctgtcaatttagtgcggaaccatgatgaattcctaaatgctgtaaaacttcggctgacaaaactagagatgatgcggcatgtctttgaacaaagtggtattaaaggagcaattgctgcagtggcaaagctacctgacaatgctgttcaagcagatgttgttagtgctctcaaaggaaagcttgatcttttcaacctggaatttttctcaaattttctgcctgttcttgctgggttactgtgtagcaagactgaaaggcatgctatggtctctttggaaatgttgttggatcttataaagatttttggaccagtaattcattcagcattatcagcaaatttaggcgttggagttgacattcaggctgagcagaggttgcaacgttgttcacggtgctttaaccatttgcaaaagatccaacagagtctgaatccattgattctgcggggtggtcaaacagcacaacttgcacaagaactaagtctttcattgcaagatttggtggtgatctaggcaagatgatgtacaatgtatacgacagagtagataccattggttttggcgaaaagtgcccacagttgtgtagcttgtaattttgtcatagctttgcaagtgggttttgcaactgtgttttaacattgggctggcattcagcctggtcccctgttgtaaatgtgagcctagccgtgaatgagtctgtaattagccagccacatctgctgtgtgagcagccctgaacaaaaagactagttgaaaggaaacaaccgcaaaggggatcattttggttacaccccaggtggtaggatggctcatgtagcatgcggtgattggcaattccattctttgaaagcatctgtgtttaacgtatattttgtagaagtaaattgagttatgccatagtaacgatgactgattgggctaatatgccttttgtttcttcaactgaccaagaatactaagagtcggctagttttaa

SEQ ID NO: 32079 - DNA, 1648 bp, Zea Mays
ctctctccccaccattcagctgccgctgcccccgattgagccgccgccgcctcagattcgccgtcgccacctcagattcgccgccgccgccgccgatttggacgctgtcgccggcgattcagcctccgccgccctggatttggcctccgccgctcccgattcggcgctgccaccctgaaacagcgccgcccctttcccttcccctatgccctatgccctcttgctgcttctcacctaggcgacggggacgccttggatccttcgggcgcctggacgcctaggcgacgcctttaaaacaagggtcttctctgtattaaatattttctgatgttttttcggcatttgggtttgttcacaagatagctacttttgagaaagcagctggtttccaggcacttatccagtatactgatgccccaactgctcttgaagctaaaaactcattggatggaagaagcatcccaaaatatttacttccagaacatatcggtgcctgccacatgcgcataaccttttctgcgcataaggatttgaatatcaaatttcagtcgcatcgcagcagggattacaccaatccttaccttcctgtgaaccaaacagcaattgaggggattgtgcagcccacggtgggccctgatgggaaggtaaaggagcctgagagcaatgtacttttagcatcaattgagaacatgcaatatgctgtgacagtggatgttctgcacactgtgttttctgcttttggagctgttcaaaaaattgcaatgtttgagaagaatggtggaatgcaggctctaatccaatatccagagaggtgtcggagttcgtgaaggcttaaaatggacatctgcaactttccacagctataaagttgtttttaatataactaccgcagccgttgctaaacaagctttggagggacactgcatatatgatggtggttactgcacatgatgagagaagcagggactacactctttcagaccctaacgtgcagctgcaagctgctgcacaaacgccagttctaaggtctccgggagtggcatggcagaacactgcatcagtaccagctgctcctttttatgcaagcacagcgacttcaactcctattggagttggacaggtggctgcttggaatcctaacatgcaggcagggagttttgcatctgcatcgactgcataccccaaccaaccattaatggccaactccatgcctcactatcctgctattggatcgagttccggtgccccaccagtagcatttcaggcttcgcagcagatgacacagtatagcatgccccctggtgctccgccgcacgcaccaccagctggccaatcgatttactacccgaagtaagcggttttggttcaatattatcagagagcaatcaggcattgttacctgcgacaattgtggtccgcaaatgcaatcttgcgaattttgcaagtgcgctgtagcacttgtaacttgcgagcgcccttcgcaagaatgcatcagcgtctgctgtgtctgtaaaactgtcaaagatagtgtttacctattagcttgcatggtatattggtggtgagatatgttggagtagttttgatgcctcaagaatctcttacgcatcttttttttttaaaaaaaactgcgctttgcttttggtct

SEQ ID NO: 32080 - DNA, 3093 bp, Zea Mays
cgagactctggagcgcagagacggcagagagcacagtagccaagcgagtggaggagagttggagactcatcactggagagcatccgaagccgcccagtgctcgcacaaccgctcccgattcccaacccctccgtccgcccaaggggcgccgcaccatctccagcctccaggcctcgatccctaccggaccccgtggccctgctgtgttatctggctggagatccggccggagtggcattcctgctctcgctctgggaagtgtcaaatagtacactggaggcaaggacataaggaaacatgccaaaaatggcttggtagtggttctagcagctttggtggatctagcactgaggctactgaacagatgccgttcttggctaacttgaattcacctcttccagatagaagcaacatgaatagatcaaatcaaggtattcatatgagcgaaaatggtgctgttggtgtatcttttgaaaagaataattataatgctgctgatgaaatacactcttcggagattttatctggaaacaaggtgtcaaacaactattttggttcagatgcaatgagtggtaatggggatgcaacttatcctgccaaaagtaatgcacagcagcctagcagttgtgctcctgacgtgagaaaacaatcaaaagcaagcatcacagtttatcagcctgacatgagtgtctatttaacttctgacatggtcagttcttgtgagggatcatatgtttctgccggtgagccactgcaaaggagcttgtcatctggaagaactattgggaaagtaactgtggtgaataaaaggccttcttacccatcaagtaaggtggtctcagcacaaaagtcacaggataaggtgtctacatcatatcaaaatgatgcccatgagaagaatccttgcaacaaaaatgaccaaagatctacccccacatgtgaatcaagtcaatcaacaagcagcaatctactgaagtctggaacatccaaggttgaagttttaaagaagccttcaaaatttctcaaaaccagccttgtggcattgatcaatgataataagaggaacaaggtattgttcccatatgaagatattgtcaagttttttcagtatgaagcacggggtgtttcccctagaggtcttttcaattgtggaaacagctgctatgctaatgctgttcttcaatgtctcatgtgcacaaagccactgatgatctaccttcttctgagattgcattctaaagattgttgttcaaaaaattggtgccttatgtgtgaacttgagcaatatgcttcaactttacgtgaaagtggtggacccttatctccaagtagaatcctttctaatctgaggaatattggatgtcgcttgggtggtggaactcaggaagatgcccatgagtttctaaggcatcttgtgatgtctatgcaagcagcttgcttggatgggctgggtggtgagaagcacgttgaaccaagtttgcaggaaacaacactgatacaacagatgtttggtggccgtcttaaatccaaggttaagtgcctcagatgctatcacgagtctgaaagatatgagaatataatggatcttactttggagattcatggctgggtagagtccttgcaagatgctttgacacagttcactgctcctgaagatttagatggtgataatatgtataaatgtggaaggtgttctgcctatgttaaagctaggaagcaactgagcgtgcatgaggtgccaaacattttaacagttgttcttaaaagatttcagtcaggaaaatatggcaagatcaacaaatgtgttactttccctgatatgttggacatggttcccttcgtgactgggtctggtgacaatccccctctttatttcttgtacgccgtggttgtacatgtcgatacagaaaatgcatcattctctgggcactatatatcatacgtcaaagatatgcagggtacatggttgagaattgatgattcagaggtccaggttgtatcagtgaatcaggttatgtcagaaggtgcatacatgcttttctacttgaggtcttttccccgaccaccaaggatatacatcgagaaggggctgccggttacatccgcaaagcggcacacgtcgaaatcttccaagggctctaaacacgatcgcaagcagacagagttactctttcctgcaaacgatcaggcatatggcgtctatgatttcagacccgatggcgaaggctatgcccaagatcagcatgcagagctgaggtccagagctttccatcacgccgacgatgcctttgcagactcggttagcgcggacttctcggaagcgacatcaagtgaatggtcgctgtttaccagctccgacgagtcctcgttcaccaccgagagcacaagggattcgttcagcgtcgtggactacggagacaacgccggcctggatccgatttcctccatattcgggccaagctatgctccggagcacggtgctcccggcagtttcgtctcgcgcacaaggttctcaccttccagtccacagacaaggtacttctcggagagcacaggctttgtctcggactcttccatgccggcccacccccacggcattgtacatagaggaaggtatccggatagtagggcgtgcgcctcttctgcggaaccgcttgcgtcggcggcgcatcagcggagcgggtatggccggtacccccttagtcgagatggttttgttcaaacatctggtttttgccaaatgtaatcggctcacatttcattagctgtagctggtgcatcggcagttgcggttcttagcactgccgttaatgctgcctcatgttcttttatttcagatgaggcttattgaatttttagctacatgtcgtttctaggggtagctcgattcgatgtagcgaaaaaaagttagattatgtctatatgcaggtgaaattttagagcatggtgacaagctctgtggcaaccgttttccaatgctaatctcgtaaccctggctgctgcttctggtcttagattaatgtatgtcccaagtgattattccccagcttgttactttctcggaacgttcatgcatttcttagagagaactta

SEQ ID NO: 32081 - DNA, 1330 bp, Zea Mays
cagggtaggataacatatcttctccctgctttttctgagtaatataagcaacaatagtgtgtcaagccaaatgtttaagtggcaataatctgtttttctatgttttgtttaccaaaagcttaatggtttccatcatagaaagacagaataaataaatatagttgtttattaaattttttcaaatactacaaggagcagaaaaggtaattgaaaattttgatggaagagtatgtgcactacagacaaaattgcccatgcttcgtccaaatttagattgggggtgacttgaaatcatcttgtaccctaaaagcctggtttttggatttctatctatatctgatctttatctttgtcatctaatctgtagtaggtttggtattgacttgttctggccctgctcatccttacgaatcaaattttgccaaagctatattttttaagtaattattatcttaaatgtggacaaccatttgttcagtcatcctgtgagacaggttaccattattatgaaggtttatgtttaatactctaaatgtattatttttgttttcaagaatgatttatactgtatgggattcctggatggtggtgtacagactaaagatgggaaagatatgctcctcttaggagacctggtcctctcaaacaaactagtagtttatgacttggaaaaagaagttattggatggacagactacaactgctcctcgagcattaaaattgaggatgacaagactggctcagtgtacactgtcgacgcacaaaacatctccgctgggtggagatttcaatggcacaactccttaattctgttgatattaataaggacaatctggagctgtttggttatagcctaacgctggatctaggactaaagccccgtttgtttccttccaagattatataatccagctcgtggattatataagcacctattgacctgcttatagattatcataatctagatatccggattatataattcacctaataatctatattgtttgtttaactctcaatttatttaagctagattatataatatagatggtaaacaaacaaggcctaaaacatattttctgtaacaaaaaatagttgagttcagaagttcaacaaagagtacagaatattatatagattgtcccttgtgttttagacgtaaactgtagcaacatatcaagctactaaaatgactttagttgatgtcaggctgttttgcaccttctgcgtttctatcagatatatcatcaggtgtacgtgttactgtgcaatgtaccgtctgttcaggaaggatttgtgtaaatgtagtaattcaatcgtagaaactcag

SEQ ID NO: 32082 - DNA, 1079 bp, Zea Mays
gctgaccttatttatttggattcagttccatgcttatctttatgtttaagtaagtccacattaaaatagagtgccggcctattgctccacggggacctggcctaatcacttccactgaaacaaacttttgactgcctacacaacttttttcttcttcttttagggggtggctatcgtgagctccgtggtgttgctgcaaggcattacgataaaatgaaagaatactatcagaaagctgcctttgcatattcgaagggtgacaggtcatatgcttcttaccttgctgaggaggggaaacattatcgagaactaggtcgcatagaagacgagaaggccagcaggaatatatttgaagccagaaataagcatataacgaacacagtaaccatcgacttgcatggccaacatgtccaacatgctatgaaccttctcaaaattcacatgatgatttgtatttgcattccatctgtcttactgagggtaattaccggttgtggttcagaaggtacagggaagggaaaaataaagcgctcggttatagagcttgcggagaaggaacatattgagtggcgcgaagagaactctggaactgtagcccttcgacttggtgggccaagagagtatcggttccttgagcatgaaagcgattctgacctagtggggaactttaacatagattaacttctgatctaatctatgtattcccgtatttatgtgttatagctatggatgctgcctaggttgcgatgtaggctgtagttctgacacagaagctcggtattgtagttgggtaaattatggtgtaatgttgaccccaggctgctaactgtgcaatcacagaagctctgactgtacaaccgtagcccttctgtgagcaatgcaacacaggaaccgtaatcatcgtgagttgaagaatatcatactatggccgattgccacgggaaccaattttggcctgtaccaactggaacttacgatttgtatgaaaatatattcaacacttaggccacaaatattacttatcatgttcaactgaatacttttgaaatgtactaatattataatgtgttataaagtat

SEQ ID NO: 32083 - DNA, 1483 bp, Zea Mays
caccagccaggttttttattgtaccattgtagtaaaggcacatcaagccggcatctataaagcccgctatgtccctggaaatttaaggtgaagccagattgttgaagtttggtcaaatctttcagtctgttggaataagtgaatcttgaaacatagttcatattctgtgcagaggctgaaatgtatcatacagtcttgtggtgaatcagatgtttacaaaattccaacagccataggaaattgttaagtgggcaaatttcacaatatgatatttgaattaggtcttctaaggactttgctgatgtccatggacttgtcatgcatgcttacaacccaccaaatgcagattcacttgttgatcatcttggtttgcacaaggcattgtgtgttcttatgggatgggattatacaaaagtccctgagaactttaagggctaccaatcattaccttctgaccttgtccaagcaagtagggaggacctcattgtctggccgcctactgttatcattcacaatacttcgactgggaggaagaaagatggtcgcttggagggtttagggaacaaagaaatggataaaaaaatgacagaactagggttttctggtgggaagtcgaagtccttgtatggaaaggaaggacatatgggtttgacacttatcaagtttgcaaacaactcatctggcttgaaggaggctgagcgtcttgctgagtatcttgagaggcaagatcgtggacgtataggttggtcacgcgctcatgccagtcgttctgtagattcagatcagaaccctttgttggtcgagacggataccaggacagctgagaaaaagaggatactttatgggtacctagcaattgcatccgatctggacgaactagactcagattctagaaaaagggcttccctccagagcagaagagaattcgacccaaacgaatgatctcttgtcataaagcccacccccatcagttcattaaatttgcactgaggcgtgcatacctatctctgatcccaatttataaattcatactgctgctgtggagaaaaggtgttaccttgaatataatatctgccgctagttgagttataaccactagttctggaagctgtatttgcactatgtgtattttcttgcacgcgtctatggctcacgatttgactggctatttggaagagatctgtcttcctatttaagtatcgcccgttgcatgattcattgctcttcatttggaagtgatgttgcatagacctcctgattggtatcttttatgtattatagcattccctttctttcttgacttcccatgaatatttaaatttctgctaagacggtagtggctacatattccttggcacttctgaacatgtctggttctttgaatatcagagtatattgttgcaataggttgttgccactcttttgggcattcatgctgtttgtgttgttttatgtaagagggtgtaatattcagaaatccttg

SEQ ID NO: 32084 - DNA, 1826 bp, Zea Mays
aaaaggctgtataaaagccacctgcctccctctcacagctcctccctcccaagaactcggaagtcggaagcagggcaagggatggatagcaagtcggtgggaatcgtcggcgcaggcgtgagcggcctagcagcctgcaagcacgccctcgacaaggggttcaggccggtggtgttcgaggccgacggaagcgttggcggagtgtgggcacacaccctggagtccacgaggctccaggcgccgacgacggcgttccggttctcggacctggcgtggccgccggagagcgcgagggaggcgtacccaggccaccgcagggtcatggagtacataaggtcgtacgcgcgtgcgttcgacctcctcaagcacatcaggttcaacagccaggtgctgggcgtcgagtacctcggtgcgaccgaggaagaggtcatgggctgggatcagtggtccggcgatgggacggcgttcggagccgtgaagggtggcggatggcgcctcaccgtccaggacttgaaagtcggtagcactgaggcacagtggaaccccaaacatcccagagttcccagcgaatgggcctgagctgttcaaggggaagatactgcactcgctggactactcctacatggacgacggcgacgctgctgagttcgtgagggggaagcgcgtgacggtgatcggctccggtaaatcggcgttcgacatcgccgcggaggtcgccaaggtgaacgccatgcaccatcgtgtacagaacaaggcactggctggtccacaagtccagcgtgtggggagtcgacctcagctacttctacctgaaccgcatctcgcagctcctggttcacaaacctggtgaaggattcttgcgctgcatgctggccgccgcactctctcccttgagatgggcgatctctaaagcgatcgaaacgtactacaagtggagcgttcctctgcggaagcacgggatggtcccggactacagcttctccttcgccatgtcctcgtgcctgatcgcgatgctgccggaaggtttctacgacagggtcgacgaaggcagcatcgttctcaggaaatccaaggcggtcggcttctctagcgacggagtcgtcctgcgagacagaaacgaaagcgtgagaagcgatatcgtgatcctggcgacggggttcagaggagaccagaagcttagggacatcttcactgcgaactggtgcagggagatagtggcagggtcaccggatacagcagctcctctgtacagagaatgcatccatccccggattcctcagctggctatagtgggttactccgagagcctcaccaacatatacgcctcggagaggatgagcaactgggtagctcaatttctggccggcggcttccagttgccaagcgtgagatgcatggaggagagcgtggcggagtgggcagagtacaagaaccgatacaacgggaggtatttccgcaggtcctgcgtaagcaccgctaacatctggcttaatgatctgctgtgccgagatatggggtgcaaccctagaaggaagaaagggttcctggccgaatggttccagccatatggacctgcggactatgcaggtctttgctgaagatggttgcattgcatgcctgtcagtgcatactcctaggaagagatgacagagttgctacctccatgggtgtaatactgcaatgtgaaacgtacaagcaaaatatgtctgatgtttgaactgtaaggtgtgaacctatgagacctgtctaaacaattttgcaacaatctacagttttgaactcgaacagggagaagatagaaatagtgaacagtcatcgcctatctg

SEQ ID NO: 32085 - DNA, 768 bp, Zea Mays
ctttgaactgtgctaataatataagtaccccaacacacagaagcttctgtgttgaaatagtatagctgtattccattctttgtctattcataagtgggaaaaaaacgtacctgcatttagcatatgcagtttctatttacgacagtttgtgaacagctcatattattgttcctatatatatatatatttctcgtgtctaacaatcatgacgtctacatttcagccagagagcactcgagctcactcatatatagccagcatatatagttactgaattgaaacgagaaaaaaaatccataaagttctgaagactaagtggatcgagcctgcgcgcgcgagggttgtcgtaaaatgtccaccgctattaggagggctaatgatgaattccccgtcgattgtagctacatgcatgaaggagtacacacgcatgcctatgttgtttgaattaatcaaattgcttgtttgttagtaattatattaccgcctccaactaggctccgatccgtacgtccacatgatcatcagctatttcatgcaagtgtcctactatatgttgttgctgttactgaaacgcatgcatgcttgtcccgaaccctctttttcttttttttctttttctttttttggtctcgcactcggacggacggacgactagcgcccgtgtgtttctagttttctgcgcgctcgcttctgctgctagtgctactgctccatgtgtattattattgctaggttggctatatatgctacgaagttgacctttggaga

SEQ ID NO: 32086 - DNA, 2226 bp, Zea Mays
tataaagacacgaagtgattcagtgcaatataagtctattgtttggaacacattaatatagatttatgctaagttgataattggtttgttgttagttaatatgaagacatgatgtgatttgaagaatgattatttatttctatagatgctactagaattatttcaaaatgattggttttatcagttttgggtaaatctggtaaaactcgaccccgaatccgaattattggatatccaaaatttcggataatattttgtcgaaacagaattaggttaggaatttttaatacccggttttttatttatccaaattacgcgacccgattatttcagctaaccagaatgggaggcctctccggttgcctctttctttctcagttctcacctcaacgtcaccgcaactccgcaagtccgcaacctcctccttcccaccccttctcacgcgattcaagcgtttcccattcggagccctaatcctctctttccatactcgcggaagccaccaccaccggcaggggaagcggaaggggagcacctcgggccaggcaagatggtgctcgcgcagctgggcgggagcatctcccgcgccctggcgcagatgagcaacgccacggtgatcgatgagaaggtgctcaacgactgcctcaacgagatctcgcgcgctctcctacaggccgatgtccagttcaagatggtccgcgacatgcaggccaacatcaagcgcatcgtcaacctcgaggcgcttgccgcaggcaccaacaagcgccgtatcatgcagcaggctgtcttcacggaactctgcaacatgttagatcccgggaagccttctttcactcccaaaaagggcaagccaagcgtagtcatgtttgttggtctgcaaggttcgggtaaaactaccacttgttcaaaatatgcttattatcatcagaagaaaggattcaaaccagcgctggtttgtgccgatacatttagagctggtgcttttgatcagttaaagcaaaatgcaacgaaggccaagattcccttttacggaagttacatggaatctgatccagtgaaaattgctgttgagggtgtggagaggttcaagaaagaaaactgtgatctcatcattgtggatacaagtggaaggcacaaacaagaagcagcactctttgaagaaatgcggcaagtttcggaagcaacaggtcgcagcaacaaaaagtcctgttatattcattggaactggagagcacattgatgattttgaagtttttgatgtgaagccatttgttagtcgcctgttaggtatgggagattggtcaggctttatggacaagattcatgaagtgatacctacagatcaacagcctgaccttctgcagaaactgtctgaaggaagctttagtctcaggcttatgtatgagcagttccagaaccttcttaaaatgggtcctattggccaggtcttctctatgttgccagggtttagcgctgaactaatgccaaaaggacatgagaaggaaagccaggctaagattaagcgctacatgacaatgatggattccatgactgatgcagagcttgacagcacaaatcctaagttgatgactgaatcacggatcattcggattgcacgggggtctgggcggcctgtcagggatgtcatggacatgctggaagagtacaagcgacttgctaaaatctggggcaagatgaagggtctcaagctccaaaagaaaggggacatgagtgcactgacccgcaacatgaatgttcagcagatgagcaaggcccttcctccgcagatgcttaaacagattggtggcatgggcggtctgcagtctctgatgaaacagatgggatcgaaggagatgagcggaatgtttggaggcatgggtggttgacttgtttttggtggatcgtcgctgtgatgctaaattgagagcgtttaatgctgcggtctgatcaccatcagagcattccctgaagatcagcctgcgctatgttttggatcaggcttagcgtagctccccatgcctgcaaatttaacctatatgaacagtacgtttgtcctctgaaaaaacggataaggtatatattacaaagcgaatatgcttatgtagatggttactccaaacattagtcttccagtggtggtgtcgttgggttggcaaaggatgcgccatggaactttcttgccagggtgcttgtttaggtgtgcactttgtgctcggcggaagttgg

SEQ ID NO: 32087 - DNA, 768 bp, Zea Mays
cctgctacacctatgcatttggttcatttctcctgaaaaaaaagtacactggaggcaaaagaaagcaatgcccatgcgtttgttaacggttggaaagaagaggtctcgggggacacaactccttgttgaagaatacaaggagaagctcggtcactattgcgagttcgaggacactcttatcaggtccaacccaaagcttacaagtgatgtaaaggtgcaagttgaagcagaagacacggctatgatgcagcaactcaagtctgacgattttgtagttgtgctggatgaaaacgggaaggatgtcatatccgagcagatagctgatctgattggggatgctggcaacacaggatcatcaaggctcacattctgtatcggtggaccatacggtctcgggttacaagtgcgagagcgtgcagatgcaacgattaggctgtcctcactagttttgaaccatcaagttgccttgatagtcctcatggagcagctctacagggcatggactataataaaaggacagaagtatcaccattaggcctaagtgctatcatcattcgctgctgtatgtaggacttgaaaaatggaagactgcattaataaatttgcagtttccagcacaacatggacacttgtaaataagaagaaattctgctgggtgctttactggttgctaggctgctacatgcttgaaaatggttgctatctgcagctgaggttctgcaaaagcgaatggcacacctgaacattcttcttttactgagatcaagc

SEQ ID NO: 32088 - DNA, 1554 bp, Zea Mays
aaccatacactctatctcttccttctcccaaccccgctcaaaaccctagctcaacgccacaggctcgccgactttcgcccggccgccgccggggacgatggcgaagcctcggcgcggccgctccgcgtctcgctcctcctcgggatcttcttcccgctcgctgtcccactccgtctcctccggctctgtctcgtcccgctcccggtcgcgctcccgctccttctcgtcgtcgtcctcccagtcccggagccgctcccctcctcaggctaagcgcagttcgcctggagcacggaaagggcgatcaccttcaccgccccctaaaaagggttcaccttcaaagaaagtccgttcgccatcaccaccacttaaaaaggcttcaccccctaggaaagtgtcgcctcctgctgaatcagctgttctctgcattgatcatttatcaaggaatgttaatgaggctcacttgaaagagatatttggaaactttggcgaagtggtgaatgtggagctatcaatggaccgaatggttaaccttcctcgtggctatggatatattgaattcaagaagagagctgatgctgagaaggctcttcttcacatggatggtggtcaaattgatggaaatattgttaagttgagattcactcttcaaccacgccaaagggctgcatcacctgtaaaagctccgccccctcctccaaaaagagatgctcttcagattgaaaaaggtgttagcagtgctgaaaaggatgcccagcagcgtcctaaggaatcatctccacgaaggaaaccagcttcacctctacggaaacgatctccaaatcgaagggctgaatcacccaggcgtccacctgacccatcacctaggcgccgtcctgattctccacctatacgtcgccgaccagatccttctcctgtcagacgtggtgacacacctcgcaggagaccaccatctccagttcgaaggcgttctccttctccaccacctaggaggcataggtcaccgatgcgtctttcacctaggagggggcgtggtagcccatcaccacgcaggcgctcccctgggcctcttaggcggcgctcaccacctccaaggcggttgaggagcccaccaagaaggccaccacctccacgtcgcttcagtcgctctcctcctcgccgaccccttcgctcccgctccagatcaatttctccaagaaggggacgagggcctccattgaggcgtggtaggtcagactcatcatattctcgatcacctactccaccaccaagaaaggggccaaggagggtatcaaggagccgcagccctagaaagcctcctagagcaggaagaagcgtctccagtgacagccgcagcagcagttcaccttcccctagacgcggcaggtagaaagaacccgtggcattgtgtatgcggcagagttcctcagcattgccaccgtatgaaagatgaatctattgatcaaccaatttgtgcatgcgtcactatgtagttgagactagacgcatgtgccacgcgcagcttacaatttgttttctaatctgtttttaaaaaag

SEQ ID NO: 32089 - DNA, 2792 bp, Zea Mays
gccagaacccgcctgttcccgcgtcgctacctccacttcagcgttcggccatcggcccttcctccgtctctcgccttttccgcgctcacctttgcgcatcggcatcggacaccaggtttcttccgttttgctagatggattctgacgcgggcggctccagctccgctccaccacctccgtcggcagccataggtgcaggtgcaggcgcgggcgcggagacgaagggggatgagcgcggccgcaagcaggtgatggtggtactggtgggcccaccgggcagcggcaagtccacgtttgcagatgccgtggttggcggctccaccgccggccgccactgggttcgcgtctgccaggatacaatagggaacggcaaagctgggacaaaaatacagtgcttgaaggctgcatcagatgctttgaaggagggcaagagtgttcttgtcgaccgctgcaacttggaacgtgagcagcgtgctgattttgtgaagctgggaggcacattgcgcgcagatgtgcacgctgtctccctggatctacctgcaaaggtctgtatctcacgtgcagtgagccgaaagggccatgaaggaaatctgcagggtgggaaggctgcccttgttgtgaaccgcatgctgcagaagaaggagacacccttgctcacagaaggtttcagtcggatcatgtgctgtaatgatgatggcgacattaaaaaagcagttgacttgtataatggtttagggccttcagatagtcttccatcaggagtttttggtcagaagagcaaaagacccgtacaagttggtataatgaagtttctaaagaaaactgatgcttctgttgttgagacatctagcggacctaagcaggcattgacagaaataaagccagcgcagcaaaatcctttgccaaaacaggaaaatgttgaagctggttttgcctgttccatggaagttgagaagggattaaatgacaagatggaaaatgaagagcatgctaaaggaagtgattattgtgatgttggttcccgtactctggcatttccatctatttctacagctgacttccaatttgatcttgacagagcatctgatattatagtggacacagctgctaatttcttgcagaagtttgataatataagactagttcttgtagacctgagtgagaaatcaagaattttgtcattggtcaaacagaaggctgctaagaagagcatcgactccaacagatttttcacatacgtgggagatatcactcagttgcacacaaaaggaggtcttcagtgcagcgtgattggtaatgctgccaattggaggctaaaacctggaggtggaggggttaatacagcaatatatagtgctgctggagaatctttacaacatgctactaaaaaatgtgctgatgcactgaggccaggaacctctgtagttgttccacttccatcaacttctcctctgcatcaacgggaaggtgtgacgcatgtcatacatgtgctcgggccaaatatgaatccaatgcgaccagactgtcttaagaatgactataccagagggtctaagattcttcgtgaagcatacacttcactttttgagaattttgcatctattgtgcagagctacatgggaaagcagaacaatgagtctggagcagaaaagtcagcgtctggaaggatatcgcccaatgacacaaaaatgaagcgagaggacaaccatgaatctgaaaggatgaaaaaacataagttgtttcaacccatcatgactgcaaagcgacagcatgagtgtacaaaggttaatgctccaaattgccatgataatgccatgacttcatctgctgctcctagccaaactagacaagtagacaacaaaaggaatgatgtggttaccagtaagacttggggatcctgggctcagtctctttacgaacttgccatgaacccagaaaaatacaagaactcagattctattctagagacatcagatgaatatgttgttctgaaagatctctatccaaaggccaaaaggcatgttttggtgatagctagaatggatggtcttgactctctagcagatgtcaagaaagaacacttgcctttgttgaggaggatgcattcagctggggtgaagtgggcacataagttcctagaggaagatgcggctttggaattcagacttggataccattcggttccatcaatgcgacaattgcatcttcacatcattagccaggatttcaactctgcaagcttgaaaaataagaaacattggaactccttcaccacatcatttttccgtgattctgttgatgtgattgaggagattgaacaaaatggatcaacaaccaccagcagtgatgaaaaggtactcgctatggaactccggtgccacaggtgcaggagcgctcatccaaacatcccgaaactgaaatcccacatcgccatctgtaaatctcccttcccttcacatcttcttcagaaaaacaggctgttgttgtcctcgacgatgcatatggaccgcacgtagatgctagaactcgatgatcagttgtccttgcacgcacattttgcatgtcgtgcttgcctaaggatagtgttgatcgattttttttttacctaatgcggactagtggaaacttgccttgcttttcagagaccattacctgtgttggcgtgcttactgaagattattggggatggaagctccatttgacttgggtcattggatcgatattaaaattttctaaaataaattagagtgcgtcaggatctagattctcgtagaaatattttggatccagat

SEQ ID NO: 32090 - DNA, 1733 bp, Zea Mays
ctaggctcacagctcgcgactcgcaaggaggagcttgcggcagctcggtatgaaaaagggcatctgtcttctttatccatcgtccgtctccttccacccagacacaggccaggcgggcccattgttgcccaagaccctggaatccggagcaggagtcctctctctctctgactctctcctgagggggaggaggaggaggaggaggcagaggcggaagagcaaccaccaagcagcagagcgcgaggcgacacggggacggagccctggaggtctctcgcgagtccagaggcgatcgacggagtcgcgattcgtctcccaggatatgaacaacgggactttggtttttaacggcagctagagggtagcctggagtgagcatttcattctggagatacaatgggtggctgctgctgctgctgctgttctgcaagggcatctgattcagatagagcaccggtgcgcatctatgtatgtataacatgctttgtcttgcttttcatgtcgaaagattccctcaattttcatcatgtattttttttgtctcccttactattaactgcaacgatagcctggttgctaccatgtctcgcaatgctagaagtttaacagctgtatagaagttttggttcagcagaatgaattattctacctgcaatgtgaatctctctgctgttcttatcagcccatggtaatcagaaatacagactgtgtgcggtgtaacacagttgctttagtataccttacctacgatgatggtcactttcatatgcacaaaagggggaaataaaagaacaagactggatcataagctggctcagcactagctttgtgtttgcatatgttaaattaactttccgtttgcattattcagcaccgacaaaatcccgaggaacatgcacccttgtcgtcagcctttgatggaccatcgccaacttctgctatagttgcagttgacacaaatcttgatacaccatctcttgacacttaccgagcaccacctgcacctttgccatatgatgtttgcttcacagtttcagaaaatcctgatgtggagaagtcaggcattaaaatcaaaactgacgggcagcagtccccaaaagtggacgaatttgagtcgtgcgaaaaaggtgcccctgaggataaggctgatgaggaggaggatgtttgtccaatatgtcttgaagaatacgacaaagaaaatccacgttcggtcaccaagtgcgagcatcatttccatctctgttgcatactcgaatggatggagaggagcgagacatgcccagtctgtgaccagataactctgatagatgggatgtacgaatagcattcttggcggcggttcctgttgagttggcgttctttgtttttgtttttgttgtggtctggtctggacggctgtctggtggaggagatggttgatgagtcttggcaaaaaaataatttatagaagaaaaatgacatgaaattgtgctagagtcgcctgtgtcctgtttttacctgaaaaccctgtgagatttgctccctggtttcctcttgcttggtttgcgtgttcattcttccatttagatttcagtttctcagtgcctgtgtgacagggaaatcatctgtattgtacagttagtctgaaacggtgacagaaaagaagaaaagctgattctaccatatggttggtttgaactttgtccaatcttgctggcctaatggcacaaggtcgtttgccaggtcagaccgct

SEQ ID NO: 32091 - DNA, 2468 bp, Zea Mays
acgacaatcccctcgccgccgcctcggcctctctacctttccacctttcccacccgccgattcactcgctcgcgcggccgcgactccagcctcccctaaatccgctcgcgcccagcgaggaggcggggtcgcagcgagcgaagattccctccgaatcctctcctccaaaaacttccgatccgcttacgatggctacgcagcagcagcacgcggggccggcgtccgggtcggcgtcggcgtcgagctctagctcggggctgcaccttcccgcctcgccctcggccttcggggacaccacccacaccaaggttttcgtgggcggtctcgcctgggagaccaacagcggcaggctccggcgcttctacgagcgtttcggggacatactcgaggccgtcgtcatcaccgaccgccactctggccgctccaagggatacggattcgtgacattccgtgaagccgagtccgcgaggaaggcatgcgaggaccccacaccagtgatcgacggcaggcgggccaattgtaacctggcttcgttgggtcgagcccagcatcccgtgcaccctgggcggccaagttcagctgggtcctactttggtgtcccagttccaagggctttttatttaggaggttatggccaccaccgaccgtttccacttgggtattaccaaggatttccggttccccagtacaggtaatataattaatttcatcactatttagtttatgtaacattttatgtaacaaaacgctaacatgtcttgcatttacttttggagagtataactgataatatggtgtttgctacataaattagcttgtgcatatggtacctcccctttcagatgttgaaataatctgttccagccatgctcatggaatatgatacgactgtttaaaagccaatagaaatgcattcagttttctgtttgtttgttttccttttgcagttatccttcatatgggaccgaatacatctctccacaggttgaagtgttaaaagctatcagcttttatattcttgtgctgcataagacagttacacaaacctttgcctaatctgacagaggttctttttgtagggtacattaaatccatatcccgctcagcaatatcttcctatttatggagtctcagctgcagcaaacacagccaaccaaacatttaaccagttgaatccatacatttctggtgggggcaatggttatatgtcggttcatagttacaacatgcctggaaatcaatatgtgcagctcactggatcaaacttcagcagtgcgtcaccaacagctcaaccttcctgtcagactccttttttagtagcgacacccgttcctgcacatccacacctaataattccagccccctcaccccagtttacacaagctagtggttcagaccaaagagcaagctgaactgtgcatccaagcatttgtaccttgaggtacccttagattgcagcaggactaaaaagagcagtgttgctgtatccacagcttttgttcttgcctggcaagagatcatccttgcattcataaggtaagaaccttgtcttttctgggtttctacccttaagtatacatagtttcatgcatagatgttattttgcatgttgttctttgtatgctaactgctgcagctgcacctcataatctgctaaaatacggagctaagtattgcttaaaagaaaaagaaagggagataagttcttattagcatgaaaagttcttcaaaagcaagaaaatacatgaaatcaagatgttcttccaagcaagaaaatcagggttgtcgttatcatggtcaacagatgtacctggaaatcgtgaagttgtccctatggatggggcaagtgatccaagagcaagggttgctcttgcctttccactcggtttaaatcgtatacgtgtgatggagccagatgcagccttaatgatcctgtatctgacaagctcgtggaaatgtagcctatgctggaacggagtccagcatatgtaagatggattgatccaacgggggattagccatcatggccttcaggtgattgttcatctgaaaattcatgttgtgtgcggtcctagtcccagtcactgcgcacagggtctggtgaccaaaagtgtatccagttctgtacaagcctgcagtcatcgtgttgtctgcgtgactgcatccatcagcctttggacctaatatgcagtcatcattgtgttgtttacactactggttgtagccagtgatggtcattggtttgccccagtctcccaatttaaggtgtgatttatgtgtgtattgctctgtgtttggtggttccaagcatagagcggttctcttgtacttcaaaataaagccatttaatgggaatcccatgacgctggtgccagtgatatgtgctagactgacaatgtgtacctgtgatttatgaattatgacccttttaccgttccattttatcaaataagttatatcaatgccta

SEQ ID NO: 32092 - DNA, 631 bp, Zea Mays
aagatgaagcttcagtgacacactcccgtcccgtgtaaagcttcgtaagtgaactactggaggaagaggaactccattgcagaagtggcactcatagctggctgcaaggcaacttgcttccgcactgccactgtcggcagtcgttgggaagacgagagctcgcctgctatataaacgccgatccttttagggcgcggaaattagcgaaattgcctttggttccgggagattcccgtcgaaaataagcggaaggccgcgtccagcttctcggttctgggaaacagatccaaaccgggccaaatcgtctgaaaacaaaagagagcaacagacgcgcgctgtctttgtatgggcgccgccctcccggctggatctgcggccactccccgtcgcggcgattccatgagaggttgacaactaggcactggagaagtggatactctgatctactctgctgaacgagtttaatatttgagtatggcggcggcattgacatggcggttcaatggaagcaatggcggcacccatggcagcgccgatctgaatttattgtccagtacgtgtgcgatgatatcacctcattaaagaaggtatatggttcacatcttggacttttgataataaatgctcttct

SEQ ID NO: 32093 - DNA, 599 bp, Zea Mays
caggcgtccacttccccctttcttcactcgcacgcgcaacgaccgccactacttccccgaagccgaccgacttgtcaaccatccatcggccaccacccatgcctttatttagtgcccggggacccgtccgcccgtcccgaatcctggacaccctagcctcgtcgtaaatctgagagagagagagagagagtgagaagaagagcagcgccgccgagatcggacttggaatttgccatggccagtcacccctctgcttttccttgccgacgagcaagctatagaggatccagggttcagtaggtggagactgctgagcaggagctcgttgaaggcaagttgtgcccttgatcacttcctttttacccatacatgttcttattagtcatagtgatctgcataggctaattttgatgggacccaatgggttaccccagtttggcaatctttataccttgttttaccactgaatttttgggtaatacatgttattgctttatgtggttttggggatggagatatacattattcatgattacacttttattatcagattattatttactgtttatgataagatcgttatgttaattataacatgg

SEQ ID NO: 32094 - DNA, 2720 bp, Zea Mays
agagcgcacggcccagttgggcccaatactcgacacgactcattgaccggcccattacggctgaagggagtcgctcgccgccgcgttcgaggcgttccctcgtcgcgctcgcgccgtcgaccttcaccgctcgctgtcaggtctgcccgccacgacctcgccggccacactcgcagctcgccctcgctcctacgcctcgccggcgaggccttctgccttttcgcgccctctatctgctgcgatctttggagcatcgttctcttctctcacttgagatccagacccctaaaccctagagctcgccgcttccgctcgctcgctccgcgctggcggcgacaatggaggacgaggagatggagaagaaggtgcagcagtacttgcagcgcaagggtttccgcctcactgagcttgcgctccaggaggagcgcaaccgcctctccacctccgccatctccgacgttgcgcttgcacggtctgacaatgatccagcgagatactacgatggatatagcagattaagaacatgggcatacagttctcttgatcaatataagcacgaattacttcgcgtcctttatccagttttcatccatagcttcatggatctagtggcagaaggacatatgcaggaagctcggtcatttttccatacatttcgggaagatcatgaggtgatgcattcaagggatcttcagaagctggaaggcgtcctgtctccttcacacttggaggaaatggaattggcccggtcttttaggaaaaataaatttaaaattaaattatgtgagtattcgtatgaattgcttctccagtatctccagaaaacacaagcccttgtggtgcttggagtaatcaatgagcacataacttttgaagtatctcctggtcagccctcattaatctctgatgacgctgatgttgttgctctgattgggacaagtaaggacttggcaaaacagataaatcagaaggaagtacattgggggttgcttgaagattctgttgaagagcgaatggagaaggcactagcagaatctgataaaatagaagctgaaagcaaggatgctgatgcagaagataacaagaaaagaaatgcagaaggtggaaagcaaggtgcttctcttaagaaagccaaaaaggacaagcttgttggtgcgactggaaaaagcgtcagaactgaaacaagcatggtttctgtggcacctcgagtgaaaccggagctaactcttccagcaacgcttccttcaagaatgtcactaacaggtaccttcaggtcccacatgtgaatgtcatctacttgctagaaattttgattttgatcaggaagcttattttgtaatacaactgaaagtgaagctcgttttataggacaacttaaaaaagtaagacactcaataattcacaacagatcaaacgatgtcttttgctttgattgttgaccctttttgtgctcattgcttggggctcgcatacttaagcctcttcaccatttgtggtgatagccaggacccaggatacattctaatttgcagtttgaactcatatgacaaatagttctttcttcaacgtttaattgtttggtttggaagtttgttttggtttaattgtttcacacttttttctgtcaaattaatcaacctcgagatgcatgagtatgcaaagtttttatatttcaggcctgttgaagttgaacaatcaattcttgaggacctacgaaaccgtgcacaactgaatagtgtggcattgccatctgttagcttctacacattccttaatacacataatggattaaactgttcctcaatatcacatgatggatcactggttgttggtgggttttctgattcgtcagtgaaggtctgggatatgtcaaagatgggccagccagcaaaaatatcaagatcacagggtgagaatgggccttcccagggtgagcgcatatcaacattagatgaggggaaacgaacctatacactatttcaaggccattctggaccagtttattctgcggcctttagcccgtttggggatttcctcttgtcatcatcttcagactcgacaattagactatggagcaccaagctgaatgctaatcttgtctgttacaaaggacacaactacccggtttgggatgtccaattcagtccagttggccattactttgctagtgcttcgcacgacaggactgctagaatttggtcaatggataaaatccagcctttgcgaataatggctgggcatctttctgatgttgattgtgtccagtggcatgtaaactgtaactacattgccactggctctagcgacaaaactgtaaggctatgggatgttcagacgggtgaatgcatacggatgtttattggtcataggagtatggttttatcactggcaatgtcacctgatggacgatacatggcctccggagatgaagatggaacaatcatgatatgggatctctcgactggccgttgtgtttcaccactactaggacacagctcttgtgtgtggacacttgctttcagatttgaagatcatgtaatttgatctcatgaaatgatgtcttaaaactggtggtatcacagattctgatgtgtactagaatacatgagtctgagcattaggtaaaagggcaacgttgctatgtccttgcgtgctttatttttttagttgatcaaagttgatgcttttcctatgagctcttttaaagtttaaattaaaca

SEQ ID NO: 32095 - DNA, 1806 bp, Zea Mays
caaatagggccgcaaactatcggactcattggaaggcccgcgactgcggctgcgcctgcgcccgaccaaacgtaggagacccatctcctctcttttctttccaagaaaagtcttctcttctctgtctcagcgccgacgcttcccaactccttccaatcgattcttcgtctcgtcctcgtgtaatccccagcttgccctcctcgctcttccctcccaaaaccctacgcctccctgaccaagctccggggacgaatggacggaggagccggcttccctggcacgccggtcccgcgctcgccggaggacgttttccgggactaccgcgcgcgccaggccggcctaatcagggcgctcaccaccgagaaggataatttatgtttatatggacttcccaatgagacatgggaagtaaacttgcctgctgaggaggttcctcctgaactcccagagccagctctcggaattaattttgctcgtgatgggatgaatgaaaaagattggctatcacttgttgcagtgcatagtgattcttggctaatgtctgttgcattttattttggagcaaggtttggattcgacaaggaatccaggatgggatttcacactcacagcactaggatttactcagttttcagacacaatcattattagaactggaaggaatatggagagaagtagcaagcagaggacaggttttagaggatgaagacgagttcaattcctgcttgccttttctgttacacaagctatcctatactattgacattgcatgggctgagactccttgatagctgaggcccacaccatttgagatattgtgacggcctagctcatgacactccagtgcttgggtttgactctccatgggagtgaatttcaggaaacgtctcttcaccatgatcaataatcttcccagcatatatgaggttgtcacaggaacagccaagaaagagtccaaagaaaaaactcctaaaagcagcaacaagactaacaaatctggctcaaagccttcacgccaggtagaacccaactccagggtcccaaagatgccacctccaaaggacgaggagagtgaaggggaggaaggtgaaccacaggaagaccatgagagtgcgctgtgcggcgcatgtggcctaggttatgacgacttctggatctgttgcgacttatgcgagacatggttccacggcaagtgtgtcaagatcaccccaaataaagcggagcacatcaagcagtataagtgcccctcgtgcacaggaagcaagagggccaaggcttgattctatctatctacgatatagatatgaattgcggacaatgctccaagaaccgaggagcctttgacgagagttgtaagatgaatcttccgggtagggcagctaatagatttgaatacttcgtgtggatactgtcggcattggtgcttgagatgcctcaaaatatagtgtcagtactgatcaactgttaactgttgtagtttgtggggccctcaggcatctatgttctgtagtctactgtgtggtggtttagataccgtctatgccatttgtgatgaagcagtcgttttaaagttagatcccagtaatttccctactatacatttgtcttcgtgtaatcgtgtttaggcagaatctagcagtgaaggtcaggtcccgattgtttatgcattcgaagatgtcggttaaatatgtggagtcgtagtggttctgcttgtttgtgtgctctcctaacttgttgatgacacttacattttcttcatttggtttctagaagtccatagggtttcaacgataaaattgactaggt

SEQ ID NO: 32096 - DNA, 1955 bp, Zea Mays
agcattttgtttttttcagaataatgatgattcatgccttgcctatgtattaggagccatttctaatctattatcaaagataggcatctcaaacacagttggaataatcagttctccatattcacttgggaccaatattggactaggcacaccattatccattcagcaacagttacttgttcttttaaagcgatcactcaagagagctgatgcattgaaacttccaagtttactatcctttgatcacctttcgcttgcaaaatttgatctgaagcatgtccaaaggccactagtctctttcggccctaatgcatctacaaagcttagaacatgtcctgcagatgtctgtaagaatctaaggttaggttcccgtgtgttgactgactttggagcagatgttctatctacttcaaatgataatggtagttttagcacttcttggcttaggaatctatccgccacttctgattcatggcgtagcagttcaaagaacaccaaaaaaatacatattaatgacttcgacaatttccattatcatgcacaaccaagtccagtacctgcatcaatattgcaattagctggctcagcatatttgctgagagctaccgcttgggagcactatgggagtgctccaatggtacgaatgaatgttctagtttatgcaacctgctttgcggatgctgcaagttcatcagagttatcactagcatatgttaagctaattcaacaactggcggtgttcaaaggatattcagctgcattctgtgctctaaagcttgctgaaaagaagttcccatcctcaacaagtttacacatccagcttctaggaatgcagattctacatgagcgcgcacttcatcggccgcagctgtggccaattctcttttctctacgtgctacaagtacaacatgcaggttgagaatgcaagtgttcttttattacttgctgaaatacataaaaaatctgacaatgcggtacttgggcttccttatgcgttggccagccaatcattctgcaaatcattcaacttggatctgcttgaagcctcagctacacttactctcgctgagttgtggctggatcttggatcaagccatgcaaagaaggcactgagtcttgtctaccagagccttcccatgattcttggtcatggtgggcttgagctgcgtgctcgagctcacgttgttttagcaaagtgccatttatccgatctgaaattctcagttctcgaagatcctgaagctgttttggatcctctgaaccaagccactgaagacctgcaagcattggagtaccacgagatggcagcagaggcgtactatctgaaggcaatggcatacaaccatctcggcaagcttgatgagagggaggaagccgcggctcgtttcaaggatcacgtcactgcccttgagaccccgcataacgaagaggactcgcttaagtactgagacccaagaccatttgttattggcaagcatgccccactgccagagactaaagagggcgtggtggccttctggacccgcatggtggcactggcaggctacaatgctacactgaggcgaatggcgtttgctgccatgcggaggcactgccactgactgtgggcggaccggcggacggcggtgactgaaggagacgggcagccggtgaggtcaatgtgctagttgggtcagcgtggtatggtctcatccatggaccatggtgttcattagagcgagacgaagacatcagattgagacttgatgttcttactctgttcttatcgacttctctgctctgttactggggagttccgaattgctaactcagacagacagtgctgacaatgtgtttgtgtttgaatgtaaacagaacaagaacagaaaaatagaagattgatctgtattttcccttgactgatgctggatatttatagatggtgaatacacactaagaacgaacacgtttgttg

SEQ ID NO: 32097 - DNA, 374 bp, Zea Mays
atgagggagaagtatcatgggaatgatcagatccacaccgcctctggttcaggatcaggatacgaggagaacgattcttagggggccatgtcatcgtggattgtatcccctttctaccgattcttcactcaagcaggcaaatgctgttgacaaaccaaccgtgtctaaatggcacaatcgcctaggccatccctcgctccccatggtcaccaaggtcatagacaataataatctctcgtgttcctccgtgtccaataaaaaatcagtttgtgatgcttgccagcaagcaaagagtcatcagctaccttacagtagatctgttagctcaactagttttcctttggaacttgttcattcagatgtttggggtcctg

SEQ ID NO: 32098 - DNA, 1264 bp, Zea Mays
gacgatcccccagtcccctcccctcacggctgcatgcccgcatccggattccggtccatccggcagccagacgctgccgccgtaaattccccttccgcgtctgtctggccggtggccgctgtggttttgtaggctagtgcgtgccgtcctcggacctctcctctcgtcctccaccaccatgactgaggcccagtctccactatccgccaccatggcgaaggaggcccagtcgtcgccgtccgccaccgtagcgcaggcgacggctctgccgcagctcgtattattcaactccttgacgaagagggaggagcccttccagccccgggtggaggggaaggtagggatgtacgtctgtggcgtcactccctacgactttagccacatcggccacgcgcgtgcctacgtcgccttcgacgtcctctacaggtacctgaaattcttggggtatgaagttgaatatgtccgtaatttcacggatatcgacgacaagattattaagcgtgcaaatgaacgcggtgaaacagttacaagtttgagtagccggtttatcaatgaatttcttcttgatatgactgagctccagtgtttacctcctacctgtgagccacgtgtaacagagcacattgagcatattatagagttgataaccaaggtacagtattgctgcgagctaaaaaaggggcagaccctatgccggaggctttcacatgagtgaggtatagggaagggataaactgaggtaagtcttccctcacaattgcagagaggcttcttcgaacccgcaacatggtgggatagctctcaccactgcaccagacctgcccttagtattgttgcgaactaactgatgaaaatatatgttagttattgctttcatgatactttgcagcttttgtcaggggatgagcttagttatggccatcaggggctatgacccacccttgaaatttgcattcaacaatagttttctgtctaatagccagttgcggttgaagtcctttagtaattttcctggtgccccctgtctttgattggaagctccacactggctgttgtaatcaaaatcaactctgatgattacattatttgtcaccattcaaactaaacccattctttcactcatcatatgtagttccaggatattgaacagtcatgcataacttactgtatttaatcctgatggtacaaaaaattgttccttctatattttcttatgtgaaagacatgcctagcaacagtggtgagaagcctttccaatgagcca

SEQ ID NO: 32099 - DNA, 2532 bp, Zea Mays
tgaagactgaactcatggttcacaaaatggtatatgtgttacttaactcttacagggtgaactacactggaccagtttgtgccgttcttgataagtatggttttgactagaccagctttggtccagtccctatctcccagaagtatccacataaaaagaaaagctagtaatatctagcctgcatgttgcttttgtttgtttattcactatgccagccctgtattttatctctagagcagtctctaacatatcttctgtccctaaggagatttatgatgatttatctcagaaggatgtggaaagcctgagtgggaggacactatctagtgccaatactattggtcccgcttctgcaggaggcgcaaaagccaactctagttggaagctaaagtctgttgttactcttgcattgacattgctaacaagttctcaggcaatattaattgtgtggtcaaaaagagctggaaaatatgaatatagtgtcacaacagctaatttttcggtggaggctttaaaatgccttctatcactagctgctctttttaggacgtggaactgccatggtgtcactgatgataatagattaaccacatcttttgatgaagttggtgtatatccgattcctgctgttctttacatggtaaagaacttattgcagtactatatctttgtctacgtggatgcaccagcttatcaaatcttgaagaacctaaatatcatcagcacaggtgttttgtaccgcatcattttgaagaaaaagctaagtgaaattcagtgggcagcatttgttcttctatgtgctggttgcacaacagctcaacttaatccttcgtctgaccatgtgcttcaaactcctattcaaggttggatgatggcaattgtgatggctcttttgagtggttttgctggggtgtatacagaagctatcattaaaaaacggccatcaagaaacatcaacgtgcagaacttttggctatacatatttggggtgatcttcaatctagttgcaatttgtgttcaggattatgatgcagtcatgaataaaggctttttccatgggtattcattcatcacagttttgatgattctgaaccacgcactgagtggaattgctgtttcaatggtgatgaaatatgctgataacatagtcaaggcatgtggcactagcatgtaaatttatgcatgagcatgatagatgatgctactgttgattcagttgtatatgtgctgtccactagagcctgactacggtttatatgtggcattgtagccaataaatggctaagcagtaactcgtgagtatggtgactgcgttagttaggattaggttggatatgtttgttagcttccaaattagataatttgttttgtttagttgctgtcattaaggtgttctcttttgaatatttcatgagttagacctagtccctagcacctacacgtgaggtcactgtcatcatttgaattaagcaaatagaaatgtgaaagaagtctagtctaagccccgttttgtttccctcactaaattttagtctctgtcacatcggatgtttgtgttagcatgggctacagtaggcaggacccttgggttttaggtagtgcggctgcacaggcatgttgccttgtgcgctctctcctagtttggttatttggttgtaataggcaaggatcttcctgattggattgtctaggattgtttcctgttgtctaggattgttcccattgtctaggatagtttcctattcctgtgaacatccttgcctatatgtattcgagcctttgctcccattaatcattcaacattttcccaatacagagtctttcgtggtatcaagagtccgggttccacctcagatttttttcatttctgccccactaagcgcgtcggcctctctgccttatagcgccaccacctccttgccatgcagctctcgcgcaccggcctccctcctgtgaggcaccatgtccgctactgcgcctccatcgcccaagggcgccaccgcccaggacaaggtggttgctaccgccgtcgaccttgttgacttgtccgcctcggccaccctcacccgcgttcaacaagatgagctacccgccaagccacggaaacgaccagtgctgtcgccctggaacaccagagggcctacgatgcggatgttgcctgcctcgccgcggccgaggaggaggctcgtgccgcggccgaggagggggtcagtcagtgggcttcgccagggttctatcaccccatggccagcctaccctcttgggtcagtcgttggcctctgcgttcagcacggagacgctgcagcaacccccgtccactgagtggtacttcgacttaggtgctagttcccacatgacgtcttctagcaatctttcacacactttttcgccacggtatcctactccatctattgttgtcggtaatggctccctgcttcctgtggtcagcactggctctactgaattaccccactctttttttctcgaaagcgcaagagaactgcgcgaaatatattaaggagaaaaaggtcc

SEQ ID NO: 32100 - DNA, 1868 bp, Zea Mays
cgcgcatccgcatggctctcggtcctcggggctgagccaaatcaggagctccgaacacctgcgcgcgtctcggcccagccaactcgccgtgtttctccttacccgtcgcccgcgcggacacgacacgatcgcacactcgtacacccgctcgtcccaactcccaaccaagatcaggcaggtgaccgggcgtctcggttgagccaaaatcactggaatcaggggggaggagttttccaggcgcggcgcccgtcatccctgcccctgcgaggctgcgaccgcgagcccgcccacgaccagccctatccgatgaacacccaggccgagatctttcggctataaccaacccgcgctgccacttcggcttctctttctatccctccactccctcttatctgctgcgccatcctccccggcctccaccatggccacagccgccgcggccaccgcctcctcctccctcctcgcgccggcggccagcagcacggcgccggcctcgtcaaacgcgctgctgttcccctcctccgtgccgtcgctgcgtgcgtacccgcggctcctcctcgcgttccgccgccccgccgcggccgccatcgccgacccgcagggggccgtgctcgaagaggaggcggaggtcgaccagcagggccagtacgacgacgacgacgggtatgagggcgggcgcggccccgcgttcacggcccccacgcgcccgcgcaccggcaaggccgcgctactgcttaagcgcgaccgcacgaggtcgaagaggttcctcgagatacagaagctgagggagagcaagaaggactacgacgtgcccaccgccatctcgttgatgaagcagatgtccagtgccaagtttgttgagtcagcggaggcgcacttccgcatgaatctcgaccccaagtacaatgaccagcagctccgggccacggtgaatttgcccaagggaacaggccagtcggtgaagattgcggttctcacacaaggtgagaagatagatgaagctagagctgccggagctgatatcgtaggtggagaagatttgattgaacaaataaaaggaggatttatggagtttgacaaattgattgcatcacctgatatgatgcctaaggttgcgggcttaggtaagattctaggaccaagaggactgatgcctaaccccaaagctggcactgtttcttcaaatattactcaggctatagaagagttcaagaaagggaaggttgaatacagggttgataaatcaggaattgttcatattccatttggcaaggttgactttccagaggaagatctcattgcaaacttcatcgctctgttgagaggaacaagccatctggtgctaaggggatatactggaaaacggcgtacttgtgctcatccatgggaccttctatcaagctaaacataaaagaaatgcttgactatggtttggaatcatctgactagatgtgaccacaggcaccagttaagtcagctggcatcgttatcaccttcacagattaactatctgccccttgcgacaaatgagcagaaacatggttggtgtatggcaagcaggtgcttaggtacagttttctcagttttacgggcacatcatcagagcagctaaagtcacccagattgacaaagagatggtttgttggtcatgtatttatgagaaaattatgcacggtttcatagatgtctgtctcagacgtttgttgtaatgtttcatattttgtcaatagtcatccttgagcttaagccaacaatttgttttcacctgtcattaatttaattacctttcatatttacaagggcacgcctgatgcaatggtaagtctcgtttagtcaacaggtcacgagaaggattattttagtttatc

SEQ ID NO: 32101 - DNA, 2244 bp, Zea Mays
cgtgcacagggtggacgttctgcccccgacatcctccccttagctccgctccctgaagccgtgatcgaagccgccatcaacgccctccaccccctccgcgcgcggcagcggcagccggcatttccagcccctaaaatcctatttccctctcccacaccaggcgccgcgcccgtctgattccgcccgccagccacgcccgcagatctcgcttcggcgccctgattccgtcgtatgcaaggtcacagccctgccttccatcgtcgcccccatgccacgctccccttccatcctcgctcacttccagccgcccccattcccagttgaaggagtcgtccaggaaccaggaaccccatcaccggatcaggagcagctgtgtcgcgagcatggtcgttgctgagctcccgatgaccgcccgatggtgtcggaccccgcaccgccgtcggcaccgcgctactcggcgtactcgctgccgtcgacccacctccccggagaggacatcctcttctgcatcgacgtcgacctcgaggtccacgccaagatgaagtccgctgccgtagcgtcctcggatccacgtccaccgcgtcgccgcagtccgtaggagctgatggtgccccgacggtggggagcatcgagccatggctcaagtgcaaggatcagcccccgcagcagggcaaggagatcccgcagaccaaggccgaccgggccaagctcgatggcatgtacaagtgcatcctctgcgcctgctgctccacctcctgcccgtcctactggtggaacccagaggagtacctcggcccagccacgctgttccacgccaacaggtgaacagggcttcagcagggacgctggtttagcaatggaggcgatccattccttgtctgcttcaaaatcaagttatccaatggtaaaatatacagactgtggagttagtcctcaggatctacatcatgtattcacaaagtttgctcatcctcaaagtggaggaaaccgagggtttaatggtagtggtcttggccttgccatatgcaagaggtaaacgagagccctggaaataacaggaattaattcaggaaagtacacgagcaagcacccgaggtcaatgagcttacctccattgacaatggagataggaaggaatatcatgaagagaaatgaaagctgattgcaggagagattaaaatcaaagggattgagctacaggagagttgcagtctgtcgttcttttccatgggtgtgattgagactgaaacgatgggtaccagagtgaaggagtcgaagacagttttagtagagaaagagctcgaactgatcgacgagcctcagattcaagagagccctccagttcgtgcattgttgcatgatgaggtggattttgctgaatcgtcacttgctattagagaatctgacattcccgtgaagaaggtgctgataatcgtgacaatcacttttgtttggccacaacagccatattacttgaagcccatgttttgaaagctgtattggcacttcttctatggttagtggtggaatagcccgaacagtcctatgaaacagcaaaaaatctgttacagtccacttaggtggaagaggtagtttgtagatgattttgttttaatatatgaactgtaatagtaaggttacaataaattttcacataggtgatcaaacttctgtttgtgtaaagccaacagatggtctgacctgacatgtgtttttccaggagtcactacttatagaaaaagcttgttcctagaggtggtttctcccggcaatgcagaatcttgaagcacgtctaaagtggcttgatgatagttctaaatttcaactccctgtcattaccaggtgccagataggctgctggtcgattccatcctgaacaagttgcgccaaagattacatgaatattgcgtgccgagatctgtcttcagtaatgcgatgccatcctgaacaagttgcagcgacaattaggataggattttcccacgctttttagtcttgtgtattccttttatgctcttcatctttttttctcattatatccaccaattagatagtcatgtagactttcttttaggcgcttttgttttttatactttgtgttaccttgcttttgttttcatactttgtgttaccttacagatgtaaaaacgctcccctcccgtacattgcactatttatgaggaaaggtaaaatagcgtcatttagctttttcagtcgaggaaatgcactaatattttgtcgaat

SEQ ID NO: 32102 - DNA, 1432 bp, Zea Mays
ctgcaaaggaaggaactcacatcatcacagcagcgtggttgcttatgtgctaggtcagctgcaaaataaaaccgcttcagatgcacattctacggtcgtgaagaatgtctgtgagcatccaatggccaggcatgaagccgctgaagcccttggctcaatgcggaccaagagagcattgtgcttttggaggagtttgcaaaggatcctgagcccatagtacgagagatcggggaagtcatttgagtttctcttccttgagactcctcgtgtgcagccctatgatcacccaaatgcgaagtggctgaaggctccttggttaatgtgactgcaccaaccatgtatccactggtggcttgcctggtaggaaagattttgcttaccatctcagtggcaacagcggatgatgaaaaatggtgaagctgcagctcttgctgctgcaagcaaaaactgacacagtgaccgacagcaaaacagatcgtagctgcctcggagctaggagaagaatcctctgatcctttcggtttggatggttttgttgagcacaagcccaagaagcctgagagagcccgagaaagggccgatggcagctctgaacataggaagctgacagggagcaaagatatttctcaagtcgcagctggaggccccttgtgaaacgcctggaaatagctgctcggcgctacagagttccatgggcgcagactgccattgacatccttgcgaagcgcgcatactcccacgagacgaggatcagctgtggttgctcggctaaggtggtcagtcggcagagccgttggtgtctgtctgatccccgcttctcccccttggcaggcgggcgtagcatgatgatctggttgggttcaacaaggacggcgctcgcctgatccatccattgcctatgcctggcctgggactcccatggtccatggatttcggtgcttgtgatgaatgcggacgacgccagggtttcttctttgggcttcggcgagcgacacgggcgtgggagctgctgtttttgtgcttggatttccgtagaggagggttgacatgacatggccatcaccatccccatgcatgacctcatacatcagctgactgactggatgtgttggatgcatctgcatcccttacagttgcgttgcgatgccaagctaagcttgcaggtacctgtacaccgtatggtaggtgggtgggtggtgcctgtactgtacaccgtatggtgtgatatagagaagggggttgacttgaagaaagtacagtagagaaagagagcaaatgttttttggttttgatgatgttttcttttcccttctcttctataagagcaactccattagtttgctaaaggactctctaaatcaataagttaggtagttggtcttaaaacttgtgtccaacagctctttatgaactttctaaacataggaacttc

SEQ ID NO: 32103 - DNA, 201 bp, Zea Mays
aacacattccacccatgacacctgatgtcagttaacactcgtttgactaccgacgtgagactaaaaatctgcgcatttatatctcataaatacggaagtcatggtccatgggaagaagaagaagacgaatcagtgttgaagaaaagaaaagaaaactaaactgtattcccctttcgaacaagttcggcaaggaaataaaac

SEQ ID NO: 32104 - DNA, 785 bp, Zea Mays
gggggaagaggaggaacacgaagatggaggaggaggcgccgcccatggagttggtccgggagaagaagctctctgagaagatcacatacctctgttgaagacagtgatcacatatttctagagtcctctggcttgcaggatggtttgagttgcaagaaggatctccatagttgcggcaccaaagcttcagatgaggaaatttctgatcggttgcaagagaatcatgacaacacccagccaagtgataaccataactattcggtagatcaaactcaactgccctttcttcaagccctactgagagtacagatgaaacggagtcatcgtttcttggacaaactgccagtggttcactggcatcttctcacagataagtctatagatcctacgtatttggtagtgatgacagcaacagcagcagtaggagctgcaactctactgcagagagtaattcagatacggaccaagccaactcctcccaacccacgaaggccaagttcagttcaggcgtttcactcttcgacatcctgcgcaggacatcagagcagagcaatcaggaaagctgtagcacagtcagcggtgcatcggttctcggcattcaaattattaaagaggttttctagggtgagctcgaaaaattgacaactcccaggaggttcaagacagatcacagtctcacagatggtgcctgtatggttggagattctgaattctgaccactggcctggaagttcacgacgaaagctgtctagaaaaaggcttcaggcgaggctcgtgaaaaagga

SEQ ID NO: 32105 - DNA, 707 bp, Zea Mays
aggatgatttctgtgccatgaggttcagagtttgattgggatgattcgtgtatcagttcataggactgattgggaaggtggatacttcccactcacccttcatttcagtgaggattaccctagcaagcctcccaagtgcaagttccctcagggtttcttccacccaaatgtctatccttctggaacagtctgtctttcgatccttaatgaagatagtggttggagaccagctattactgttaagcagattctcgtcgggatccaggacttgctagatcagccaaatcctgctgatcctgctcaaacggatggctatcacctttttatccaggatcctacagaatataagaggcgtgttaaactgcaggcgaagcagtatcccgcgttggtctgagaacttcgccctactagggatccaagctgcacattcgcatagaggaagactactataaagattgtgagttctaggccattgttgcttcgatcaaccaccatgtggatagtcgttagttttctagcttatgttataaagatattcaatttatgtaataaagtttatgatattggtttgcagagaaatcatcatatttgtataatctggtcttgactcctagctacacagtaaaggttcaagatgttatttttttaaaaaatgacatccagacctcaactaggtaatttttcaaagctagaataaaaaaatgaaa

SEQ ID NO: 32106 - DNA, 2967 bp, Zea Mays
ctgactccacagtccacaccaccaccacacccaggcttccacttgccgccgcgcccgcgcctccccctcattttctccccctccactgctttgcgcctacgcatcgccgccccgcctctagtcctctgtcctcctcttcctactgtaaaccacctcgtccctatccgcggcaaccgttcaccgcgccgcgaggcctgctgatccgaccgaccttccaccgtcatggctcccctgcgccgcgcgtctcgcctccttcgatcagccgtctgccggctgaggtctccagcgccggctcgggccttctccagcgccgcggcgaccgagacgggtgccgtgatcgccgccgctgccgtggcggtggccagctccgggctcgggctgtggctgaaaccgccgtcgcttgccgactccggcgaggcgcccggcgaccagatctcggtcgcctgtgccggcgccacggaggcgcgggaggagaaggggtggttcctgttcgcagactcatttcgtagaagggtcttcttcaactacgagaagaggatacggcttctcagtcctcctgagaagagtccacggtagttcgtgaaggaagattaaggggggagcggagccctggagaattgcactgtgctccatcagagttctttatgcagttcgacacaaataatgatggcctcatctcctttgctgagtacattttttttgtgacattgctcagcattcatgagtcaaatttcactgtggccttcaaaatgttcgacattgaccacattaatttatctcgccaagaaaaaagacctgctcgttatgagcatgttcaatcatctgacttgtttgttgatggtaaaagaaggggtgatagacagagaagagtttaagaaaataatggcactgatgcggtcctttaacagacaagggtcgactcataaggatggtttacgtattggacttaaagttggcaagcctgtggaaaatggtggggtggtcgagtacttctttgggagtgatgggaatgaacctctacactttgacaagttttctaaaattttgaaggaattgcatgatgaggtggtttgcttctttcataccttgatccaacatgatgaattgtccataaaagttgaccctgacttaacatggaagaaaaatacatttatgtattatttaaacaacttttttcatagcacatgtctagtgcagtggtgagaagccttcccattgaggcaaaggtctaggctcgacgcagtctctctgaaaaaatagaggggtaaggtttgcctcggttattccttacctagatctcactcatgtgggagccaccaacactcggtctgtcctttttcatggcatagatatgcatatgcctacctaccaaatagtggacttccttttctaattgcctcaatcactgttcttaaggcctcgcctaggcgtccaggtgggggtccaacgcctaggcgccgcctagacgtccatgcggtggtccaacaccttgtctcgtcataccgctttaggccttgttcgtctatttcaattccatatggattgggtgggattgagatgtatttttgccttgttatggatttaagacgactcaatcccacccaatccacatgatttagcattaaaacgaacaagcccttaaaaaccatggcctcaatgattgctatagaattacgttgactttatttctttaagtaggctattgaaaattttccaaacttaactgaagttcttaaatggtacaacatgtactaatagagcttagatgcactgtgttctaaaacagcttctcttttcattctacacaatttatttatctgatactccctccgtctcaaaatataattcattttagactaaacatatattcattagttaacctatgaatatagtttgtatgtatatctacattcattatcaattattcgaatgtggacggagaactatattttgggacggagggagtactacttggctttatctgataccatttatttattttgctttctacacaatttacttatgaatatttcatacaattattcagattattcaactggagttcagtcattatgatgtcaaatcgtctaaaacaataccagcaaaggattttgcattgtccatggttgcttctgctgacatgaaccatatcaacaagctgcttgatagagttgatagtttggtcaaggagccagatctgaaggacatacgcatcacctttgaggagtttaaggcatttgctgatttgcgacgaagattggagccactgtcgatggctatctttgcttacggtaaattgaatgggttattgacgaaggaggatctaaaacgtgcagcgcaacatgtttgcggggtcgacttaacagatagagtagtagacatcattttccatgtgttcgacacaaatcaggatgggaacttgagcccagaagagttcttaagagcgttacaaagaagagaaactgatattcgtgaaccaacaataccaggtccattggggttcttgtcttgctggttcagtggtaggaagtgttcttcactaaaacatgtggttatctgattgagcccctatttgatcctcacggcgcagaaggtaatcaccaagcagtgcattgctgatcgttacaacggacttcactgtatgtcgtcttggtggccgaagcttgactagcagtaacagctctaattgtaaatcgtgtcttctgtagccctaggactgagtgatatacatcgttattctcacgtgtaaattaaaccccatatggccatatggcttcaatatatgaaacattgtcatttagctttatttttagttgaaaacgtgactcacttttgccggaaccgtagcgttagagtgccaaacagaccaaccaggtagcaggcaacaatcagccactaacgtcaagacaaaagatttgtagtttttctttcttttttgcgagctgtgtgaatctctcttataaaacc

SEQ ID NO: 32107 - DNA, 3337 bp, Zea Mays
ccgtcccctcttgccgcaacagatcgccaaccccgacctcacgtcctcaccccacgccaatggcggccgctctggcgagccgcgtggagagttgggtgcgggaccaggcggcgcggctgcagccctgggcggcggcgctgccgcaggcgccgcggtggccctggcccccgccgcggcccgcctggccgtggcccggggaccgcagacgccagcgggaacgcatgttccgggaggagtacgaacgtcgtagcagacagctccgcgagctctgccgcgctgtccgcgtcgacaccgtagccgagctccaggagttgctctgcgccatggtactcgccgagtgcgtctacaaggtatctgttagcagaggctggtgacaccctatttgctacatttattggcacaaagcagtacaaagatattattgctgatgtgaacatattccaagggaccttatttcatgaagatactgctcatgatttagctcctgatgttgaccctgaacaaaatgatacccaaaagggtgaggaaagccatgggaaatcttaccgagaaacatcaaagaagctaagaaaaccaaaacctgcagtgcaccgaggtttcttggctcgtgctaatggaattccagcactggacctatacaatcttgcacagaaaagaaacaggaaacttgttctttgtggacactcacttggtggggcggtaggtacccgtagataatatacattatctcattatttgctcatacatcttcaatacaactgcaggttgctgcattggctactcttgcaattttgagagttattgctaccacttcatctgaagaggataacaggcttcatgtgaagtgcatcaccttctctcagccacctgttgggaatgctgctttaagagattatgttcacaaaagaggatggcaggactacttcaaatcctattgtattccagaagacttggtaccacgcattctatctccagcttattttcaccactacaatgcccagacacctgaagcatcttttacaaataaaactgatgtgaaatctgaagaagttatggaggcaagtggggaaaggcccagaggaaacaacagggaacacctcgttctcggtgttggtccagtgcaaaagtcattttggaggctttcaaaacttgttcccttggaaggggtgcggaaaagcttaagtgcaattcaaaaacaaacaaatgtttttgggaaggcaccatcacaattggatagctatttgcaatcaaaggttgatgaatcagaagaaccacctcaatctcttgagattcaagaaagttcacaaggaattgctcttacccctttatcggataaagatggagggaacactgaagataataataggactgagaaaataaatgcatctgaagcaggggggtctaaacgctggagcagggtaccttctttgccttcatatgtgccatttggtgagctttacctattgggagattcatcagtcaatacactttcagattcagaatactccaagatgacgtcgaatatatgattcatgcatgtgtgcaaatgctcccatttttactggcattgagcaattgccacaattttcacatctacaagaattaattggtctaacagctactgattctgttgaacttggagatatcgtggaccctcctgttatccgaactgctacttctatccttcctcttggatggactggactccctggtggtaaaaatgctgagccactgaaagttgatataattgggcatgacctacaaatgtgcactcttttccaggcacaaataaatggaaactggtattccacagtaatagagactctaccatcagctacttcatactcaccaaatggagaactgcaacccacattacagaaaatgcggattcttgttggacaaccactaaagcagcctccaaattacattagtggggatttcatgattcctgtgatggcaggtgctgattcaacacccgactttggatttgaatcattttttgaagataaagattgctgcaagggtttgagtggatttctaatatatgggacaagtgattttgtaactgtacgtaaagaggtccacgttaggactcggagagtgcgattgcttggattagaggtatctccatgtatttaggtattgttataatatgtccctttacttatgttctatggaaatgctacatatagtatatatttgtctgatgcagggggctggcaaaacatccctgcttaaagcaatgttaggacaagttaaagaaagaaatagcactgttcttgaatgcatacatgtcgatttgcatggcaagggaatatcaaatggattgtgctacatagattcgacaacggtaaacttgcaggagctacctttggaggttgggcggttcaaagaagaactgttgttaggactccatgatatcagcaggaagactgaccttgttattgcggtgcataacctagcacaccgaattccacagtatcaacggtccaatacttctcagcctcagcctgctctttcacttctcttggatgaagctaaggcgctaagcattccttggattcttgcaataaccaacaaattctctgttagtgcgcatgagcagaacagattgatcagctcagctatggaagcatatcaagtttctcctgagatgacaaaagttgttaactcttccccatttctgatgccaagtgctagaaacagtttgcagcagatcagatcagctactgggaagttgaagaaggatccagcaaatagatctggttatcttcctgtaaactttggattgtcatcatttcagaggaaggacattgttatgcatgtggagggtgttagttcccttcgtcaacttgtacatcaagtagtcctcaacaatgaagaaacagcatttgaggaacttgctcgtgagagattgttgaaggagctagcgtcagagaaagcagcgtccctgcaagtgaagcagaagccccggaaaagagatggctctgttacagctgctgctgtaggtgcatctctgggcgcgggcctgggaattgtaatggctgtgataatgggggcagcatcagcccttcgaaagccgtgattcatgtattcttttgatccattatttacttcttgatttaaggatgtctgaacaaaagcactagtgtaggcatgaaaaatgaaattttagggcagaatagttagctgataccgtagtgccacattttggctgtgtatagaatgtaggttgagccttttttttgctgatctgaattttgttgtgttactggagtatggcttggatatgttctacatcatgttttaatttagttataaatctgtatcatgtcta

SEQ ID NO: 32108 - DNA, 3155 bp, Zea Mays
gctcccatctcttcgtctcccctatcgcatgaggtttacgcccctccccgctcgccgtcggcccatctcggcccctgaccctccaccgccactgactccctctcttgccaccgagggaattcggatctaggagcaccatgccactacagctctccctcgcccacgattggcccccggcccgggagatgccgacgcccatcgcgaccgcggttttctcccccatgtccttggcctcttcctccactctcatcctccctcctccccccgttctcggatgttctcgtcgcctccgccgcgcgttccgctctccccacagcccttgtccgccgcatcatcctcggtcgttctcggcgtcccgctccacgcccgccctcgcccaacgaccctcgccgcaccccctccctcgtcctcgatgactccccctctggccccatcctcgtcggcatcggagcctgctctctccgtcatgggggaggggaaagcaaaggaggaacaagagccaagcagttaagctagcccggtcgcttgccttccaccaagatcccccgagacctcatcgacgaggagatggagatggagtccagccccgccgcatcgcccttttcgtagagccgtcgccctgcgcctacgcttttgcagctcctcggcatcgcaatcgctacctcccgcgatgcgcccttggatccacttctcatgcgacgcctctgatcgacaagcacgtcgtgcgtccgcaccgcctccctgaccggcaagcacgtcatggctccaggcacttgcagcctccacgcttcttcggccagcgagcacgcgaccacgcctcccactgttcagtcgtggtggctccagctacgccagaagctgatggttgtgggtaaaacatttttgttctgtaatccccaggctagcaagtttcacttaaacaaaggttcaggctttcgttgtttgcaaggtactataggttgtagcacaacttatactattttgtactgactcatgcggagggcccgtgatcagaggtgctgttgaatttttagttacacaaagtctactatttagcatccacatgttagtaattttttagcaagaatgcaatatcggtacatagtatgccatgaatttttttacctatctttctagcattccttttgatgaaaagagagagtaggagtgtgttgtgtgtgtgataggggtgtacagaggagaaaaaactcaaatgcacggctcaacaactcttgtcatgtgacttttatcttcttgccttatagaatgcagattctagaggcgatcactgcacactgcacacacagccttcccctctgtatagctaatccaatcgacaaatccagtgtctgcgctctctctttctcaaaactattgtctcttttttggattctaatattcacccaatcattgtttttgttttgtctcatgtaaatttcagaacatcgaatcctatgtttttgtaaatttactcttgcgagctcaaattatttgcataataaccagccgtccgggacggagctttacccatacgtatatgttcagctatgttgtgtggactgaatgaaaacgttctgagctctactaaaaatatatgttcaccatgctatcatgcttagtaactgtgatatggcattgttagaagtacaaaaatctaggacctcacatgagtactccctattgtctaaattttattttccagtacaaccagttagtgcactccgtgtccataaacatggcgcaaggacagatggggcaaggcaaacatgaatcactccaaagtacaaatagaccaatggaaatatttgtattaataatattaattatataagtggtaattctattggtctattgacaatatatcttatccatggaaacagttggctggaccttaagtttttttctctttcgtagataggactggacacgacttgtggctattttctctctatttataatattttgtagggatagattattcctccaactcattgtttcgattaaaaaaatatacctaacaatcttttatgtggcacctcttcagcataacctttatattcattcttgcacttgtcagagtattctacccttacaaccatggtgcaaaattaatgacattctttaaatgtttgtgttgagcttcattgttcagttgctccatcacaaatgtagatttgatatctacattatgctttcacatacctataaaggagttatttttcatattttggtatgttgttgttttcacttaacttcaagagattttaacaatctcataggttggaaagcagatggttctaggcacacttgaacaatggttgtcactgaacttaaggggttttaattgttactgaactttattgatgcatagtgaatttaccattctaattgttgtgaatgcatgatatcacaacaatgacatgcctttttagttgctgctgttatcgggttgggtggcgcaggagaaaacagtgatcccactgctcaatctatcgatctatgagccaaacaagacacaaaccatggaacaagtggattgtctgcatcttaccattaatgttgaagaatggttggatgacaaaggccaaggagaatgctgcagctatgttattcagattatatgtggtccatgacaataaaaaagataatgaatgatccagagaatgtgaatgtatgcatagccttttattcgagtcagctattaaacaggctaaactattgttcaagtgagtagaggtattttgcaacacttaaataatgggtagtgccttatcgttatagtttcctaacatatttttatgtaccatgcataatttcttatctgagttgtcacctgcaagtttctcagcagcttatctcttcatcattgagtcaaccttgtacattatgcagaaaatggttgtcttttttatgcgataaggctgtctggaatgctatcacaaataattagtgtttttatatcaatgtacattatcaatatattatcaatgtattcttaatgatgaagaggtacaacgtggaatgcacgaggtggaaggctagcacaccgaggtcaaatttatcctccaggttcaaccatggaagtgaatcttctgatgatatttgcctatcattaagaattttatattgactcttttgaaataatttgtgcgata

SEQ ID NO: 32109 - DNA, 1952 bp, Zea Mays
gcacgaatcttatcgtagtccactcgaagtcgcctcccatttcgcgggtcaccggctcgccgctgcgtcaagcgagcgcttccccccagatctcgacttctcgagcctgtcctccgccccccacaggctctgctggatccagaaccttctagaacccctgcactgcgcggctgccaaagaatcagtggccatgggatctgctatcctcaacagcattgcccccgaggagcctaaagtggtcgtgccagagtacggtgagacggctgatatccaggacaaggaagttagtatggaacagctctgctccataagcacctatgatcagtggacgccactctctgtttctggccagcttcccaaaccacgctataagcatggagctgtggtgattcagcagaagatgtatgtctttggtggaaaccacaatggccgttaccttggcgacattcaggttttggacttcaaaactttgtcatggtcaaagctggaagctaaatcacaagcagaaccatcagaatcagctggagcagttccgttttctgcatgtgctggccattcagtgattcaatggggaaataagatcctatgtcttgcaggacataccagagaacctgcagaaagtctcagtgttaaggagtttgatccacaaacctgcacttggtctaccttgcgtacttatggaaggtcacctgtatgattatgcttttctgtgttttattgccaaagcttctatagtatttatacaaattagcttgttacctgaagcttgcttttgtttttcgttgttttcccccaaatctgtgatgaattttcctatttcctttagagttcacgtggtggtcagtcagtgacccttgttggagacactctagtggtctttggcggtgaaggtcatgggagatctcttctgaatgatctgcacattcttgatcttgagaccatgacttgggatgaatttgagaccacaggcactcccccttccccaaggtcagagcatgctgctgcttgctttgcagagcggtatcttctgatatttggcgggggttctcattctacatgtttcagtgacctacacctccttgacactcagacaatggaatggtcaagaccaaagcaacaaggtgttactccagaatcaagagcaggacatgcaggtgtaactattggagaatattggtttattactggtggtggaaatagtaggaaaggtgtctcagatactcttgtactcaacctgtctacgtatgaatggtcagttctcactaatcttgaggcccgtgcaccccctgtaagtgagggctcaagtttagtaatgcacacaattaatggagaaaattttctggtgtcatttggaggatatagtggccgttatagtaatcaggcttatgctctcaaggcaagtctcaaaccaagtgtcccatctcaacaaataaatgaatcagatacaaatggcttttctcccttatctgtggcagaaaattctagcaggaaagtcatatttgaaattgaggaacttaaagatgaaaagcctggcaatagggcagataacagcaaaaccttgggacaagtagttatggttgaacaaaacgaaatagaaaacagacttaatcaagagcacttgcagagtctccgcctgaagcaggaactaactggtcttgagaacagaaatgcagaacttactgaggaactccacttagttcaagatcaactttctatcgaacaaaccagggcttccaaatttgagaatgaaatttcagatattcaacaacgactacagaagatggataccctagaaaaggagattgaatcacttcgctatgaactggacagcactgtatccgaagaagaatcttcaagtggcaacgagttgcaccgcagtcggggcttttggaggtggaatgggtgaactcctcgagactcaaggagacggaaggagtaaattgttaatctcg

SEQ ID NO: 32110 - DNA, 2763 bp, Zea Mays
tgattctttcattatttgtttcgtttgggtaattatttccactctagtgcaagtgagcaaccgctgatctgtctgtaaatgcacaagtgccttgccgggctcacacacaaaagcacttttgttttttttaaccccccgctagcaaaaattgttccccttccttcctcactccttctctctcatccaccacctcgacgctttgcgccgctaagcgatggcgatggtcatgactgacgccgacgccgccaccgccactgccaccgccgacgccgccaccgccaccgccaccgccaccgccgacgccgccaccgccaccgtcgacgccgactccgtcaccgccaccgccgcagagaagccgaagcacgccgagaagccggactacgccccctacaacggcgcttccaccgcagatggcggcacgggcgcccgcgtccgccgcggcggcggcgtggtggattcggtggtggcgcggtggcggcgggaggacatgctcgacaagagccccctcgcgctgcatgccgcggccgcggtcttcgccttcgtcgctctcgtgcttgtcgcgtccaaccagcacggcgactggatgcagttcgaccggtaccaggagtacaagtacctgctttccatcgcgtcgctggcgctactctactcgctggcgcaggcggcgcggcacgcgcaccggatgcgcggcggcgtcgaccccatctcctcagcatctgggaggcttcttgatttcgttggtgatcaggcgagtcattgcttccaacttttagtctgcagctataaatgttgtgccgacacaggtatttcgctcagtcagcaaaagtccgacgtgtttttcgatttggtcgagattcctgctcagtgacgagaacgagagaacaatatgagtgcaatttataaactgatgagcaagagtaaaggttccagtacagacattctacttccgtggtgaagaaacacatcaattcagtagtactgtgtaggagaattctctcccgtagcttttcccccatctgattagcagcataacaatggtgcgagtaactttgtgacttgtgagaagaggcacaacaccttttactgttggatcagtcggattggtctgtgatgctccttttccaggcacaccttcaactcaacaacctaataccccttcagtttctttttggaagaaactaggcaaaaggatagtgggctagaagctctcaaaaatggtctaataatgtgggcaatctatatgctagtaccagcacatgacaggccaccagcagcaatcatggtaatgtggtcccagtattgggagattggagtggttggaccaaacttccaaatgagctcgaagttgggagtatgttttgaatcttcagttcttcagttggttggagataagtactgcatgtcaacaaaaatgttcatgatgcccattagattatgcttgaatgcattgaaatgctctcgtgtgaaacaatgaagtttgaaacgtctgagggactatgtacccttagggtttgtttggttgattgggaatacatctaatatttgaatcagcggcctcacttattctaaggacacataaaagttagaattagattttctgcaacttgaatttactttctagtgcatacctagattttgttagtcaaatggagtcaaaataataaagttcaaacaacgtatgtggcattacatgaagtaacctttcatgccatgtggtgtattcttataacagttaaactggctaagagggttttgtatcgaagttcatgcttatccctccttagattctttgatcaggactcaagaggttatttatttcatgtcatgataccatttctagtgcagcaaggtaacaagatttttttggttggctgcaacttagttctttcaaggcattctttgtactgaaactgatagttatcagaatcttctttagacgatttctattgcaacttttaaatgatacaacttagctgacagacatctgtgacatcgtttgcaacttgcaggtagttgcgtacttgctgatgtctgcgctgtcggctgctgccccgatcacgaaccgcatgagatctgcagttgtcaataacttcacagatgcaaccgctgcagcaatcagcatgaccttctttgcatttgcagctcttgccttgtcggcagtggtttctggttacaagctctccaaacaaacatacatgtgaatcatcgtcgtagaagtaaaacccattaggccttgtttggttgcacaaggatcgaatgggattgaggggaattaaatccattcttgtttaattttgactagaaagagatttaatctgctccgatccccttcaatcccttacaaaccgaagaagcccttaggtggaatattcattatggattgcttagccaaagaagagaaacctctgatgcttctcttcaacttgaaggtcatctgttatgtgttacggtgattgttgttgcttgcagtagcttccatgtgtgtacatagaattataggattcctgaatattattgttttcctttctaagatattcctgttataatcagaagtagagctgtatgcttatttcagggctcatgattttcctttacctctgaaaagcgaaatgtttgctgccctaattgtaacatgcaactttgcgctgcgttcattactgtcggaaattttctggttaaatttctaattgacatggttgttatattcattttatacaaggttaactggtattagtggcgtaagctctgtttctgattagctcc

SEQ ID NO: 32111 - DNA, 2329 bp, Zea Mays
atgaagtacgtgctggtgaccggcggcgtggtgagcgggctcgggaagggcgtgacggccagcagcatcggcgtcgtgctcaaggcctgcggcctccgcgtcacgtctatcaagatcgatccatacctcaacaccgatgccggaaccatgtccccattcgagcacggcgaagtgtttgttttggacgatggtggtgaggtggacttggaccttggaaactatgagagatttctggacatcaagttgactcgtgacaacaacataaccacggggaagatataccagtctgttattgacaaggaacgtagaggagattacctaggaaaaactgttcaggtcgtgccacacatcacagatgaaatacaagattggattcaacgtgtggcaatgaatccagttgatgacaccgaagagccagctgatgtttgtgtcatagaacttggtgggactataggggacattgaatcaatgcctttcatagaagcactaggccaattttcataccgtgtagggcctggaaacttttgcttggtgcatgttagtcttgtaccagttctaaatgtagttggtgagcagaaaacaaagcccacccaacatagtgttcgcggacttcgaggacttggactcatgcctgatattttggcatgtcgcagtacacagccacttgaagaacacgtgaaagtgaagctcgcacaattttgtcatgtcccgataccaaatatcattaatctccatgatgtcaccaacatttggcacattcctttgttgctcagaaaggcccatgaagctattttgaaggtgttagaccttcagtgcgcgagtaaagttgctcgagaaccccaattgtctgaatggactgaaagagtcagcagatgtgacagattgaaatctccggttaggattgcaatggttggaaagtatactggcctgtcagactcctacctatctgttataaaggctcttttgcatgcgtcggttgctttggacaggaaacttgtggtggactgggttccttcctgtgatcttgaagattctacagcaaaagagactcctgacgcctatgaaaaggcatgggagtcgttgaagggtgcagatggtgtgttggtgccaggaggttttggagacagaggagtccaagggaaaattctggctgcaaaatacgcgcgagaaaacaacgttccatatcttggcatttgcttgggcatgcaaattgcagtgattgagtttgcacgctctgtcatgaagttgcacggtgctaacagcacagagtttgatccaaccacaaaaacaccatgtgttgttttcatgccagaggggtccaaaactcatatgggagcaacaatgcgccttggttcaaggaggacctttttccaggccactaactgcaaatctgctaaactgtacggcaatgcttgctacgttgacgaaagacaccgccacagatacgaggtgaatcctgacatggtcccagaatttgagaaggcagggctttctttcgttggcagggatgagagtggcgaacgcatggagattatcgaactaccaactcataggtttttcgtcggagcacagtttcaccctgaattcaagtcaaggcccggcaagccatctccgcttttcttaggattggtagcagcgtcatcaggccagcttgaccacttgctccaacgtggccttaccagttcagcaggcagagacatctgcggcaaagggggagcgcagaaaccaaaagcttgccagaacgggcatgtcatgaagccactgaatggcctggtgcacgggcactattcagcgactcgctgcaatggcgtcattcccatctagcaggctgttttcgcttgttctttttctttccgttctacctacctgcagggcaaccaggaagagaagggctgtttgctctagcgacacggcagccgtttccgatgttttaacgaggaagcaattggcatgcaaagctgtcgcgcgcattaagaggcaaatctagcagcttattagctagggttcgattagtagtagtagtaatccgatgttgctggtttatttgttagtttgtttgctaagaaagattacaagggttagtgatgtgcagctagctccagtgtagcctgccgtctcgccccatttgtacattgtaaaaccactgctactctccatgattgactgaatggatgagtataaacgtattggaccaacatgctcggtgttataaaaatctaagttgcaatccaactgtagttgtctcggggatgttcggtaaagttgcgtgagctggtggcacgagctatgggtttggtaaaggcttagcagactcatatgtacatttgca

SEQ ID NO: 32112 - DNA, 3059 bp, Zea Mays
gcgcacgcgacgtccggcagtgcacctgcaccacaccgcgccgcgccatgtgtgtggccgagggagtctttattcattccctctcgctttctccagctcctgttcggtatcccgtttctcgcttggaggctgccctgcagcggccagcagccatggcgactcgcgccggacgactgcccaccactccggcgcccgctcttctgctcctcctcgccttcccgtttctgctgcagggagttcttccgtcgcgagccggggacaccgtcgccgccggccgcccgctgtccggcggacagagcctcgtgtccaagcgtggcaagttcaggctcggattcttccgcccagacaactcgagccagcgctggtacctgggcatctggtacaaccagctctcggtgcacaccacggtgtgggtggcgaaccgggggacgcccatctccgacccggagtcctcgcagctatctatctccaaggacggcaacatggtcgtcctcgaccacagcaggtcgtctaccgccgtctggtccaccaacgtcaccaccggcgtctcctccacgtccacggtcggcgtcatccgcgacaacggcaacctcgtcctggcggacgcgtccaacacttccgcggtgctgtggcagagcttcgaccactcgggcgacacgtggctccccggcgggaagctgggccggaacaagcgcacgggcgaggtcacgcgcctcgtggcgtggaaggggcgcgacgacccgacgccgagcctgttcgcgctggagctggacccgcgcggctccagccagtacctgctcaactggaacgacagcgagcggtactggaccagcggcaactggacggggacggcgttcgctgccgtgccggagatgacgtccaccggcgcgtcgcccgtgtccgactacaccttcggctacgtcgacggcgccaacgagagctacttcacctacgacgtcgcggacgagtcggtggtgacgcggttccaggtggacgtgacggggcagatccagttcctcacgtgggtggcggccgccgcccagtgggtgctcttctggtcggagcccaagcggcagtgcgacgtgtacgcggtgtgcgggcccttcggcctgtgcaccgagaacgcgctgccgtcctgcacctgcccccgggggttccgggagcgcgacctggccgagtggatgcaggacgaccacaccgcgggatgcgccaggaacaccgcactccagccttgcggcgccggcgccgccgctcgagacgggcagaagcgccgcagggacgacgataggttctacacgatgcccgacgtgaggctgccgagcgacgcgcggagcgcggcggccgcgagcgctcacgactgcgagctcgcgtgcctccgcaactgctcttgcaccgcttactcctacagcggcggctgctcgctgtggtatggggacctcatcaaccttcaggacacgacgagcgctggcagtggcaccggaggcggcagcatctcgatccgcctcgctgcctccgagttctctagcaacgggaacaccaagaaactggtcatcgggctcgtcgtcgcgggctcctccttcgtcgccgcagtcaccgccatcgttctggctaccgtcctcgttctaaggaaccgaaggatcaagtcgttgaggacggtccaaggatccctggtggcgttcacgtaccgcgacctgcagctggtgaccaacaacttctcggagaagctcggcggcggcgccttcgggtccgtgttcaaaggggtgctgcctgacgcaacgctcgtggcggtcaagaagctggaaggcgttcggcagggggagaaacagttccgcgccgaggtgagcacgatcggcacgatccagcacgtgaacctgatcaggctgctcgggttctgctccgaggggtcgaggcggctcctcgtctacgagcacatgccaagcggctctctggacaggcatctgttcgatcgggaccagcagccgggtgtcctgagctgggacgccaggtaccagatcgctctcggggtcgcgagggggctggactacctgcacgagaaatgcagggactgcatcatccactgtgacatcaagcccgagaacatcctcctggacgacgcgttcgtccccagagtcgccgacttcgggctcgccaagctcatgggtcgcgacttcagccgcgtgctcaccaccatgcggggcacggtggggtacctggcgcccgagtggatcgccggcacggccgtcaccaccaaggcggacgtgttcagctacggcatgatgctgttcgagatcatctcgggccggaggaatgtcggccagcgggcggacggcacggtggacttcttcccgtccacggccgtcaaccggctcctcgacggcgacgtgaggagcgcggtggacagccagctcggcggcaacgcggacgtggccgaggtggagcgggcctgcaaggtggcgtgctggtgcgtgcaggacgcggagagcttgcgcccgagtatggggatggtggtgcaggttctggaggggctggtcgacgtcaatgccccgcccgtcccgaggtcgctcatggtgctcgccgatccgtccaagtacgccgttgagttcttctcaggtttgccgtcgacctgagattgggccgctgcctctgcctgttaggggcatcaactttgatcagtagtgcatggtgtatatacgagctaatgagttcgtcaagaacttactcgtgccacgaaccctgtggcggtatagaacttctgcacgtagccaagaagatttcggatctgttagggcttgttcggttacctctcaatccatgtggattgagagtgggattagatggttttaatcccaaacaagtcaaacttcttctcaattttttccaatctcatccaatccatgtgtattaggaataaccgaacaagcccttaaggtgccaaaaaacgtcacatatttcttgccacacgtgcatgaggttatatgctttggagaatacaaatatgactacgaaataaacacacgtctaaatcatgacaaattgtggaaagtgagtttacgaacgaa

SEQ ID NO: 32113 - DNA, 1841 bp, Zea Mays
atcaggcggaaaccaaataccccgaacgtccacagcgagcgagaggccgcaaactcccgagaccgtacgaaccagacgattcaccaatcaccatggcggcgccggcgcggcgcaggtcctgcatctcctccggtggagccggagcgcctccttccgctgctgcttcgcctcttctccgccctccgccgcccgctgcgaggccggtccaaggccatgctcaaggggatggactactgactactccgaacccgagataaggacatgatttaagacatgtgtgtgtttcaagtagttcgttgattgggtgcaggcgcaggggtttcggccaggccaggccttgatgctgtggaaatgcctgtacgggaacaacgtttgggctcatttttacgacgagctggctggtttaaacaaggatttcaggaagatgataactgagcatgctgatctcaaggcattaattgtgaaggacattcatcggatagaacccgatgttacagatactggtttctattgaagatggttcagtgatttaaacagttatcattccttgcactaggggcaggacaactgtctgtgtttcaaatgaagttggttgggccatgaaatgtcagttttgcttcactagaagggcatgggtcaaccatttcacaatatcgacaatgtaataaaagcctcagcaataatggttcatgagcaaggccattttagccctcgcaaggttactgtctccacaagtggttttgtccctcagttaggaacccaattgcttgctgccgccagtcttaatgcaaggacagatgaggttagaaactggataatgactataaacagaaaggagaaccttaacttgcttcttggcactttaagaggtgaacttaacctcagaaaaaaaaacaaatagtgctatctgaatatgccatgctttctggagtgaacggcagtggatgatgccaaaagtcttttgtagagctactccaagggatcccatgcaagcaagataaacctcatctctttgagttccctcgacggttcccaatccaagcccacatcagacgataaaatgattgagttcggcaaacttttaattcaaggtgggctcactgtctttgttcggtcagcagaggggatgatcagatcagatggctgcctgcgggcagctcagagagcctggagactaccagctgcctctgcaccgtgcacctgagaaaattttgaggtcgtcttgtgatgctagacagtgcattacagtaaactggtcctgaggcctgagaaaattttgaggtcgttttgtgatgctagacagtgcattacagtaaactttagcgtcgtcgagaccgaagtgggctgaaaagcgctgcatcgtgcagccgcgtgacagtgggcgtctttcgcatggttggttcgtcgctgcggtctgagtcgccaaagctgaattctgttgtcatcggggagtgattcgaaaagtttggaacgaacctatcggtggtcaggaatgaggtaagaatctgaaggactacaaggttggcttgcctgagcgagataccttaaccattaaggtgtgcatggcacttggcacctagtcaccagaccagatcaccctaaatggtggaaagaaaaaagcgaaagatctagcgcaagccccacccggatcaaagtttctctctctctcttttccccccaaaagcaagtccatcacgctgcacattatgggcgtctttagcactgatctgaacacgtaagcacgatatacggttgcgccttgcttgtagcgtttggttgaagagccaagtagaacggaaccgttctgtcccagttttgttgttgtttggttacaaagtaac

SEQ ID NO: 32114 - DNA, 628 bp, Zea Mays
ctctactctaatcctatccctccatttcagatccgacgaccagtagatttcctccctattctaatcccaaccgtctgcttcagaatcaacggccaggaacctgtcgtttacctcccgatggtggctctcctacaactatggtggcgagatcgccgacccatcgtactactgcagtctagatcgtgatttcacacacagcgttgccgaaacagcgaagcagataccgtggacgagaaagactactaggtggcatatgacagcatgtggccagagaaccgaaactgctactccggcgtcattatcgaacctgggaccttgattagatcaaataatgctagcatttaaacccatacctcgaggtagcctacgacaaatcgtcggagcgaaagatacggtgtcgtcgtcacaccatggcggtgccccggtcgatagatccggccaccccggccccggccctggccccgatccctcctctgtttggcaatggcgacatggttatccgattgtttggggtagatctagattggttgggtctaactcctgcgctagccatgattatatagggcaaagtatttcagagtgttgaggggtattcgatcgaggagattgagtccgtcgtcccggacag

SEQ ID NO: 32115 - DNA, 2622 bp, Zea Mays
gaaattcgggggtgactagctagctgttcgtcccgtgtcccgttcctcctcgcccaccaccaccgcacgccggacaaaaccgctctcctcgccacattcgcagcccccctcgctcgcgcacacgccacaccacaccaccagtacactgctctacgccacagtacagcagcatccagcgggcggctggctgcctaatctttccagctctttcgtcccctcgccacgccgcccaccgctgccgcatcatccgcccgttgcccgccgtcgtcgcctggcccgcggattccgcccccattcgccgtcgcagcgcgccgagccccgtcccagatcgccgcggcgcttcctgccgccgtcggcgcggcgcagggttgaaatctatttgaccactcagttataaccatttctggtctgaagatgcttcgtcaatgacatctggaaactgtaatagtatgcgctgatcttctatgcttcaccacctgactatcaatgggctctttcctgtggaaacagcccagctacctcttcattttgataattctccaccttgttgctcatgaggcaagaacgctgagttcagatggtgaagcacttcttgccttcaagaaggcagttacaaattcagatggagtctttctaaattggcgtgagcaagatgcagacccctgcaattggaagggtgttagatgtgatagtcatagcaagagagtgattgatctgattcttgcataccacagattagttgggcccataccacccgaaattggaaagttaaatcagttgcaaaccttgtcactgcaggggaacagtttgtatggttcactccctcctgaactggggaattgtaccaagctgcaacaattgtatctacaaggaaactatttaagtggatacatcccttcagaatttggcgatctggtggaactcgaggcattggacttgtccagtaatacattgagtggatctgttccacattctcttgataagttgtccaaacttacattattcaatgtttccatgaacttcctgacaggagccataccatcttctggttcacttgtcaatttcaatgagacatcctttgttggcaaccttggtttatgtgggaagcagataaacttggtgtgcaaagatgcacttcaatcatcatcaaatggtctgcagtcaccttcaccagatgacatgattaataaaaggaatgggaagaattcgaccagacttgttataagtgcagtggcaacagtgggagctctcctattggtggctttaatgtgtttctggggttgctttctttacaaaaattttggaaaaaaagatatgcgtggtttcagagtggagctctgtggagatttttcaggctcttctgtcgtgatgttccatggggacctcccttactcctcaaaagacatcctcaagaagctagagactatagatgaagaaaatatcattggagcaggaggcttcggaactgtttataaacttgcaatggatgatggcaatgtctttgctttgaaaaggatagtgaaaacaaatgaagggctagatcggttctttgatagagaacttgagatattgggaagtgttaaacatcgctatttggtcaatctccgtggttattgcaactccccttcatcaaaacttttgatatatgattatcttcaaggtggaagcctggatgaagtgcttcatgaaaaatctgaacagttggattgggatgcacgtattaacattatacttggagctgcaaaaggcttgtcttacttgcatcatgactgttcgcctcgaataatacatcgtgatattaagtctagcaacatcttgcttgatggcagtttcgaggcccgtgtatcagactttggacttgcaaagcttttagaggatgaagaatcacatattactacaatagttgcaggaacatttggctaccttgcaccagagtatatgcaatttggcagagccaccgagaagactgatgtctacagttttggggttttggtactcgaaatactcagtggaaagcggcctactgatgcatccttcattgagaagggactaaacattgttggatggttaaattttcttgctagtgagaaccgggagagggaaattgtcgacctgaactgtgaaggagtgcagactgagaccttagatgccctgctctctcttgccaagcaatgtgttagctcctcgccagaggagaggccgacaatgcacagggtggtacatatgctggagtcggatgtaattacaccgtgccctagcgacttctatgattcagagtagtctcctggacaagccacgctgctgctagtttcccgtgggggcgcattcctttattctttgcgtatattgtgtaaatgcattgccgcggtgtttggtctccaatcggctggctcaacgggtgacttttttttgcgtctgtatacctatgtatgtatctgtcatggtacaagttggctatatgctgatttaataataagagagaacttactagtagactattgtatgtttaactatagtctttagatactcgtagatgttgtgggatctacaaaagaaatggggaaataatgaatatcgcttggaacaaacaagaatagataaaactcttttggcttggaggat

SEQ ID NO: 32116 - DNA, 2308 bp, Zea Mays
tctggattcctcctcccgtcctccggtcctcccgtttccccccttccccttccgcttcgccattccttctcggtcagaacgacgcgcatccccgcccgcacgttcccgtgctctcgcttctccggaggcgaccagggttgggacttgggaggctagcgagaaggtgctacccgggccaactcctccgatcgcccgcaggagaaggggatctctccgcctccccgccctcgtcgggcctttcccatcgccacccgcgaggccacgcgctccagctcttgtgaaccggaagggttctggatttctgagccaagcgaccagcacggtggctcggccgggctgacactcccctcccctgtcgcccggtctcttccttcccgagcagaactcccctgcgtcttgccgcttctagcatcggggagaaaaattatagaggaaggatatgcgggatccatttgatgcaccggttgatctcattaacccggaccataatggtgggaacaaactttctaggactggtgcagtgtctgctggggactatggtttacaaaatggacccaaatcctttgccccaaactccgacaccctagtcaggcatcaagtccaggttgcatccttgcacaaagacttagttttggaagatcccaatactcgtatcatggatcctgagaccaaggaactttactttagatcacaatcacaaggggacgagatcttgttgcttcgcaagaaaattgctgaggcatctctcaaggagctgagattactgggtgaaaaacatattctggagaggaggctcacagacttgaggatggctgttgacgagaagcaggaagaagctatatctggtgctttgcaacaattgaaccagaagaaaacccatcttgaggacaatatgagactggcaaatgaactaaaagttgaggaagaagagctatacttttttacttcttcattgcttagcatgctagcagaatacaatattcgcccacctcaaataaatgcttccatcattacaactgttacaaagcgtttgtaccaacagatgcatttgaagctcagatctttaaatgacaatttaggtgatatgactcaacctggaaatatatataatcccaatcttcagcaagtaaccctatcaagaaatgaaccttccccatcttataatttggattcaaataggaacactcttcaacagtatgctcaaggtccaagtgaccgacatatggatcaaatgtaccatggatccaattttcagcaggatactggcggtactactccctctaattattttgagggagacagaagagtagatggtgactcacagttataccaacctgatggtgacgctttacctggtattgaggggtttcaaattgctggtgaacctagaccaggatttcaattaacagcatgcggttttcctactaatggtactaccctttgcaatttccagtgggttcgccatcttgaaaatggtaccagacagtctatcgaaggtgccacgatgtatgactatgtggtcactgcagatgatgttggtacttttcttgctgtagactgtacacctatggatgataatggccgccagggtgatttggtgacagaatttgctaacaatgggaataagataacctgtgatccagagatgcagagtcatattgatgcatatatttctaatgggagagctgaatttgaagtttttgtcctggcttattctcctgaggagtgggaattggctacattggtgctaacacgacctaactatcagattaagttcaaaaagaccggtgaagctataattgatgagaagtactcacaaagtctacagatgaaaattccaaatgggcgcacaactcaatttgttttagtaactgcgggtgcaactctcccatttaacacacagggaatatcagagccaaacaatgaggattacgatgttaggttacgcgatctaatcgtattagtcatgagaactttccagaaaaaggctttagatgccaaaaggaaagtcaacacttagaatccatgttgatctgttacaaaagattctatgtaaaaccgtagaaaattttcctatttttgattgttttgtgcagtattcgatgatttttgttcttgagatggaatgagctctcgatcaaagttttgctaggtgctagacggaatctaggcgatgacccttagcctagggactagtccaagcctaggcgatgctagacgttttgccaacttatataatatatacatttatagataaaaaagagggaaggaccagtagacataccttttgtccttgcagatctgctaa

SEQ ID NO: 32117 - DNA, 3872 bp, Zea Mays
ctctgtcaacatttgagactggttcaactcgcttgtgtgccgaagttcccctgcggcggccgtcatcaccatggtctcccctcgtgtggctctggtcttatcgtggtgaccatcatgggtcgagaggagtgcgacgacctggggttcactgtctcacccttagctttagtgcaaagttccctcccagctcatcgcagaccaaggtgtggtcgccatggttcaaaggcgacccgtgcgtcggcgcggccacggacggcacgtccatctacgccgacaaaatgaacccgggcatcaagtgcgactgctccgaccacaacaacaccatctgccacattaccgagctgaaaatgaacaaactggatgtggttggtcctatacctgaggagctgaggaacctcagccacttgacaactctgaatttacaacagaattacttaacagggcctttgccatcgttccttggagaattaactgctttgcagcagatgtcgctttctggcaatgcattatcaggaactattccaaaggagctggggaaccttgtgaatctcataatcctgagtttaggcacgaacaatttaactggctcccttccttctgaattgggtaacctggttaaactagagcatatgtacattgatagtgctggcttaagtggtcctataccatcatcattttcgaaacttacacgattgaaaacattgtgcgcatcagataatgactttactgggaaaataccagattacattggaagctggagtaatttaacagatttgcggtttcaaggcaattcattccaaggtccacttccaagcactcttgctaatcttgttcagctaacaagcttaattttaaggaattgcaggatatttggtactttggcattagtgaacttttcaaaatttacaggattaacattattggatttgagttttaataatatcataggtgaagtaccacaagctctactaaatatgaattcactcaccttgttgtatgttttgtatccctttcaatgcttattttgggggcataatgaatttcattgtttatcttgctaattgtagcacatgcattccgatcagatttcttgggaacaatagtcttacaggaggccttccaagctctataggaccttctattaagtacttagacttttcctacaactacctctcaggaaaccttccttcttgggctagtcataatttgcaattaaatttggtggcaaactacttcgtgatcaacaagtccaaagatagtgtcttacctgcggggctggagtgccttcagcgaaacacgtcatgctttcttggctctccacaatcttcctcctttactgtagactgtgggagtagtagatctgtatttgcttcagataattccatgtatcaacctgatgatgccaatcttggtgttgcatcatattatatttcaagcccaccaagatggggtgttagtaatgtcgggagattcatggatacatcaaacgggagttacatagtcaacagttcacgccggtttcagaataccctagattccaaacttttccaaacagcaaggatgtcagcatcaactttaagatactatggttttggacttgaaaatggggactacacagtcacacttcaatttggagaatttgactttgaagatttacaaacttggaagagcgttgggagaagggttttcgatatctatctccagggtgagcgtaaggagcagaactttaacataaagaaggcagcaaaagaagctggcgaagcaagcacatcgtacactgctgtcaagaaacaatatactgtacctgtcacaaaaaacatcctagaaattcatctcttttgggctggaaagggcacttgttgcatccctaatcaaggcgattatgggcctacaatatcagctttgagtgcaactctaaatacaaaaaagaagggtaataaaataggtgtaattattggagtcgtgattggtgcaacagttttaggactagcaatacttgctacactctgtgtgtggaggcacaaaaggagaaaagtatcactagagcagcaagagctctacaatattgttcgaatacctaatgtattctgttacacttatggtgaactaaggaccgctactgaaaattttagttctgctaatcttcttggtgaagggggatatggatcagtttataaggtttgttcatttgtagtacacaatgcatgatttgaatctgctagggatcttttgtggcactgtaggttaatagtgaacaacgaatttgttttcattgtgcaaatttggctagagttgtgttgtttaattctactttgttcaatgaaaattccttttatcatttactcatttaacgtacttctccaattatcttactaacatcagtgcataataaatctgggatattccctgttattttccttttccccctgttttgcacgtggtcagtaaaatgagattgattgggtactctagtgcatttactctattacatgatattgattttacttggtgcttataactcttttttagaaaaattcaccttctggcagggtaaattagttgatggcagtgtggtggcaattaaacaactatctgaaacatctcgccaagggaagaaggaattcgtagctgaaatagaaactatttcccgagtgcagcaccgtaatcttgtgaagttgtttggtttttgccttgagggaaataaaccacttttggtttatgagtacatggagagtggaagccttgataaagcattgtttggaaatggaagattgaacttgaattggtcaacacgatataaaatatgcttggggattgcaagaggcttagcttatctccacgaagagtctagcatccgcattgtgcatagggacataaaggccagcaatgtattacttgatgccactttgaaccctaagatttcggatttcgggctcgccaaactttatgacgataaaaagacacatgttagcacaaaagttgctggtacatttggctatctttcacctgagtacgccatgagaggtcacatgactgagaaagttgatatttttgcttttggtgtggtcatgttggagattattgctggaaggccgaactatgatggtaagcttgaccaagacatggcttatcttttagaatgggtctggcaactttacgaggaagaccatccgctggacattgcggatcccaagctcacagaattcgatagtgtcgagttgctccgtgccatccgcatcgccctcctctgcatccagagctcacctcgtcaaaggccatccatgtcgagagtggtgtcaatgctcacaggagacagcgaggcgcctgaggcagtgtccaagcctagctatgttgccgaatggcagagcaacactgaagggacgtcaagctcagtgtccacagcagaggctgtgtccgtggctccattcctaaaccccgttgtggacgatggccggtgatgatggccatcgctaagatcatcttatgtcaagcactcaagccacagattgttttcttggagatccacctttaaaggccccattatttaggttgaatgtggatgacagatttatgttgttgactggatgagatgtcctagggtttcctcacgttgtagaatacaactctcacaagtataagaatctaggaacatattccttcgatgtaacatacctcttttgtttaatctgttttgtaagagaaaccagaagaacaccttgtatttcggttgatattttgaaacccacagccaattgaatgctgggtgtgtaggcatatatatgaccaataggttgattgtaagctttactacaatagtggggcggtctcgaagtatattgccagatatgttgcagttcattttctaacacgag

SEQ ID NO: 32118 - DNA, 2122 bp, Zea Mays
tggttgtagaaagtttgaaaggatgggtcttctttgttcgcatgccctcaaagtcttcaccctgcagaatgttgacacaattccagaaaagtatgttttgaaacgctggacaaaagatgccaggagaagcatgtatacacttgctcaggatgattcaacccaacaggaatgcacagaggctgaacttgcatatcgcaatcgggcaatgcagtatgcatataacctaattataaagagccaggaactggaagaatcacgaaaaatattctgggactcccttgaaactggagagaaggcactggaagtgttctttgaaatgagaaacatgcgcactcaagcagccaaggatgctgataagaatgtaaagaagaagaaaaaaacatcaaaaggaacaaacccaaaaaaagctaaacaagccccaggagtttcctcaactggtccagagctgatagtccatactaatgagcatcaatttcaatcttcacaagatgctcagggtaatgcaaccattggaagaccatattactatcagcaggcttttccaaatgcccctatacaaccaaaccagatgtacatgcatacaaatatgcacacaatgcccctttgcacaccgcaggagagctgcctatcttttcattaagataggggaaaacaaaaggaaacaacaagggagaggcacgaggcacactctcagccacccccggacaaaatccaacttacacacccacactgatgcctaaaattaaataatatgaccacaaccatgagtccatgaccaaggaagactaactgcactcaaagggggagcaactgaaggaggcgcagaggttactgctaagcaccaaaggctgctcagtactcaccgcctggagaaccacttctcaaacacacatgcatttttatgcttccatacttccaagttccaaacaagagctgtctgcatatgctgcaatacgccccaattcaatgtttggtggtgccaagaacatctgaaggatattaaggtccagattcatgtggatgtcattggaaaaccttattgagactttcgctatcaactccgctttgatctctgtggacccatttatggaggcctggtggcacttcatgtttggttggttcaggggctcttcgttctgatctttagggaagcggttattctggctgttgcagtgcaggctgtgcagccccttatccatatagcagtggccagtggcttgctattaatatcactcacaggcaattttagggttgtaaactgtaaggcctcaatccgctgtgggcgtgagtttctccccttccaaggcagtttcctgcatgggttcagcttgagttgagctgctgagttgtgaacgaggaagcaaccaaagcaactgggagcctgggagagtgggagtggaggagctggctgccggcactggccgaggaactactcagtccaagacgtgtgtcgatctgaagtgacgctgacggctgacctatcacctatgttttgggaggggctcagggccggcaacagccatggccgggcaggtctccacacagtggccactggagctagaactggacctggaacggcgccccacctgccaaacggcaatgctgatgaccgcttgacagctgcttccgatgggctggccacctcccactgcccacatatgaaagggaacctggaactgtgtttgctcggcaaccagcactggtttggggaaacagaaagggtacataattgtagattgagagaaaaattagaggatgcagctgttgcttgggttcagtggtgaaggaagcagctagcagcttcttgggttcattcaagagagattggagaagggggaaggattggaaatgttgcttctgattcgcttgaactctgaatttctgattgtttccttgttcacagaatgtagtgtcatgcataacctgggttgccacgccttgtttctgaggcgtgacatgtgactgtcgtgatggtgtttttgaaatttcggttggtaagaaatgctgaaagaagaaatggcgtcattacgttcgttgcattgctttgcctattttgcgtgtttaatggaatatgattgttgtatggcacttcactctgaatgtgagttgttttatgctgagg

SEQ ID NO: 32119 - DNA, 1689 bp, Zea Mays
ctacggccagccgctggtacactttctcacgaagacggccaacgtgcatgacgctaccatcgtaacagagcaccctgttgtcaggattggcgttgtcttcagtgggaggcaatcccccggagggcacaatgttatatggggcctctatgatgttgtaaaggctcacaactccaacagcaaaattattggttttcttggaggaaccgatggattatttgcacagaaaactattgaaatcactgatgaagctcttccatcctataaaaatcaaggtggttatgacatgcttggtcgtacaagggatcagatcagaacaactgagcaggtaaaggcaacaataggtacatgtcaagcattgaagttggacgctcttgttataattggaggtgtcacatccaacacggatgctgctcagcttgctgagacatttgctcagttgaaatgtccaacaaaggtagttggtgttcctgtaactctaaatggagatctcaagaaccaatttgttgaaacaacagttggttttgataccatatgcaaggtgaactcgcagttaataagcaatgcatgcatagatgccctttctgctgaaaagtattactactttattcggatgatgggacggaaagcatctcatgtagcattggaatgtgctcttcagtcacatccaaatatggttatcctaggcgaggaggtttctgtgtcaaaacttacaatatttgatattacaaagcagatatgtgatgctgtgcaggcaagagctgaaaaagacaaatatcatggagttgtacttattcctgagggccttgttgagagtattcctgaactgtatgctttgctccaggaaattcatggactgcataataaaggtgtttctgttgagaacatctcttctcatctttcaccttgggcatctgcactatttgaatttttgcctccatttattagaaagcagctgcttctccatcctggatctgacgattcagctcaactgtcccagattgaaattgagaagcttctagcacaattggttgagaccgaaatggacaaacgcctaaaggaaggcacttataatggaaagaagttcaatgctatctgccacttttttggataccaggccaggggtgccctgccttctaaatttgattgcgattatggctacgttcttggacatgtatgttatcacatcgtagcggctggtttgaacggctacatggccactgtgaccaaccttaagagtccagtaaacaaatggaaatgtggtgctgctcccattacatctatgatgactgtgaagagatggtcacgtggtgctgccaccagtcaaatcggtaagcctgctgtccacatggcgagtgttgacttaaaaggaaaagcatatgagttgttgagacaaaattcttctagcttcatgatggaagacatctaccgaaaccctgggccacttcagttcgaagggtcaggtgctgatacaaagcctatttcattgtgcgttgaagatcaggattacatgggaagaatcaagaagttgcaggagtatttggagaaggtgaaaagcattgtgaagcccgggtgctcgcaggatgtccttaaagcagcggttttttcagaaaagatttgctgagaatctggatctccgtggataatctaactgtcataagaatctaaatattgtgcggcttacgtgtggag

SEQ ID NO: 32120 - DNA, 1799 bp, Zea Mays
cggttctaccgtcaacgcgccgcggattccccgccctcctccccgtctgctccccgccatcaacgcgcacgcgacctctgctctccgccatcaacgctcactgcatgcctcaccctctccccgccatcaacgcgccgcagatcccccaccctctccccgccatcaacgcgcaagcggatgccacggatccgcctatccgccataaacgccgatccatagatccacgctcgccctgcctcctacgacaccaaccgaaccctcaacctctcctacgacaccttctccagcccgctccccgacgacatcgagcgcctggctttcacagcggcgggacatggaggatgaacgagcaccgggagagagtcggttagatctaaatttccgtggaggtgagcttggacgaggtcaggttcaaacaggcatatctctgaacaccttgggttctctaggctatgagatagatcatggatcgagatggagaatagcagtgtgtcattctaaactgggtgatcagccgaaaagatcccatggataatcattaatgattatgtgcttgatcaaacgagaggtactgtcatatccagccaggttgtttctaatttaacagagggagggaaccaacaaaggcactccatgggggaatggttgtggccaggtttgttaatggtgttgcggctgcaagcgtcgtgtggcatctgtcgcgaccaagcattacgagacagtctcctccagcgctttgcactgctcctatcaaggtcactcttattggcagtctagaaatgccaaaggatgacatatggcttgtcacagctatcctatctggtctcattgaataatgtgcgaagatataagtcacatctttcttggcctcctatcttcgcctccagctgggatgagtctgtctcattacgatggggtgatcttgggctttctgtttcacatatcttcaggcctgtgcctggatgctgtaccatgcttggtcctatgaatattgaagtaaagcaacggaaagttgtagctgttggtaggaaacggactgcacggccaacagaaaatacctgtcctgaagagcttgctgagtcttcagaggaagtaaagacagacactgacaggaatgtcttagttatgtttgatatcctcaggcgaaagaagagcgcaaaattggaaaaccttgtgttgaataggctttcatttgcccaaacagttgaaaatgtttttgcactatctttcttagtgaaagatggtagggtggaaataactgtagatgatagcgggcatatagtacggccaaggaatgcacctgctgctagcgctatagcctcaggagaagtctcatacagtcattttgtttttagatttgacttgaaggactggaagcttatgaaagaagttgttacagagggagaagagctgttgccacataggacttcccagagcaatctttgcaacgaagaaaacgaccaaccaaatctggaggtacgtgcacaaataatgcctatcaggaagaagagctcgtgcttatctgaacttccagttgtgccagcggagtagggctgtaattataaattgtttgaagttctggtcacatcttgcaactacagaatggtgtttgtagggctgagtgtaactagctagcttggctcgtgttgggtcattaagggtgtgtttggttggatgtatatggagggatggaaagggacgaccacatattctatagtgtttggattagagtcgcgtggggcgagataaacatcggagtaattttttggtggcggtgtgattcaaaaatttgactactt

SEQ ID NO: 32121 - DNA, 2411 bp, Zea Mays
ccgcaggcccattgaggacaccagagtgtatggatcgctgccgcgtgctcccgtcgcggctcccgcacgcggacgctgtcgaccaactactcgttgtccttttcccgaacgccgagccctagcgtcaacgcggccaggcggcggtcagggccgggcgtcaggcggcagcagtggagcacgcagcccagcagctctaagttctattcagattggtgttttgctggtaccatgtccagtccgtggagccctctgagtattgaggaagacgaagagatacaagagcttggtgccgaggagcagcaggttggtgagcagctgcggcagggtgatgggcagcagcaggagttgacagctgatgcaagagcacaagagaccggaatgaaacgtgcaagatcagtgtccagttcatctactaatccatcaaattctcgtaaatctgagggaaagataaaggttgaggaaaatgcaccaggagctgcaacaggagtgattttgtctcttcgtgaaagtttacaggactgtaaacaaagccttgcatcttgccaggtttcataccattcactttttctgatgttctcatttactagagcattaaaatactgctacgttatctggttggataatatgttatttattctagaattttggtataacttgttcactataaatcacatttacttggtggttttctggatctcctaaataaaaaccagctgacaaaacaagttttactaggtattttataaaaataatttaaagttagtctgtatttcgggagttctttgtttgagtggcacaagcctaaaatatctcccaaggacagaggacactgctttgcgtgatacacacttcatccatggctagtattgtgaaggtctttcatgtgcacagtattcatgaactggccatgatcagaccccccctgcatccctggcagcagaaccaagccttattggtgagggcagtctatatcattatattccctctccgatccatggttaccatataattggatctgcatttctgctgatatatgttggcaaaacaaaattgtcaactaaaaagcttggtgaaaaactgacataaatagaattgcattactgaagtgataagctcctgttgaagatttaggtaggaaaaaaggaatataagattttggtggattaagtaatatagttctgtacagttagttggtcaactgttatttccactccattccagaatccagaggctgcaagatctgctctacctagataaaattatgacccttttgacataaattatttggactattgtaacaacaggtggaactggaagctgcaaaatcagaaatcgagaagtggcattcagcatttcagagcattccagctgtaccttctggtaccattccagatcctgtttcagtggtgtcttacctcagtaccctgaagtcatcagaggaatcattgaaggagcagctggagaaagcaaagaaaagggaggcagcttttatagtaacatttgcaaaacgagagcaggagattgcagaactgaagtctgcagttagagatttaaaaacacaattaaggccaccatcaatgcagacaaggagattattgcttgatccagcaattcatgaggaatttacacgtttaaagaatcttgtggaggagaaagagaaaaaaataaaggagctacaggacaatgttgctgctgtcaattttactccatccagcaaactggggaaaatgctaatggctaaatgtagaacattgcaagaggaaaatgaagagattgggacgatggcatcagaaggaaaaatccatgagcttggaatgaaaattgcagttctgaagtctcagaacaatgagctcaggaatcaatttgatgttttgtacaaacacatggatggtgtaacaaatgatgtggagagatcaaacgaactggtgtccatcctgcaagaggagttagaagctaaggatctagagctgactagattgaaggaggtgcttgcccagaaaggagctactcaggacgcaccggtggagaccagtgacgacgctggaaacggtcaggaggcagattcagatacactgcaagtgaaggcggaaagctaagggagtttaggctttgaagtgtgtttgttgggacttgtgggaaaagtaatatcatgttatgcggtctcatagcatgtctaggttattatatagtaggggaatcactgcacaaaaacatcggcaaacttttatctatgatcgtacatatggctttacaaaagattattttgcattgtagacaacactattatagtgtggattttgaaattagatatataataataatatagatgagtaagctgtgagtaagaaagcctcaaactgattcgctacagatttgcgctggctgaaccagtaatgatctccaacaattca

SEQ ID NO: 32122 - DNA, 698 bp, Zea Mays
cctggaagatataacagtaccagataacataatatactgcccatattctatggggccttgagggttttgcagatctgcataagtccgaggaaaatgctgcaataatttgcggacctataaaagaggaggaggtgagtttttttcctgtttttaccaaatcaaaagaaaaatacgaaagaagtagcttgacagctgataccgtatggaaaccaccatcctctagctggcgatattgcctactagttgttccaggcaagcaccttatacttttatccagtatactattgtcagaggttatagcatctgacaatgactcgggggacttcgtatcaactattggttcaatgagagggatctcttcactgattgaaagatcacctgcagttgtgggtgtttgattcaatggatgacagtcattatggaattcataagctgactccaaatttcgagctgagccttggatgaaatttgtgagcttttcagaaagtgcagcttctttaaacttcatgttagtagaatcctcatacagttcaacaggtgatgcatcaccaacttttatgcatggaaactttgcagtaatttctgggaaatcgatttctttcaaggcactaatcaactctgcagaagattccccaggggctctttgtttctcaactaaatcttgtggattactgtaacccaccaaaacagacacctgc

SEQ ID NO: 32123 - DNA, 1419 bp, Zea Mays
gtgcgacccaagtcaagagctggtgcatcgaggggctccgtcagcgtgcgacccaagtcgagagctggtgcatcgagaggctccgtcagcgtgcttcgtggtgagtaacctcaagagcgtgcgcgtcggttgttcaccgaagacgacaacaatgatgaggacatcgcgaggggcgttctcatgtggtggatctgaaaccgcagatcgaagtggtcccagctagagcaacatggtggatctaaagccatagatctatgttctatgtttaatgtttgttacttcagcttgatagtagtgatgcatatatgtttttagtgaaattagtgtcgttacctctcatttcctttcctaatttactcatttccctcattgcctatcttgttcttactagtatacaaagtgatagctcacattatactactattttgactatgttatataagtaatatagcgatatataattattctaaaaccgaaataagctatcattaatgtttcatcacagttttatcccacatacactgaagccttccatgctggcatctttttgcatacacatcaaacaaatgttcaagaattcaagtacaagcagttcatcaactccttatatggcttttgtttttctatgtttggccctacatatgaaacttctgctacatttagatccttagttgctgcctgttttgtaaaactggtagctaatcatttatcatagtagctgcttcatgtttcccttatgccagtagcagtgcgtttacttaatcctgtttgttttgctagtattcatgatagagtccaaagtaatatcattgcagttagtggtttcgccctaatgaaaactatatagcttatatccccctgttagtttaccaaattatgacatctatgaatatattgattatctatgcttctcttgtagattaaaatagtaccgctacagattgtgcaagggcttgtgaggaacaaccgttattctagtattgttgtcatctgctactattgtaaattcgtaaccagatttttctccagcatataccttgtattaaatgttgcttattcgtgatagcattatttaactagatctggatgtctagctttctttgtttaattgcaattgaatggaccaagaagcactaggatatatacttttctttagtcttagtaacttttctctctgcttatattgatggttgaatgaatcataaagcactaggatttatactaagatcatgatggtgatgcaatgtaattgaatatttatttatctattcatgttttatgtcacaagcacaagtatattatgaatactatgccactttggccattcttgtttgcttgctttgttaatggcaggatttccttcaaagcagatagttctctatacgattttgccatgacatgtcgtatggtatatatggg

SEQ ID NO: 32124 - DNA, 4054 bp, Zea Mays
cagtcattgacttgtgggcctatacaatcttggcccaatctgtcatctagactcgtcgagcgtcgtagcctcgtcggggaggatgaagggagcggaccagaggtgggtgaagcccggaccgggagaataggagcgagagcgaagcaggcgcaacgcaactggcgaccagcgggcgaagcaattaacgggaatattttaatgcggcttcgggtacacgcgggcaggtcaatcctcgcactccacctcctgcctgcccccgcacccgtagccatgttggatccaccgccccaccacgggtagctgaaggggcggcggcggcggcgcggcagagggatgaagaacttcctcaggaagctgcacatcggtgactccgccgccggggatggcgcctcgtcgccttcggcacctaccccgccgccaacgaaaaagggcgggggcatcgagcataggcacgcctccgggttgtcgggctggctgagctccgtgaccagccggccgcacccacctacgccgctttctgcttctgctgcaccggcagcggcggcgccggaggtggaggagtcggcgttgacgactgcgttggcttcgtctgttgaggagaagagggtagccgaggaggacgaggagagggcgaggcgggagtcccggaaggaggcggagatggagaagaaagagaaacagcaggcggagctggagaactatcacatgcagctggccctcgagatgagcgtgagggaggacccggaggcgatgcagatcgaggtggccaaacagatcagcctcggctcctgccccatccagagctcgcccgcagaggtcatcgccttccgatactggagtttcaatgcccttagctatgacgacaaaatattggatggtttctatgacatttgtgccactggggatgagcttgcaatgtcaaccataccttctctgatggatctgcaagcactgccattttcacatggaggcaaaactgatgctgtattggtcgacagagcactggattctgagctcgtagctcttgagcagaaggctgttatcatggctgtagaatttcgctcgaaaaaatcagaatttgttgaccgctctttggttcagactctagctaatttagtttccaactacatgggtggaccagtcattgatccagaaagcatgctgttgaagtaccgaaatatgagcagtgcgttgaaagctgatataagaagtgcagttgtacctcttgggcagctaacagttggtttggctcgtcaccgtgcactgctttttaaggttttggcagatagccttgctgttccttgccgattagttaaaggaaggcagtacactggatcagatgatggagctttgaacattgtgaaatttaatgatggaagggagtgcattgttgatctcatgatagatcctggtactcttatttcatcagatggtgctgacctgggtagagaattggaagacagcttagtcgtagataatcaacatgttaacaaagatgacactagcactcagttactttcctctttcagtgaagcttcaagttccatgcacagttcatttgaaaatggatcgcttgaaaaaggatttatttgcaatgctgggcattttggtccatatgaagcaacaactgcccatagtgacaatgatgtgcttgggtctggggtatcaagttcatttgatgagctatcggtcagcacatatgcatgtgaaaacatacctattattcatgaatctaatacagatcataccatgactgaaaaaagcaaagataagtcgatcacatcaaataattcgtcatcatgttcgcctccatcttctgagataggcagtactcctgctgtacgaaggaaaaaggtcaaagacgtctcggagtatatgattagtgctgcaaaagagaaccctcagatagcagaaaggatccatgctgtgttacttgaaagtggtgttgtgccaccacctgacttgttttcagaagaatctaaggaacaaccaaaggacctgattgtttacgacacatctctgtttcaaacaacagatgaaatgataaggacaatgaatgagcttgaatccacagcacacgatggttgtgctggtcttggtccttcattgccacctgatcctggacatgagctccaaacaaagattgttccttatcggatgcctcctgacctcaagcctgtccagggattaggtgtttaccataagtttgatttccgggataacatcaatccctctatacctctctatgaaccaagtccagctcctcaggaaaatccattacaacttataaagcaaatgcctgttacagctgctgctgttgcaacagctgcagtggttgcatcttcaatggttgttgctgctgcgaaatctaacagcgatattaaactagatgtgccagttgcagcagctgccactgctgctgcagttgttgctactacagctgctgttaaccaacaatatgaatacttggatccgggttgtcaattgctttgcttgccaagttcatcaaataaattaatccaaaaaggtagacatgacttgttggatgatgatcagctggaaacaaatcatggacaggataatgcccttgagcgtgaaaaggatttggttcaagcaccccaggaagctgagcgaatctctgataggtcaactgggacagagagtgcaagatctgaaatttctcttgataaaatcgcagagtttgaaatccagtgggaagaacttacccttggagaacgagttgggctgggatctttcggagaagtgtatagaggtgaatggcatgaaacagaagtcgcagtcaagaaattcttgcaacaagatatttcaagtgatgctctggaagaatttagaactgaggtgggaataatgagaagactgcgtcatcctaatgttgttctttttatgggtgctgtcactcgtgttcctcatctttctatcgtgactgaatttctgccaaggggtagtttatttcggttaatccataggcccaataaccagttggatcaaaaaaggcgtttaaggatggcacttgatgtggcacgtggtatgaattatttacacaattgcaccccagtcatagttcaccgagacttgaaatctccaaatctacttgttgacaaaaattgggttgtgaaggtctgtgattttggtttatcacgtctgaaacatagtaccttcctttcgtcaagatccgcagctggaacagcggagtggatggcaccagaaatacttcgaaatgaaccatcagatgagaaatgtgacgtcttcagctatggggtcatattatgggagctctgtacattgctgcagccatgggaaggtatgaatcccatgcaggttgttggagctgttggttttcagcaacgacggcttgatattcctggtggtgtggatcctgctgtagcagagataataaggagatgctggcagactgatccaaggatgcggccatcattttcagagatcatggctactttgagaccattgttaaaaaacatgcctgccaaccaacctaccaggaagcgggcacaacaaacagatgattaagaatatattgtacgccaaatgcgtatttgatgaagaacaggtgaattttggtccttttgccttcagcgtttggttctccattggagccagcggaatgctgtctatatctatctgatgaaagccgacccaaataacacagatccatgaagccaaagaaaagaaagggaaaagaaaatttgtgaaagttcgtgcatactatttttgcagacacaatggttactggagtcagaagttgacatgtcatgttgtaacaggatcatcgtcttctgttcagttaggccttatttttgctagtcctcgaactaatggaaaactattccatctttaaggccccatcaaattgtaatgttttactatgaaaaggttggctcacccttgtgtatatcacgtctcaacaaatctgcttttaattgacaggtagattacaaaagaaaattatgccctttgtactaagaatgatcattctttgcggtaggaaaaatgttaaacctacttttgcaaacat

SEQ ID NO: 32125 - DNA, 1969 bp, Zea Mays
ggacactactgctggagagtctcagtcctcacagatcgcgcgcgcaccagcaccaccactgccgtctccggcgacgaccacgccgccggccatgccgtcctcctacgctgccgctgcagccggatcctcttcccgcaagccgaatcgcacctccagcgctgccgcacccactcttcgcccaccagcaccctcaccgtcgccggcacccgctcccctggcggtgccctgctaccaagaattgacgtgtgaaagaaaatgtcaacgtttgcgaaactgtggtcgccatgcttgtaaacgacgttgctgtgctggagattgcccaccctgctctgagacttgtgataagaagctcagatgtggcaaccataaatgtctctcaccatgccacagaggcgcttgttcaccttgtcctctgatgaagaccatttcttgcgcctgtggaaaaacatgttttgaggttccttgtgggactgagaagaatcagaaaccacccaaatgctcaaagaaatgcaatatacctcgcctttgccgacacaagcttgaatgccggccccacaaatgccactatggagcctgcccaccttgcaagctgatctgcggggaagaatttccatgtgggcacacgtgtaaagaaaggtgtcatggccctatttctcctccaaactccgagttcacactgaaaccgacaaaaaagaaaatgggaaagcacatagaatgtacacctgggacaccgtgcccaccatgcaaagaggtggttttggtgtcatgctttgggcagcatcttggccaagaacgcactatgccatgttgcaaatggaggccttttccctgtgaaaatttatgtgggaatcctctcctttgtggcaaccattattgtacaaaatcttgccatgtgttagaagtcccattgaatcatcctgaaggagatcgtacaacatctatcagtaaagtgaacgcacttgctatgccttgtgaacaatgcaatcttccttgtcaaagggttagggagcctccttgttcacatccttgccctttgccatgtcatctgaacgattgtccttcttgtaaagtccttgttaaaagaccatgccattgtggtgctatggtgcatgcttttgaatgtgtgttttataacaacttaaatgcaaaggatcagattaaaataagatcttgtggtggcccatgtcatagaaagctaccaaattgcccccatctgtgttcagaagtatgtcaccctggtgtatgcccatcggttgatcagtgcatgaaaaaggtcaacacccgttgtgcatgcagcactctgaaacaagagtggcgatgtcaagatgtcctcaaggaataccgtaagtctggccgggatccaaaagaagtacctaaaagtcagtttggagttggcttacttgcctgcggtgaagattgcaagaagaagctgaaggctccagattcagagttgcatctccggaaaagtcaggagaacaagatccctgctgtggaagtcgtaaatgcacccaaacgcaggaagcggcgtgaccgtggacaagaagttaaaatttcgaaattccaggaagtgaagacttttgtgctgagagcgctactgattattttgctgtcaataatcgttgctgctggtctgtacctgttgtggaaaggtattttctggctttctgactggatgaacgaaatggaagagcagagggcgagtcaaaggtatccgaggggtgcaatgttgtaaaataaaacaattactttgagcctaataatcggtattgacatgtggattaattaatggttgttagggattcagttttgcaggatcataaacatgtcaccgttttctcactttttgtcactataaactagaaattgtatgcgtgatgtattgttgtatttttattttgctactctgcattgttaagtgaacaaacgatacaattactacatgattcatcgcttatatctgttaaaatgt

SEQ ID NO: 32126 - DNA, 1492 bp, Zea Mays
cgcgccgtcactcccctccccttactcgcaaccgcgtcgtaaggcactccggcggcggcgatgattacgtcccccctcctcccgccgggtaagcagccatgtgatcccaccccgccgccgttttgtttctggcgcatgacgtgcgtgcggggcacgatcattggctacaagcgaccccagcagtgtccgactctagaccgaggtagaatgccttgctcacctcagccgttcgactgtgtggtgtgctggttgttggatatcataccagtttacatgtcagcttgaatgcttctctatcagtgacgcaaatactggcttgaatatctaacagtgttacatgatgcgagtgtttagatgtcaggttggacacacctctgtcagttttaatgcaagctagtggttgtgtcttgtatgttggtgatgcaaaccttcaagggctatctaatcaggatttgaagctgcggtattatgttgttctgtatttgatttgatgcttctgttgtttatgtctaagggttccatgccatttgggggaagctctccttttagcttcgaaatgcccgcaggttctctgcggggtgctcggatgttggggccctagagtaaatgcagtggtctcatagtacgaggctgtactttggctgatgggtctctcatcaatcgcttcctcacagccttgcctccaatgaccacaacattcattatttgtgtcttttaaatttgcgttctctcgcgtggcaaatgtttggagtttgagatagttctgtttgattattgtgtaattgtattgggccctgcattatatgcctttctatttaggtgattctgtatctatctttcgctaggttggtgaacagtgttagactatgttacagatttgaaaaaattattgacacgttgatttgggcaagcaaactgtattatatacctgtttgtcttgtttaaattctgctttactaggtagtcaatacactcatgctattatgttacagcggctaaggttgcctcggcacgtcaccatgtctgtctggtggagccggccaagtcgtcatttcttctgcatgtgtttttattgtttgatttggatctgttttctcttttgtgtcctatattttgattgccatcgtgtgttactgcttgattttttatctgttatctcttctgttgttcccctttctttctgtgatgcagaggaaagctaggttataagggcaatgatgatgcaaagtcatgcaccactctgaatgagggatttttctctctttgggctgacaagcaaactttctacccattgtttatctgagcctttacttacctgtgtgctttcttctgtctcctttttgtgtgctgcttaatgtgatacttagttcgttgagttttgtggagttagtgattcttgagaattggatgatgtgggtcgacagatccaactatgatgtgaactgaattttatttgaggtcaaatctaattgctgcttgtggttatcggggt

SEQ ID NO: 32127 - DNA, 1889 bp, Zea Mays
gcgcagtacgccgcgacagcgtcgactttctgaacgatctggcggcggccgcggctcccaagttcacgaagcgggaggcgcaagcgaagcggctacctctcgccggagatgccgctggggacctctccagtagtggcggaggccgaggcatggacgtgggagaacgcagcggctggagctgccgccgggttcgccacggtcgcggccctccacccgctcgacgtcgtccgcacccgcttccaagtgagcggcggaagggggtggtctgaagtgcctccgtacaggaacaccgcgcatgctgtgtacactatcacacgatctgagggcctgagaggactttatgcaggattttatcccgcagttcttggatcaactgtttcctggggcctatatttctttttctataacagagctaaacaaaggtacttacagaggaagaatgaccagcttcatccagtccatcatctcatctcagctgcagaagcaggtgctttggtttccttgtttacaaatcccatatggctggtgaaaacaagactgcaactacaaacagctaaacaccatacttctcagtattctggtttttctgatgctttgaaaactattctaagagaggagggatttcttgcactttataggggaattggacctggtcttttgctggtcacccatggcgcaatacagttcacggcctatgaggaacttcgcaaagctatgatattctttaaaagtgcacaatcaagggcagacgacgcaggaggcggggagtcattggtagtaactgaccaaatgtgtgtttgggtgttgaatatcgactttagcatggttcaataaagacatttcagttcccctgaattcttaattatgttgtttttatattctttccttaaactgttattgccggtatttatatctagcattttcatgatatttcacacatttagacactgtttctctgtattatgcaatttttgaaattatcaaacctaagcaaattgaacatatagttatatgacttatgaaaatagttcatgcaatatcatattgttttttgaaattgtaaaacctaagcgaattgaacatatagttatgtgacttatgaaaatagttcatgcaatatcatattgtttggctccactcataacgtatgtacagttgtagatatacatctatggtatcatattgtttgactccactcataacatatgcagaattgtagatatacatctatccttgggcctttactactttgcctgatattccattctcttcactcttaatgcttagctgaattccatcgattttgcggcacttggggctggttcaaaagtagctgctattctacttacttatccttaccaggtcatcagagcccgcttgcagcaacggcctggcactgatggtactccaaagtactcaaatagctggcatgtagtgaaggaaactgcaaagtatgaaggcgtccgtggattttacaggggcatcacgtccaatctactgaaaaaccttccagctgcgtccctcacgttcgtggtgtatgaaaatgttatcaaactattcaaagcaaccaaggagaagacgtagctactcattaaatccaggagtactatgcatggtctgacatttctgagttcaaacgatgcctataatttccattccacgtcaagcccatattttatccatttaacatcgtatatgacaaatatgtaacagtacaggttgtgaccaacctgggtcgtggaaattttttgtacttgcattttgtagagagaaaatacacattttgtttcttcccaaagaaatatgtctttgttatataatccagccgggacgctggcgttgtagatctccgtcctgctgttcggtttaggctgtgtggccgagctatg

SEQ ID NO: 32128 - DNA, 872 bp, Zea Mays
taatgtgtccttcgctgctgttgcagtctcatttgctcacactatcaaagctctggagcccttcttcagcgcagctgctactcagtttatccttggacagcaagttcccttctctctgtggctttctcttgcccctgtggtccttggtgtttcaatggcatcccttactgagctttcattcaactggactggcttcatcaatgccatgatatcaaacatctcattcacttacatgagcatttattccaagaaagctatgtttgaagggccccagctaatgcagcatggatttagtgatgccattgcaaaagtaggtttgacaaagtttgtcagtgacctattcttggttggactgttctaccatctgtataatcagattgctacaaacaccttggagcgagtggctcctctgacacatgctgtcgggaatgtgttgaaacgtgtttttgccatcggtttctcaatcattgtttttggcaacaaaattagcacacaaactggaattggcacgtccattgccatagctggtgttgctatgtactcttacattaaggctaagattgaagaggagaaaaggagcgcatgactgctgtgaataatattatcgggaccttcctcggacacaacatcgtcgacaatcacgacctacttctataccttgttttgttttcatcttgagtcagtcggtccattgtttgttcccagtctggtgattaaaagtctgcaaattctgtttgtggaattggcagcgatacaaatttggcttctttaagtaaatccggttgccggtacacagcggtattaattcacctgtaactgaatgtaataccgtaatgcaaagggcacaacactctgcctgactaaaataaaat

SEQ ID NO: 32129 - DNA, 3129 bp, Zea Mays
cgcgcgcttgctctctctctccgcattcccattcactacccgcgtgctcgcgcgctcgcgctctctccgcgacgactgggtgtgggctaccgccgccctacgccaggtgccgaggcttcgtcgatctcttcgccggcgacgagcacccaccaggatgcaaaagcactcggggcttcggagcctcgaggggttccgatccctcgttggatccacctcgacagccatgaaggtcgcgaaccccaggccctccccggatactgggggtatttcgtatgggagcttcgccaaccttaagatcacagcagagaaattagtcaaggagcaggcttcagtgaagactgatctagaaatggcgcatgtcaaattgagaagagcaacagaacagataaacattatagagggaaaacttcaacaagctttgaatgaaaatgcaaagcttaaggtgaagcagactgaagattcgaagctctggcagggattagattcgaaactctcctcaacaaagaccttgtgtgatcaactgactgaaactcttcagcagctagctagtcagacagaacaagggagacaggagatgttgcagatcaaacaagagaaagaagagatggatcgaagttacaagggacaactgtattcaaatgatactacgataaaggaaaaagattcgctcatcaagcagttggagggttcacttgatgataataaatcccgcttgatatatcttgactcccgcttgcaatgcatggagcaagaactgaagctaaaagatgatgtttgtatcagcctgaaaggaaacctagctagcagtgaaagtgaaaagaacagtttggagcttatgaataagggacacattctggaaattaaaaaactatgccaggacaacaaggatcttaatgaattgtttagcagcttcatggttaaagtaactgagctagataaagaacatgcctctatgtcaagtcatgtgtctaggctgatttcttcatttgaaagattctatgaaatggcccaagaggagaaaatgctaatggcaagatcttctaaggataaatttgaacatcttcaaagccagtatgtagatttgacatcagaaaacaatgctctcaaaactgaaattgaagaactgaagtccagactcatagagttgcagagaactcaagaaattgttatggttcaacatgttgaagaatgccaagtggctgaagataagatcagaagattagagtctgaagctgaagtttctgcctccaacataaatcagttagaaaaattagcttcagaactacaagggagaattcagaagttactagaagattctacctttgctgaaaatcacaagcaagagttgcttcaaaagattttgaagctagaatcagataatcaggaactcctaggacaaatgcagtccattatggaagagaaatcaaataatgctgaatctctgcatggagagataactaagcgtgaccagcaggttgatacacttgagaatcagatcaaccagcttcgtagtgttctggatgagaaggagcaactctatctttgttctgtacaaaaagagaagactttggaggaacagaaattacaggtcgaagcattgctttctgcaacagagtgcaaacttagtgatgcaaaaaaacagtatgatttgatgcttgaaggcgaaaagatagagctatccaagcatttgaaagagctatctctcaaaaatgaccaggcgatcaatgaaatccgtaagaaatatgaacttgaaaagattgaaattactaatgctgaaaaagaaaaggcagaaaagctcataagggaaattgaaaacaaatgcaacgaaaagatatcacagaacaagcatgattctcagaggtatttgatttgccttaaggaggaacatggcacaacggtggcgagaattcagcaggataatgagcataaagagtcaactctccgggcttatcacaaagaagaactgcagcgcattcaatctcaggctgagaatgaaatgagggagaggttgtcattgctcagaaaagagcatgaagttcaaataaaatcactaaggatgcatcatgaggaagaatgccagaggatgcaggaggaactggagcttcagaagtccaaggaggagaagcaaagagcattgttacaattacagtggaaagtaatgggagaaagtcaacgagttgatcaagaagtgaactctaagaaggaatactctgtttcgtcgattaggaggagcgacccatatggaagaaaagaacaagaggtccagttggtaagtccggagaccaatcggaaggacgtaaacttacctgggattttacaatcaccaatttcgaacatgttgagaaaggtagagaaagtgtctcaggatattcctaaacatagaaaggtaacccaccatgaatacgaagttgagacagcaaatggaagaatcacaaagcgcaggaaaactaggagcactgtcatgtttggtgaaccgaactctcagaaaccattgcataatactactgacaaagatgttaaaaaactaaaaaaggttcctacaagatcccgtgcacatcctgcaaacattggtgaattattctctgagggttccttgaatccgtatgctgacgacccttatgcttttgactagaagctcacgcctggaagtatcatttttgcaagcacgatgacgaattctggaacacacaattaccaccaccgtgttgggtcaatcctacggcttttccctggtcatccgtccatcataatgtacatgactgccgttgactcatgtatctctgaagtattgctactgcaacaaccatcacgattgtcggatatgtaggtgtagatttgtgaatgaactgtacatgccataactacggagtaactgaatatcctcagataaaacgctttgtacgcgtcgtgcgatgctgttggattggaatcgtgtttgccctttcctccagatgccaaggcccggtggagtagatgggctccggtctggaagtggggcacagcatgtggatacaggattaatgccactgggtgtttgcatctatggaacgacggaaacaattcggatcgatatttgcttaacaaccatcaggcactgattggttggccagacgacgaattggagagggt

SEQ ID NO: 32130 - DNA, 1566 bp, Zea Mays
tacttcctcattatcacttgatgtcaatgaagatgattgatgaagctcatgcacgaaagggaaaaataaaggcatttacatcttactgtggtggattgccatctccagctgcagcaaacaatccgcttgcctataaattcagttggaacccagctggtgcactccggtcagggaaaaatcctgcagtctacaaatttcttggtgagacgatccatgtagatggtcataacttgtatgaatcagcaaagaggctcagactacgagagcttccagcttttgctctggaacacttgccaaatcggaattccttgatatatggtgacctttatggtatctccaaagaagcatccaccatatatagggctactcttcgttacgaaggttttagtgagattatggtaaccctttccaaaactgggttctttgatgctgcaaatcatccactgctgcaagatactagtcgtccaacatataagggtttccttgatgaactactgaataatatctccacaattaacacggacttagatattgaagcctctggtggatacgatgatgacctgattgccagactgttgaagctcgggtgttgcaaaaataaggaaatagctgttaagacagtcaaaaccatcaagttcttgggactacatgaagagactcaaatacctaagggttgttcgagcccatttgatgtgatttgccagcgaatggaacagaggatggcctatggccacaatgagcaagacatggtactgctccaccacgaagtcgaggtggaatacccggacgggcaacccgccgaaaagcaccaagcgacgctactggagttcgggaaggttgaaaatggcaggtccaccactgccatggcgctgaccgtcggcattccagcagcaataggggccctgctattgctaaagaataaggtccagacgaaaggagtgatcaggcctctgcaaccggaaatctacgttccagcattggagatcttggagtcgtcgggcatcaagctggttgagaaagtggagacttgaaagttccctgatacacagataaagatagtatgatatagcagggcacatgtatcttttgtattaactccgttctggaatatatatttgtgaactaaaatgtgacaaataaaaagaacgggtggagtatattgtaagagacggcaaagaaacctctgtatatatgacctgtcgatatcaaataatgccgatcagttagttggcttggctcttttgagggtttagtttatactagtaaatgagagcaaccagcgaagcataaacaagatgagacgtcagagcagcaacaacaacctgcgttgcctttggtttatattgcatcggttctccgaatgaactttgcatcctgtgcacatcagacatgtcccagagggatttcattttcattaaattgacatatcagcaaatctgcttatgcgtcgagatatttatgagaggggaagagagcttcatgaaaccaaaccggtcctcacgactacccaggcgatgaaatccccgctaggctgattgcttgatctatctactgcggctgctccag

SEQ ID NO: 32131 - DNA, 1786 bp, Zea Mays
atgacagctagctcatcaccagactatccaataggagttatcaacttttttgcatattagtattcaacccggaagcatgaccaaagaccttaagctccttgatgagacaaaggtcggttcttgttggatggatgaacagcgctacatcatcccaacgctaaaatattattgaaatccattgcaagtagatgcatttagggatgattcagaattaaaattaattacaaagtacactttggactagaattgatagaagaaatgccattgctaaatgataaaacattattgttaatctcttctgatgcacatcgcatacaaatcacaatcagaaccttcactgcacgtctctgtatttatgagggtggcacatgatttttatcgtgggtactaaatactaatggtgcttagaggacctcaataaggaactggcagaaattgaatgggggcctaggcccctgatcagcttagcataggtccacggtccacccctgacatgcgggtgtgatggcaggagttggtagtatttcagtgggagttggaatgatgctaagtaaaaatctggatcagttgacttgtggttatctgttctggaagatcttttcttgatttcaggtaattttgatgtctaagggactaagctcctatgatagtgctgttcccttgaagaaaataggatgatatgtggcaaatattgttgtatgttgcatggttaagttgtgtgtattgttatcaaacgtggcttcctgtggagaattcagaagttaggaaggatggaataaaaggaacatacagagtggatgttgacattcctgctaatgattggataaacgtcaccaagttctatgatgttctaattttcaacactggacactggtgggatagatataaattcccaaaagacactccccttgttttctacaaagggggaaagccgattgaacctccacttgacatgcacaacggactgaaagtagtcctgaaaagtattgcttcttacatcgaaagggaggttcctaggaaaacactgaagctgtggcgcacgcagtcacctaggcacttctatggaggttatgcatttcaaagctgtgaattgtttattcctcttcacaaatcttgtgcagctcaattcttggtttgatccccagtttgggggagtgaacaaagaagcgagaaccgtgaatttagcaattcaggaagccctggctggcacggaaatccagttgctcaacctcacttacatgagcgagttccgtgctgacgcccatccagctatctggctcggcaagaaggacgcggtggctgtctatggacaggactgcatgcattggtgcctgcctggcgtgccggacacttgggtcgacatcttggctgcacagatcatgcatcacttcaagcaggagaaaggctgatcacaatttctttaaatctgtagttttgcgataactacagcaactgtgctagaactttttagatttgtattttagggataacataacaaacattaaatagttttgcaaatattcattaggttaggtctcccataatgctatagtgatgcacaaaactaatgggcaccacaccgaacatcggaacatcccagtgctggagttttcaaataaggtcctctttaaatctgtagtgtttaaataagggtttggtagagtttctcttaattctgattcaccaaactaccaaagcatgttcttgccctgctataagttttacaggcatgaattagtgtcacataaaagcatgttcttgccctgctataagttttgcaggcatg

SEQ ID NO: 32132 - DNA, 2614 bp, Zea Mays
ctgtttctgtttctattctcacgtcacgcgcaggctgcgggcaagcaatggcaggtgggccctgtcgcgctggccgatccagcgctgactcagcccccgcaccgcatacatgagagatgagaagccgccacccgccgctgcggctgcggcgcccgcgccaccacgagtgacccatcgtgctcggatcgtacggcctcaaccgcaaaatccagtatttaagcgctgcggaacactcgtcgagaggagaggacagagcagaggaccaccaccggaccgggctggagctggaggcgtggcggcgccggcgcgtccatcaggaggagaaggggcagggatggtgctgggcggcggcatggcggcagcggccgtaggcggggacgacgccgtcgtcatgcagctgggcggcgccgagggcgaggagaccgtcgtcaccgtcaactgccccgaccagacaggcctgggctgcgacctctgccgcaccatcctcgagttcggcctccgcatcacccgcgccgcagacgtgtccacggacggccactggtgcttcgtggtgttctgggtcgtgccccgctcctcgtccatcaaggtccggtgggcgagcctcaagaaccggctcatgtccatgtgcccttcctcctactccatccccttcttctaccgggacgtgagccagccagagccaggccccttgcagttctacctcctcaagctcatgtcgccggaccgcaaaggattgctgcatgatgtgacgcacatactatcggatctggagctcataatccacagggtgaaggtgtcgaccacaccggacggaagagttgtggacctcttctttatcactgatggcatggaactgctgcacagaaaggagaggcaagaggagacctgctcggcgctaactgcaaccctgggcccttccatcagctgcgaggtcgtaccagcagaagggttccagcaggggttctcttccctcccgccggagatcgccgaggaactgttcagggcggagctagctgacactgacagcgaggtgtgctcgagcccgctcagcgcggagctgaggaaggtccggacgacggccactgtcaacttcgacaactccctgagccccgcgcacacgctggttcagatcgtctgcgctgaccagaaggggctcatttacgatatcttgaggacgatgaaggactgcaacatccagatattttatggccggttcagatcagacaagaaagggtcagccagcaaaggttcatcaggttgccgtgaggtggatcttttcgtgaagcaagtagacgggaagaaggtgactgatcctgcgaaacaggacgcgctgcggtcacgcctgaggtccgagacgctccatccgctcagggtcatggtcgtcggccgtggacccgacacggagctcctcgtcgccaacccggtcgaggcctccgggaagggacggccgcgcgtgttctacgacgccactcttgctctgaaggcgcttgggatctgcatcttctctgctgagatcgggaggcaagcggcgtccgagcgccactgggaggtgtacaggttcctcctggatgacagcaaggagttccccttggcaagcagcctcgctaacaggaactgtgtcgtcgatagggcgaggaagacgctgatgggatgctacaactgagacttgggtgggtgtcgatctgtatctgtctgcaagaatccaacgaagcagtgcaagtgcaatgcaaggcttcccccatccacagatgcatttgcatgctatgctgcttcctggagttgtgcacggggatggtttgaaaccagagttgtggacagcacagactggaatgaatgaacatcttgctgccatggatccattgtctacggaaaaaggagcatgcttggtgtggaggtgcgatgcaatggcgggagctttttttttttgataatggaagaaacatgttccagccttttgcatcatatcaaggatgcatatggcttcatagcatattcaacctgacaaaagcagcaacaagtagcaatgaagcacatggttctcatgaacaataataagaaactaagaggcctcaatcctagcattgcatcgccatccatgtattgtaaaaatgttcattgccaccacttccaatgcgtgacaaatatctttgatatcttggtgtatctcctctctcctttcctttcttttgcagcagtctccagaatctaagccactaagaccccttgaaaataacatgcatataattgaaggtgccattaaatacaatatcattgtggcttagccagattaaccaaaacatggcagctacccctattacaatgattgagcttttgtttgttcagggatgctgacacagatacatggaggagccggcctgttgtatagcttattttagtggaacaactgctgcctcaccatcttgccttccccttgtcgttgttctcctcatgtaagcgcagtttgtaaggatgcatgtgttggagttggaaagtgatccgatggcggatgctactactgctccctatacagtgagtacagcttggttgttcaaagaagatactgatgcccggacaagcaccacccgctgcattattggtgagcgcgcacaggcac

SEQ ID NO: 32133 - DNA, 636 bp, Zea Mays
tgagcggttctaattgatggctacgaagttcactttggcttcagttcaagccccatcatattgctgctggagctgcattccttgctgcaaagttcctccactatgacatcacattccatccaaatttctggcatgaattcaagacaagtccatatattgttcaagatgttgtccagcagttgaaggagctactttaggatacaacattcaatgtatttacataatactcagagatcctcttggtttatacgctgtagtgagtagtgatcactgccaaaagtacgtacacattagcatgtggtcactttcatcaattactgaacatctttcatgtaggtttttacaaccacagtgctatgtacaaaaggggaagatgttattcaaaagttgcccttttagttttggggaggtaaaagcaaacaatctttagaagagatgtgacgaacaacaagagataaaaaaggcaaaaaggtgtaagagatgtaaaaagttgatgaaatgttggatcccttaattggttgtccggttgtgattatctgatatatatagaggatggtttatcccaacaataaacgagtcgaaatcgtaaccttcacattatctttagtccaaaattgatttaaaaaccgatctaga

SEQ ID NO: 32134 - DNA, 1808 bp, Zea Mays
caaaatacacacccgacccaacccagcccacatccgaggagccaccgcaaccgcatgcaactgcgccgcctctcgcctctcctagcgagcccgcgccgccgcctgcgattgcgctcccccacaaaccctagctctgccaccatgtccccgggcgccgctcacctggccactgccgccgacccggacgaggacctctgcgcgagcgccggggcgtcagaagcggaggtccccgcgcctgccccgcatcttccaccgctgccggtgtccgcggaggagcggttggaacgcgcttgggcgcactggaggcggctggggtccccacggctgctggtggcgccgatggtggacaactcggagctccccttccgcatgctgtgccgccgctacggcgccgacgcggcgtacacgcccatgctccactctcgcatcttctccgagaatgagaagtacaggtccatggagttcaccacgtgcaaggaggaccgaccactttttgttcagttttgtgccaatgatcctgacattttgttgcaagctgcgaagaaggtggaaccatattgcgactacgttgatatcaattttggttgcccgcagcgtattgcaagacggggtaactatggagcatttctcatggacaaccttcccctcgtaaaatccctcgtgcagaatctagcagctaatcttcatgttccagtctcagttaagatccgtgtatttccacgactggaagacacattagcatatgcgaagatgcttgaggaagctggtgcttctcttgtggctgtccacggccggacaagagacgaaaaggatgggaagaaatttcgagctgactgggatgccatcaaggccgtgaaggatgcacttagagtacccgttcttgcaaatggaaacattcgccatatggaggatgtgaagaactgccttgaacatactggtgctgatggtgtgctttcagctgaaactcttctagaaaacccagcagtttttgctggtttcaggacaaaggaatggaaagaagatggtgacgagaatggagacggtggcttggaccaggctgatcttgtgattgaatatctgaagctgtgtgagcagtaccctgtgccgtggagaatggttagatcccatgtccacaagatgttgggcgactggtttagggtgcatccagaggtgagggaggaacttaataagcagaacaagctcaccttcgaatggttgcatgacatggtaatgaggctgaaggacctcggtggaagagtgccactttacagaaaggagactgcactaggacaaacattagcctctagcaatgcctgacaggttcttatatctgcagcctatcattattggagaggagcaattgatgaaaactgaagcattttgtaccaattttgacctgctatagtacagactggaagagattgttggactacaattaaacctcgattagtaaagcatattttgagttgagcagctacagtgcaacggctcacctcattgttgtaacagctgatatgtaaaatcatttttacatcattacatggtctcagataatttggatttgctattgaacttatctttggacgcttcacaaagctatattaccaacatgttcgcgcgcatgttcagctgcgcatatatttcacagaacctctggccgtctggcgtgcaagcaatgacaaaatcatgtacagtactatcaatgctggtggacgcaagaaaagaaaagaaccctactgctcgccactctgaaatggtggccattacaacggctcttcttcgagctccggccgccaatcgggcttctc

SEQ ID NO: 32135 - DNA, 1591 bp, Zea Mays
caacaggcatcctcccccgacttccatttcgccaccccctacccgactccactgggcgctcgcgctcgcgcacgcgcacgcgcacgccgcagcccccctccgcagccgacgacgacgagcggaagggaagagggtcaactctcgatctccgcacggtccgtggggacgcacgcacggcgcgcgtggcggtctacccggtcgggggtcggatcctagctgaatcggggagatttgccggccaggaaggaaaacgacaagtgaaacgaagctgtacgtgttcaggtgatcggataatggctagtgatcggataatggttgacactttgaccgaggacaatggtggtgatgctagatcctcatcatctgaagagatgccaagtgaccaacagagtcatcctggggattctttagctgagtggaggtcaagtgagcaagttgagaatggaacaccatccacttcaccagcatactcagacaatgatgatgatgactgtggacctaggccttctgatctttatgggaagtttacatggagaattgataatttctcccaaatcaacaagagagagctaagaagtaattcctttgatgttggtggatttaagtggtatatcttaatttacccacaaggatgtgatgtatgcaatcacctctcactctttctttgtgttgccaaccatgataagctactcccaggatggagtcactttgcgcaatttacaatagctgtaattaatagagaccctaagaaatctaagtattctgatacactgcatcggttttggaagaaagagcatgattgggggtggaaaaagtttatggaactgtcaaaattacatgatggctttattgttgaggatgttcttaccatcaaagcccaagttcaagttatcagggagaagacagaccgtccatttcgttgccttgatggccattaccgaagggaactaattagggtgtatctatcaaatgttgaacaagtttgccggcgctttattgatgaaagaagaagcaagcttagcaggttgattgaggataaactggggtggtccagtttcagtggattctggctagcaatggatccaagtgtgcgtcgacacatgacaagggaaaagactgaaactatattgaaagttatagtgaaacaattctttatagagaaagaagttacatcaaccttggtaattgactctctatatagtggacttaaggcacttgaataccagagcaagaacaaaaaggcgatacctaaactaacagagacagatgctcggagcactccaatggtacttattgatcaggacatgtttgttttggctgatgatgtaatatttctgcttgaaagagctgcattggacacactgccacaccaacatttgcccacaaaagatgataaaagttcgcaaaaccgcacaaaggatggcaactcaggtcaggagttcagcaaagattctattgagcgtgatgatagacgacttatagagctaggctggaagacattggagcttttttccttagctcatatattcaggcgaacacggcacccatcgctcgtcgacttcgtcctcgccatgcgcaggcgaaggctgaa

SEQ ID NO: 32136 - DNA, 247 bp, Zea Mays
gcggtgtgaaccatcgagagaacttggtgagcgatcgtgggcgagcacaccatctccattctggtgtagttctcgaccgggtggcgtgggtgacctacgtggcgacgaagccgttcttcgttcgtgtgcagctggggagcctctgtcgtgactcgtgaccatccgttaccgggggaagggtgctctcactgcgctgtgattggtgcaccgccgccaccaaatccctcctcatcgtgttcctggtgag

SEQ ID NO: 32137 - DNA, 4263 bp, Zea Mays
gaatattagctataacctatgtttgattgtgtatatttgtatacttttattgtgtttcaggaaggacaaaatcatgttgtacaggatcctcccacatatggtgcaccaaagtttgatagaacccccagttagtcatgtcgtgacatgttcttatctctactactaattatgtgcctatcgtaggcgttcacaattccttggttctgtcgtcgcgctcgcctgccatctccctccgcgctccatccgccaccatccgcgctcgcctcccttcgcgcatcctacaaccgcgtgctccttccttcgatggtgcggatcccccgtgactaccatctccctccgccctcccgcgctccatccgccaccatccgcgcttcctacagccgcgcgctccttcgacggcgcggatcccgcaccctcgaatcacgccagcagatcccacaatcaagcagcggcgacaggaataggggcgggctacgcgggcgctactacgacgagggtgagggcgagcgctccggcgccgcggcgccattcatcataatcggtcgagctcctggagggaacggctgcagagcggacgagatcgaggagcgggcgggcgggtgccgcccgtgacggcgcctaggctcaggctccgcgacggccgccacctcgccgcgcaaaggtctcaccggctcccgagaggacagcgcccgcgcctcccaggtttcaaaaaaccttctgagaaggcatgtataaaactttgggcaaaaggagatcttcctacctagcatatcttgcctcggaggagggttgttatattcaatactatgggtttgatggagtcgatggatggagaatggtggatcgaggagaccgatgacatactgctgcatcccgtgctgctcaatgggaagcagtaccggccagtctggtcaaacgacggcaccgtgatccacgcagatttctagttaagtttcttctgatggtgatggtactaaagaggactatgttcatatccgggcaaagcgaggccaagccactaacagccaaagccttgcagaaagactagggagaaagaagataagtgagaggatgaagcttcttcaagatcttgttcctgaatgcagtaagatcattggcaaggcaatcatgctcgatgagattatcaactatgtgcagtcattgcaacgacaagtcgagatcatatccaaacaagatcaagcggccttactggcccatttaaccaaggaatcatgcagccataattgatgtgcaccattgccaatcccgttgatgttttgcatggagctattcacgaggcgtcaacaatgaaccattattgatttgtccactgttatgttcgttgctggtgcaatcatgggatacattatgttcactgaatctacactcccagttcacactgaacttacccctaaatcttgtggcttccaagattgcagtctagactacggtgatgaatccaataaccaaatatccttggacttttattgtagctttttgtgtgcatttgttccgatacttaacaattaacattatatgacaccatagtttctctaatcacatgtaactccatctagccatctaggtttgtcctaagtcaaacatatcttttaattttgattagaaatatctataaaaaataattgtcttaaataagcagagttatttggttttagtaatgaatttagcaatgccaatgctatttttatcgttctatataaattttagatattcatggtcaaacttaaaaatgtttgacttggacaaatatagatagacctacacatgcattgtgattttaggaagtcctacaattctcctccccaaagtctgctatcaacttctaacagttagtccagttttcatgaacaaatttagttttaatcattctatgttgtgccaaccgccagcaactaataatcagagctgggtcatatcatcatatcatagtagattgtatagctttcttccctgtgcatgcttactggttactagatgaaaaaggtcgtgttacgttatggcgcactcctctcctttgaataggacatgctttcacactctcaattcggcatatccttctagagactagctgtgagttgggtcctaaatgtttcttccatgttcaattcgaatggcattgttgtgttaattagccgtcctgttttgtatttttttcctacaagttatagtggttacattaatgactaaatcaagatcttgacccactttattgatgacacccttttttcttcttattgcttctcctatcgtctctgagtttgtcattccattcaaacacgaaatttgtgtcagtatagatgccatggaaattttggtttagcttgagtattttgtagatacttcattcttgagtattcttgagtttgccttgttataaattgcagcacactccaatggtcttctaaatgaatagcacactatagtcaagagtatgacttaccaaattcattattggttccaagcatcttgaaagagaagtccatcgtctctcttactgtcatctcagcatggctaacagaagcacgcagtaggagtttctccaccttcctttcatcatgctacttcttgctgagggtggcgtgaaaaagtcagcaacaagttcctctatggtggcgacagagaagacaagggaggctctggcgacattgtggcgacgacgagaagcgagcaaggatataaatcgatctgtttctttggaaattagctgtagtagaatatttacgtgatacaaatctctattctctatatctctatatctattacgtttctcatgtctctatttttattataatggtttggaaaaatgtcgctcatcttctgctctaatctttcgaaattaggtgtagtggaatattattgccagatattgctacactacaatagtgaaattattgtccaaaattgaagattgccgtatgccttaggtcactataaaatcgagttattttataataatagttttttgttttacataagccccactcttttatctaaaagcccataaattattgtccaaaatggaagattaagagtttgtttattacttctaaattatcctttctatatctaccatatgtaccatcagcgacaagattaccccacatgttgtatcatggtttactagctagagaggctactcaagatgaggaatttgaagttatgtatggtgaggacgatgatgaagacaaagatgacgaggatgatgatgattatgatacaaagaccaagggggctactggagggggaagggcagcagcgaacgacctgttgagtgcaagcaggagtgagtgctgcacattgaatattggcatgcattggttgtggagcaattagtctggttctacttgatgcaaggtcattgagttattgaagtgatattttgtcgaatattttatatgccattgcaaagcacgggcatctaactagtctttcttatatatgtacactacaatacataatcatttatgccattgtttactacaaatatatatattaggcaactcttgaactggttgcaaggaatatttccactaaatctgcagttgctgaacctccccatgtatcacgtgaagaatgtgctcgccaattatttaagttcatttgttcccaacaactagacccgagcatgtatgcattcattattccaccttcaattaagtatcattggttatttgaatttcaagttgcaattttttttaggtccatcattgattttggaggatatggtggttctgtcttggatgttgtccaatcttttgggcctaataaatgccaagaacttttcatgcagggattcattgactgtattcgtgatgatgatatattatacaatccagataccatgatcaacacactcatactaaatgtcaatgttggtgtcggagaggaaattctccggccgggtggcggaatgcacccgccctaaatcctaagatgaggaggggcctaagtgttttgcctgtgagatggattcgggaagaacacaaaagcacacaagaatttagagtggttcgggccgtcggagcgtaatatcctactccactgtgtgttgtattgctcgagagcttgtatgaacttgtgagtctcagagtctaagtgagtgtgtcttgtaacgtcgtgtgcctccccttttatagctcaagcggggcacgcacaagggtactgagccccgacatgtgggctcaggaacataacggatgtaatacttggagcaactaatgctagtcgccagtgcaatcttcc

SEQ ID NO: 32138 - DNA, 2815 bp, Zea Mays
ttgaggatggggaacccttcaggcacaccagtgtgggcacttacagaggagcagatgttctttagaggcatgttgtgttgtactcttccacccactctctgccaggttgtggtggaaaacactcgtgtgggatctagctggctcttgtgcaattggtatgccacagctgctcttctcaccgtgtgaggacgagcacagtaaaagctaagcatttcttgattcatcctcccagcttcgttaattactatcaatgatgttgctgcatatttctttggcatcttctttgggaaaacaccgctgatcaagctctctccaaagaaaacgtgggaaggctttataggtgcatcaatgacaacattgctttctgcatttgtgctactcctgctgaaaatgtactaaccacaccttccatggtggagtgcagggcctccctgttggggcacgagatcgcccacccgtcgtctacaccagattatttctatcataccatcagatagtggatggacaaccaagcgtgcaccgtttcatcatttctgattctttcttagatgactaagataagtgtgaggtctgtactcatattctttccttttcttttcaatgcaggtatgatcttatacgagtggagattggcaacaaagatataaagcttgaatacttagtggaggcatttacaacttcaaatgacgtagcctcctcgacaccttctgcttctgctaactccggtgcaaggtacgccgctgccatcccaatccctacccccaggcaagctttgttgattgctttctggttgttgatttctgagctagctatttagaagtcaaaaattgggtgaaatctgattaaccaaactacctggttagaaatcaaattggatgaaatctaattaattttgatatgtgtctcctgagttcaaggatgtcttctacaataattcagccaagaacaagaagcgctaattggaatccaaattgtttgatgtggtgatatgatctggaacttggaccatctttatgctttatggggctaagaagcataagacctgtccgaggcaattgtatctcaacataatcagtttgatgggctccaggagttatatcatcagaaatgtttttttagtatttctatgtaccagcaaaatattgactgaatatttctaaccaggtagatccttgctatacttgacaaactaaaggaggaaagggagcaacaagaaggaaaatatggggaggaagatgtggatggttcatgtatatcagaagaagaagatggtgactgggatgtagatgagccagatgaggaggacatcatttacgtaaaatagcccattgtcttctaggaacttggtcatcattcatccagaacacagcaggttgcgttctgcatacataatattgcctatcaaggtagatttgccagagcagacttcgatcttcttaatctacctgacagtttcttaccatcatttgattttattgatggacatgttaagcctgttctagggagaaagattaactggatgaagacagggatcgttgagagtgatctggttctaacagttagtccacattatgttaaggaactcacttatggcccagataaaggtgttgagttggatggtgtccttcgcacaaagcctcttgaaattggaattgtaaatggcatggatgtttatgaatgggatccttcaacagataagtacaccagcgtgaaatatgatgcaacaacggtaactgaagcaaaggctctcaataaagagaggttgcaagctgaagttggattgcctgtggactcgagcatccctgttatagtttttgtcgggcgtcttgaagaacagaaagggtctgacatactcattgcagccattccagagttcgtgggcgagaatgttcagataatcgttcttggcacgggaaagaagaaaatggaggaggaattaatgcagctggaagtgaaatatccaaacattgctagaggcatagcgaaattcaatgttccattggcacatatgatgtttgctgggtctgacttcattattgtcccaaattcccatctgttcatcacctggaggacttgttgacacggttgaggaggggtgtcaccggattccacatgggttctttcaatgtcgagtgtgaaactgtagacctagctgacgtgacggcagtagcgtcaaccatcacacgggcctagaacagtacggcaccccggcgttccaagaaatggttcagaactgcatggcgcaaaacctatcctggaaggggcctgcgaagaagtgggaggaggtgcttctgggccttggagtcgaggggagtcaagctggcatcgacgacgcagaggagatcgctccacttgccaaggaaaacgtagctactccatgacgcttggtgcctcggaaacacgcgttggtgataggaagcatcttctaggatcctcctggccttgtggctggagtgagttgttcagtcagacacagtttcgcctctacaacatcttcctcctcctggtggtggtccgaactccgaagcaaattccagtgataaaggatgaactaagaggtccatgtttctattgctagaccttttgcctcctaaatagacgatgtactgcgcttgtaacaagaacctcactttcgtgtcaagtaatatcaacaggtttcataatggtagtgaactgcactggaaaaacctgtaaacaatgcaaacaggattcaaaactaaaacaaatctgctattaaaagctgttattcaaaattgaaaaaaacaaaacctgttaattcagtattataactcagcaaacataaataaaaaaaaca

SEQ ID NO: 32139 - DNA, 2008 bp, Zea Mays
attgatttttttcccaaatgatgaggatgagacagatgacatagttgaggtggctcttgctgaacttgagatgatagaacaatatagtgccttcatgtctcctgtcgcggctgcggacagcatgacacccaaaaagttcatggcgcttgtctctgctaaaatccaaacatacttttgcaggggcgggtcgatccagagggcggtgcggaggatggccggcggcggcggcggccggaggagacccggcgccttggcggacccgaggaccggcgacgcgtcgtcggcgtcggctagctgctccggggatgataccagcattggtagtgccactgccaagagggaaggggcacgaaggtgcatcatgcagcggtacaggtcccagctcgagcaggaagtcaagaaactgcaaaggcaactgcaagaagagattgatttacatctggcgttggcagatgccattacatataatgcggcgctgatacttaagtcgtctataaagcttccagataaggcgcatgagctattaattagcatatcctctttggaaatcgctatcacaaagcttgaagaggatctaaatcacctgcattaccaattataccatgcaaggaatgaaaggtttcttgcggaaaataagccaggatacttgctacctacaagatcagattgtcaaccctccacagcttgcaattgtacatgggaagaacctgaacaaatgttaagagaattgatattcagagattatcactcagtccaagaagatttttcaactgaacctgaagatcaacaggatgatgaaaaatacgttaaagatgcaagaggcatgctctatggaaaaagaaggcgaagaagatcagaagatagatatgttaccatttaacctgcccaatttgaagaaaggcaacatgagtgaaaatctgtggaataatccaaatcagctctctgaagagatggtgctctccatgaaagatatattccttaatttatctacatcttccaagatgtcaccagaggagcctttttctaattcatcttcatcagcagagcatctatctggttcaacattgactactttgtcggattcatctgtaatagcctcagtgcagcccagtccttcaatgtacctgaaccacgatgatggtaactttgacccgtacaatgttaatggaaaggaagcacagagagacattggcagctatagttcagtagctgaagtgtcttggatgtatattggcaatgaacaacttgaatatgcatctggagctctgagaaagttcaggtttcttgtggagcaactatcaaaggttgacacttcttgtatgaactgtgatgaacggttagcattttggattaacctttacaatgcattaatcatgcatgcctatttggcatacggtgtccctgaaaacgacattaagcttttcgcgctaatgcaaaaggcctgttacacgatctgtgggcagcctgtcagtgcagctgaaatagagtttgtgattctgaaggtgaagactccagtgcaccggccacaactctccttgatgctggcccttcacaaatttaaaacatcagagaatctcaagaaatattcaatcgatggtactgagcctcgtgtgctctttgcactctgttgtgggatgttctcttcgcctgcggtaaggattttctctgctgaaaatgttcgagccgagctacaagaatcaatgagagactacatccgagcatctgttggtgtcaatgacaagggggagcttatggtccccaagttactgcagagctatgccaagggcattgtggaggactctctgcttgccgactggatctgccgtcatctaacactagaccaactcgctgcagtccaagatacatcgtcgtcacatacacagcgccttcttggagtgcgcagtttcagcgtcatcccattcgattcaagattccggtacctgttcttgttcgacaacagtagatgacagaactgcattgctcaatgtgcacaaagccaagagtgggc

SEQ ID NO: 32140 - DNA, 6657 bp, Zea Mays
atggcggaagacggcgcatccgcgacacaggctatggtggcgcagacgcgcccaacggggccgtgcaacggcgagggctgcccaggtggtgctgtccatggtggggaaggggggaggagtcgatttggtaaatttgttgaaatccaatttgacaagagcggtaagatatctggtgctgccattagaacttacttgctcgagagatctcgagtttgccaaattaatagtccagagaggaactaccattgcttttacttcctatgtgcagcaccatcagaggatctcaagaagtataagctcggggacccatcgttgtttcactatctcaaccagtcagcttgtattaaagttgatggaatcaatgatgctgaagaataccttgcaacaagaaaagcaatggatactgttggcattactgatcaagaacagggagagaagcagattcatccataataaaggatgacaaatctagattccatcttaatacagcaggagagctcttaatgtgtgattgtgagaagttggagaatgccttgataaagagggaaattaatacaccagaaggagtgattaccacaacagttggtccgaattctgctactattagccgggatggtttagcaaagcagatatactctcgattgtttgactggcttgtaaacagaataaatgcatcgataggacaagacccaaactctaacaaactgattggggtacttgatatatatggttttgaaagttttaaaaccaacagttttgaacaactgtgcatcaattttaccaatgaaaaactccagcaacattttaatcagaatgtcttcaaaatggaacaagaggaatacacaagggagcaaattaattggagttacatagagtttgttgacaatcaagatgtacttgacctgattgaaaggaaaccaggtggcattattgcgcttcttgatgaagcctgcatgtttccaaagtccacacacgagacattgtctcagaagctgtacgaaaagttcaagaaccacaaaagatttaccaaaccaaagctttctcgtactgcatttacaattcaacattatgctggagatgtaacatatcaatctgatcaattcctggacaagaacaaggactatgtggtagcagagcatcaggaattacttaatgcttctaagtgctcttttgtatcagggttatttccacaagcaacagaagagaacacaaaatcatcaaaatcctcaattgcaactcgctttaagatacaacttcatgaactcatggagactttgagctctacagagccacattacataagatgtataaaaccaaatagtgtccttaagcctggcatttttgagaataccaatgttctgcagcagcttcgatgttctggtgttcttgaagccattagaatcagctgtgctggttatcccacaaggaaactatttcatgattttctacatcgttttcgtgttcttgctcctgaaattttgaaagagaaaaatgatgaaaaagtctcctgtcaaaaggttttggacaaaatgggactacagggttatcagataggaagaactaaggtattcctgagggctggtcaaatggctgatctggatgccagaagaacagagatgcgaaacaatgcagcaaaaggcgttcagagtcaattccgtactcatgttgctcgtgagcagttcctagtactacgggacacatctatttatttgcaatctttcgttagagccagattggcatgtaagcaacatgaattcctgagacaacaagcagcagctttgagaattcagaaaaatgcacgatggtattttgcctggaaaacttattaccaactacgattgtcagccattacattgcaggccgggctaaggtccatggcagctcgtaatgagttcacctttagaaagaaaaataaagcttcagtccatatccagtcccagtggcgatgccaccgagattactcaaattatatgaatttgaagagagccgcactaacatatcagtgtgcttggcgaagaagggttgctaggaaggagctgaggaagctcaaactggctgcaagagatacacaggctctaaaggtggccaaagagaaacttgaggaacgtgtggaagagctaacaagtcgcctggaccgcgaaaagaaactaagggctgatttggagaagtctaaagcagatgaagtttccaaattgaaagaagctcttcatgagatggagcagcgagtagaagaagtgaaagcgatgcaggaacaagaatcagcaaaaaaggctgttgaagaagctctagctcaagaaagagaaaagatcagtttattgactactgaaattgagggcctaaaggttctgctagtagctgaacgagaggagaatgataaaatgaagaaagcgcatgctaatgctctggaaacaaatgaagagttaaataaggaagtcagtgatgcagatgaaaagatcaaacaatttagtgatactgtaagaagactagaagggactgtaagcgaacatgagggccttttgctaactgaaaggcaacaaaatgaagcagctaatgctgcacttgctgaatctcaagcgagaaatgaagcactggtaagcaagcttgaagatgctgtgaaacaaaatgatctcctccatgaagctgaccaaagatttcaagaagctacaaaaaatttggaatcttcactgacatttgagaagcaacgacatgaggcaaatttgatagaattagctgaagcacgagaaaagattgaagaacttcaaagagaagttggggacactgatgaaaaattcaccctgcttcagactagtatacaaagcgttgaagaaaggttaagagagaaggatgctctattgacaacagaaagactagaaagtgaagcaactaagaaatcactaaatgaatctgaggatagaaaccaggacttactactgaaaattgaaattgctcagaaagacattgctcacttccaagaaaccgtccgaagacatgaagaaaatatggcagcactggaaacttcgttgagatctgaaaggcagcaaaatgatgcaatcatgaaacaactagctgaatctcagggggaaataggagagctgcaaaggaagcttgaagatgctgatgccagaaatgggcttcttcaagattctttacagagacatgaagaaaatatggcagcactggaaacttcgttgagatctgaaaggcagcaaaatgatgcaatcatgaaacaactagctgaatctcagggggaaataggagagctgcaaaggaagcttgaagatgctgatgccagaaatgggcttcttcaagattctttacagagacatgaagaaaatatggcagcactggaaacttcgttgagatctgaaaggcagcaaaatgatgcaatcatgaaacaactagctgaatctcagggggaaataggagagctgcaaaggaagcttgaagatgctgatgccagaaatgggcttcttcaagattctttacagagacttgaagacgatgctactacaagagaagctttaatggaaactgaaaggaaagaaactgaaatgacaaaaaagacactgactgaagctctggatcaaatcgaggaattagtcaaagaagttgagtgtgctaaccacagtgtgcatcagcttcaagatagtatgcagagaatggagcaaaccgcagttgcaagggaagcaactttactagcagaacatcaggaaaaagatgcgacatcaaaagcattagcagaggcacaagggaggattgaaggtttactgaaggaaatttattctgctaatagaaaaaatgatcaacttcaaagtactatagaaaggttagaagagggtgcaacaacgacagatgctctttacttagcagaaagaaaagggcatgatcaaacgaagaaatcactttctgaagctcaagaaacaaacaaggagttactaaaaaaaattgagaaagctgagaaaaacatagatcagcttctggagaatgtggaaagacttgaaaaagatgcaattacaagagagtctttactgcttacaacaaagcaaagctatggtgacaccgcaaaattgctgcttgaatctcaagagaaaaaccaagagttagtgcacaaagtagaggactcagatagcaaaattgttctgcttgaagattcagtaaaaaggtttaaccacttttcttacagactcgaagaaagtactgcagataaagattctttattggctatagaaagacatgaaaacagtgaaaccaagaaagaattagttggttctcagaaaaagattgcggaattgctaactgaagtgcaagatactcgtgcaaatgttgcagaacttgaggacttgattaggagacttgaacaagatgtcactgccaaagaggccttattgcttacagaaaaggaggcacacgacgcaacaaggaagactctgactgaagctcaggaagagagtggagaacttctgaagaaaattcatgataatgataaacatattcttcagcttcagtttactatacaaaggcttgaggaaactacagttgcaaatgagaatttgctgttgagggagagggagcagaatgacataacaacaaaagcgcacaatgaaagtcaagaaaaatatgaagaattactaagcaaatttgttgatgttgacaggaaaatcgaccttcttcaaggtaccatagaaaggcttggagaaaatacaacaaaggattctctgttgctatcagagagacatgaaaaggatgctattaagaaagcacttactgaggctcaagagaaaaatgaagagttactgatgaaagttgaagatgctaatgaaaaaatagaacaacttcaaactacgatagatatgcttgaagataatgtagctgcaaaagatgtttctttagaagctgcaatgaaggaaaatgatgcaattaggagatctcttactgaagctcaagagagaaatgatgaattactcaagaaaattagtgacagtgaatacaggatccatttacttcaagacacgatacaaaagcttcaagtagatgcaatatcaagattgtcgtcttttgtaatggaaaaacaagaaagtgatgcttcaaagagagctgttactgaagctcatgaaagaaatgaagatttactgaagagaaatgaggacctcctcaagaggaatgatgatctgattaagaaaattgaagactctagtaaaattgtcactcaacttcaggaagctctacaaaggcttgaaggaaaagcatgcaacttagaggctgagaaccaagttcttcgtcaacaagcaacttcaactccaccaacttcagctaaatctccagcttcacgtgcaaagatctcaaggatccatagaagtccagagaatggccataatttgaatggtgacattaggcaaactgaaatgaagccctccactggcacatcagaagcaataacctcagcagctaatgttcctgacttgggcgaccaaaaagattttgaacatggagaaaaactgcaaagaataccaaaacagaaatatcagccttctcatcaccagcagccccaggacgatcagcagtggctactcgcttgtattccacaacatcttggattttctgggagcaaaccagttgcagctctccttatataccaatgccttctccattggaaatcatttgaagccatgaagacaggtgtcttcgacagcattttgcatgctataaactcagccacagaggctcaaaatgacatgagaacattggcatattggttgtccaacttatctacattaacagttctccttcaacgatcattcaaaactactaggacggcaatctcaactccacaaaggagaagattttcatcggagaggatctttcatggaaatcaaacttcaaatgctgggcttgcttatctcagtggtcaatcagttgttgggtctgctggactgccccaagttgaagcaaaatatcctgctttgctattcaaacagcagctcgtggatctaattgaaaaggtttatggcatgataagtgacagcgtgaagaaggagctaaaccctttgcttgaattgtgtatacaggatccacgaacttctcactcgagtatcgcaaaaggcaatcttaatggcatgggtcaacagaaccaactcacatattggctgggcatagtgaaaattctcactagctacttggatgtactgagggtaaatcacgttccatcaattctggtgcataaactcttcactcagatattctcattgattgatgttcaactatttaaccggttacttttgcggcgtgagtgctgttcttttagtaacggggaatatgtcagagctggactaactgaactaaaacattggtccgacaatgctacaagagagtttgcaggttcagcgtgggaggcattgaggcatattagacaagctgtcgatttcctgtgcaaaaaatttcccctgtacatatcttgggctgcctctatccatccataaaccccctaaggaggctctacaacttttggtggataaagtttcagactacttgccgggatggaaagcttctctaatgaaccggtctggtcgattaattatggtacgagcagtcttgacagcctctcctatatattctatgctagcaattgatctcccaaaatgggccattaaggctgcggac

SEQ ID NO: 32141 - DNA, 2141 bp, Zea Mays
ttgacattcatgtttcttcagtttgtacaacggattgaaaaagacctgagcagatttgcttgttctcccctgcaaaagctcaagtgtattggcgcaacagtagtggatcagctagatattatgcagccacacaagctaatggaccagaaagtgccatttagccttgatgacaagttgttggatgttaagctgccaccatcttcctggagagaggatcaggatccagcaaaccaactcgattcttttcccaagccattggtttcacctctagaaggtagaaggggaagtgtaaatgggacccaatatgaaagtggacttttctctagctcccttccagaattttttgacaagaaaataagattaactccaaagaacagagttgttggtcatctggttggaaaagttaaccatgctgatgatgaaccatttgagttgacaaaggaaatcgaggcccaaataattgggcaacctgctccctgatgacgacgacttattgtcaagtgtttgtggtgatattgggtataataccaatgcgaataatcaggatgagattgatgatgatattttttgtactggaggtggaatggaattggaagcagatggaaatagcaaattgttaaactttaatggtggagccagtcagactaggtcaattgtccaactcaatggtgagcgatcctcgagaatcctttttgtcggaaacattgatagcaacgtcgaggattctgaattgaaattcatgtttgagcaatatggagacatgcagacacttaatgcttcttgcaaacatcatggttttgtgatggtatcttactatgatataagatcggcagaaaatgctatgagggcccttcaaagcaagccactcagatgtaggaaacttgacatacgttactcgagtccaaaggactatcctttggataaagatatcaacctgtccatggtaatagttaatcttgaagcttcgataactaatgatgacctgcaccagatatttggtgtctttggtgaaatcaaggagattcaccctacttcagataatgaccattacaaatcgatagaattttttgatgtcagagcagctgaagctgcacaatatgccttaaacaggagtgaaatttcaggaaataaaaacaaattggagcctagctgtctgggtggtactgaacgtttgatgcagcagatgtctcgtgcattggaacatgaacagtttggtgcatgtaaactcggaagcccaaacagtccttcaacatgctttggtacacatcaaagatgcttctggcagctattgatgaaagtcaccggggaacttatgattttatctacctgccaattgactttaagacatttcatgggaaaaggtgggagaaattcaacagtgagaaagtggcctcacttgcttatgctagaatccaaggaaaatcagctctagttgctcatttccagaactcaagtttgatgaatgaggataaacgctgccgccctatactcttccactctgatggtccgaatgcaggagatcaagaaccattccctgtgggatcaaatgtccgttccaggcctggaaggtccaggattttgagttgggaacaaaaccaccaggacattgtgtctgatcataccaaaggtggaactccgagcagggctggtggcactccaggttacatcgccacggatactgatcatacggctgttgattgacgaacttgcgacaacacccgacattctgacaattgcaatccagttttttttttttttgaaattgcatcctctcctacctcttttttccttttgttatgttgtatctatatctacttccgcgtgatattttggcaccggaggctctagacggctgcagatttggtcgctgacaagtagcgaggagatggatgttgtgccgtcagtttctccttactttggcacagacccctcagcgggattttgttggacagtttgaccccctttcaccaggaaagatatccatatttgggggagtttccctattgctgtttggcagtgctgtcatgaacattttcctaatgctgtggatgtgaaatttcagaatgatcaaatcgaatgacggatgaatgagagccaataatatttttttacgctcaagcaatctttattcttaacaattc

SEQ ID NO: 32142 - DNA, 3401 bp, Zea Mays
ctggcgaaggcaacaggggccgaagtgtcaacgtgtggctgcaatccacctccgcattcactccacgcgcacgccgctatacgcgacgctgccgagcgcatcgccgccggtccctccctcacttcctgtgcctgttctcagcccgccgcttctcagtccacttctgccgcagcccctcttctctcggtctagagatccgtccgggcgcggcagcctcgctttcgtttcgcttgtttaccaaaatttagggggtcacgtgaagcctgtccctgcttcaggaggggcgaatgttccttcttccaaattcccagttcgcgatgttttttccccttatggatggtcaatggtgcagtagctggcgtcaaatacttttagaatagagccttttctatctgatgtaccaatgctagaataaaactcatttgttcataactggatccctcaagcaatagtagttcttaatcttctacctttgttgaattgtgaaatatgacactgtgcttgcgctagtttgaagtccaacccaggagtgattagtggtgttcagctcagtaccgtagttctgctttgagcatgtttggtgtccggtgtccattttcgtctgcctcaatctgaatctttatgtttaccttttttccccactttcagcataatccaaattctatttgacatgttacctttttcatccatacctgtgatttggatttatgacttatcttgctgtaatttcctttgacctgattgtttagtcgtgttgaagaatgtagtatctgtggtagcatggccatgagaagccagtgattttgagttttctttgtcgttatttttctaagttagttccgcttaatatatcatgatcaaggccagttatttaattcttagaagcggtctgtgcttctgttaagtttctatttgcagaaatctagcttttactaccatgcccaattatgtctaataggcacggagaacaatcactttagaagacttgtactccttggcgtgtcatactctttgtaacaatcttaccattcttgagaagaggtacatctgtccgtcagcaatgtccatagaagagaggaagataagtgtgataagcaagagcattgcgctaaatccaaatgcagaggaatttgttccttcatcccttagatctgtcaatgattcctccaagagatcatatgcaactacggttgtctcagggatatctaaagaatccagcactgacaagccagagtcaattttacgaagtaactctgatgaagaagcacatcagtactggcagcaacagctccctgacgacattacccctgatttcaaagtcatgggacaagatgaaagtcctggacctgacagtctatcactcacagacctgtccataaatgatggcattggcacatcaatattttctccgaaccagacactgagcatgcagcaccgtgcttcgccttttatcagggacaaactaaatacacacccaaagattaacttgtctatcccaacttatatggatgaacggtcccaagccacaattttgagtccaactgcaggttccatgagtccaaatgctgctccatgggtgaagactctaaggaatgggggacattataacacaagcataagggatgccagtcagtacaatggagattctagcattggagcttcattgcacaaccttactgatgcatatcatggaagcaggcgcagcttaagctcgactatggatatcatgaatcagctggaggatcgatcgtacatacactcgtattgctggatctatgttcaggcatagtgtactagtagctcaaatataggaaaatgcttatcctctagaaggcgctgaactaccccccctcctccttgtgtccaggtcaatctattcgctgtgactccgtgtactccggttttattctacttttgaacaagaacgagcgataatgaaacgattaattattcctttgatcttccttctactaacaaaattacatgtgccgtgtttgcacacgattttattctagttcgagcatgcttcacagaaatggctattgtacttgtttactgcatggatcttctacatacatttatgcctaataacagagtaaagtcgatggacgacgcagtcagaacctcaggtcactatcatttggaaattcaagtcctacatcaccagcatcatatgcccaaaatggtcttggaaactatgctggacgtgaacacgtatccctcgatgttcctagaggaaggtacaagacgactagtttgcctgttcctggtcttggttcaagcagaggttatcagttgttgggtggctcatataatggaaaccatgatatgatctcaaccaataccccacaaaacatggctggaattcagacaggaccagcttggcttgaaagtgacgctgaggcaagcacatatttggaatcaaaggatgaagttcatgattttgcaagcctgcgacatgcagttcttgaacaggagctatacagtatacaaagcctgttggctcaggagaaggctagagaaacaacatatcgacaaagattacaaacaccacaattgcaaggcctcatccaggagcaaaatcccccaatcgatctctgtggtcttcacatcagcgaggcaatacacgtcctgaactacgagctcaacaaccgaagaaagatcgtgagatcaaccggtcgccgactccaggtgcaaccaggcctgctccgcatcctgctctagtaatggaactggtcgtcctagctgttgttcacaactggatcagatgaaaaagaagggaaaaagaaaagaaaagaaaagataagttgacctgtacttttgtatatggcagagattgctagcaggatagtagcgttaagaacttaagatagctcatgtaacattcatgtcaggctttttgtcagcaaatgtatacgtcttaaaatttgggagttagggaatattctcgttgtctttggtgccggtggatgcacacggcatagcgtcttcacagaatcacaatcatattctcgatcacaatcttcggtgctggtggatgcttaagttctgttcctgctggtgaattcaaattgtgagtaatgcctggtcgatgcattagttcttcacaatagtcgattcaaattgtgcgttgttagattattgttttgtattttgtctaagtgtaatgggcattggttagtctatatctctttactgatatatacaacattcagtctctataggatagggttttcaacattgtatccagtctagttctctcttccttagccgttgccaccacctggccgttgtcatcacagctcctggatggtgtgtctcttataaatatgttctagagataataacatagatgagcatattttttgtatccatgatatattgcttaattgaatatccat

SEQ ID NO: 32143 - DNA, 383 bp, Zea Mays
accctagcggtagaacgcactctggccatttaattctgaatttgtggaaatttaacactttttcttcccaagttttttcttctgacgaagcaggcttcaagttggagcttcgttcgattccgagagtcaagcttcggcgtcggttaaaaattttggcagcaaaacagtgcaaatagcaatgaatgctgtgataacttcacacctactcgtctgtttatatagtactgcaggtaagaaggcaaagcgccaggatttttacaccaggcggatatccgcttgcactcgctgcgtggtggaccgcagagtcaaacagtaactctgcaaggtgggaccgccacgcgctgggaaattgaatcgtttctcgacaacgagctcagggaagg

SEQ ID NO: 32144 - DNA, 817 bp, Zea Mays
atgaggtattacatttatgaaaaaaatatgttaatgctttggatcatgagtggtattaaaatttttctgcaggcaagttttgagatgtcccatcaacaagccttagcacaagtaacagcacaagcagtccattctcagtacaatatgatcaatcatgcagattacactatctctttttcgtcgacgacaacaccagctttggtcacagcacagcatgccaatttttctggcaatttgacatcagcacaggagaaaccagctctgccgtcacatacagtatggccagaaggcagttaagggtggcgagtatccaaggagttactacaaatgtacccacacgagttgtgcagttaagaaaaaagtggagcgctcagcagaaggacacatcacccaaataatttatagaggtcagcacaaccaccagcgcccaccaaaaaggaggtccaaagatggtggtggtcaactaaatgaagcagatgatttccatgagaatgaagacacttctactagatcagaacctggctctcaagatcactctggaaaacatgaggggtcaaatgatggcataccagggccttcagtgtcaagaaggggagaggtatatgagcaattgtcaggctcaagtgatagtgaggaggaacgagatgatgaacaaagggctggcaatggatgtcctggctatacaaatgcaaacagaagacatgtgccaactccagctcaaaggataattgtgcaaacaaatagtgaggttgatcttctggatgatggttatcgatggcgcaagtatggacagaaagtgattaatacacagatataa

SEQ ID NO: 32145 - DNA, 2156 bp, Zea Mays
cacgaagcatggtatttggttcaggcactgcaacgctggactgcaggctgctaccgttgctagtttctcaagaatgacgattgaagattcacgaaagttactccctgctgacctatacccttcttgggttgttttctcatcgcagcaaaagttaaaatggcttaatcaggagctgacaaagatttggccatttgtaaatgatgcggcgtcagaactgatcaaaacctctgtagagcctgttcttgaacaatataggccaataatcattgcgtccctgaagttctcaaaactcactcttggtactgttgcaccacagtttaccggtatttcgatcattgagaatactaaggaatcaggtattgtcatggagctagagatgaattgggatgccaatccaagtatcatacttgctgtaaaaactagacttggtgtcgcgcttccaatacaggtgaaggacattggctttacaggagttttccgcttaattttcaaaccactaattgaagagctaccttgctttggagctgtttgcttttctctacgacagaagaaaaagctggatttccgactgaaggtcattggcggcgaaatttctgctgtacctggaatttcagatgctcttgaggacactataaaaaatgctattgaggactcaataacatggccagtaaggaaagtcattcctattatacctggggactacagtgatctggaactgaagcctgttggtaccttggaggtcaagcttgtgcaggcaagagatttgacaaacaaagatctgataggaaaatcggatccttttgccattgtatatgtgcgaccattaccagacaaaatgaagagaagtaaaacaattgtaagtttagttgcttatctgtgagctgtcttttagagttatttctaaccgctttattcaactactttacagaacaacgatctgaaccctatctggaatgaacactttgagtttactgttgaagatgctgatactcagagtgtaaccgtgaagatttatgatgatgatggcattcaagaatctgaattgattggctgtgctcaagtcaggctgaaggatctacagccaggcaaagtgaaggatgtctggttaaaacttgtaaaagatctggagattcaaagggacaggaaagatcggggtcaggtgcaccttgagctgctatactgtccatttgacatgaaggatgaggctccaaaccctttcagccaacatttttcgatgacttcattggagagaacattgacaaacatggaaaatggatcggggggctctagttttgataggctgtcttcaagaaagaaaagggaaattatcatacgaggagttctttcagtaacagtgatatctggggaggatctgcctgcgatggatatgaatggaaaatctgacccatatgtcatactttctctcaagaagacaaagacaaagtacaagacaagggttgtgaccgaaagcttgaacccagtatggaatcaaacttttgattttgtcgttgaagatggcttacatgacatgcttatgttggaagtatatgatcatgacactttccgtagagattacatggggcggtgcatcctgaccttgacaaaagttttgctggaggaagagtacaaggaaagcttcaacctggagggagcgaagagcgggaagctgaacttgcatctgaagtggtcgccacagccaatcatgcgtgattcgcgtgaagcgggcagcttaaggtcaagataaggccagtaagtgcgcacgcattggtgtacgtgtaattttttttggctgggtgtctcggcctcgagacctgcttggtcgagggtttgtaaattttgaggtgcattctttttgaaattcaacgcgtatgcggggacggtccaccaaaattttattccgaccaaggactccagttacgtgagctagcagaagtattcaggtgcaaaatgacccgttgcacatgtacatgaggctgttatatttcgatcggttaagctcgaggtatgttaatgtagtcggcgcatcgcaatggtttgtctgtatactccttgtaatatttaaagtatggaaaaaaaatgtgtagatcagaaagctagtgaaacaaattcagcagttggcggcttgacgcgaccacggtcacgggtggttgctcact

SEQ ID NO: 32146 - DNA, 276 bp, Zea Mays
atggtggcctacaccttcagcggcgacaaggcgacgcccttcttcggcaccgccaccgctcttgtcttccctgttcaagcttttggaggatcatgcttttcttctggattttatcttcagctgtccttcctgaaaatgaaaagccaattactgaaagcggagatgaaatctcttatgaaggagcaaaggcaaaaagtccaatatatttattatcgggactacgaaggagatcaacagcccatgctaagtttggaccaagtcatcacgagagaaagg

SEQ ID NO: 32147 - DNA, 1263 bp, Zea Mays
atggatgacccccgctggcgacgctgcggcggaccgagagggagcgtgccgaagttagtcgatccggagcagggcgtggatgctggagcaggtcgggcgtgtgcatcgacgacgcgaacacggggtggtggtggtggggagggagtgagggaggcgcgtagtgggggcagagctggagaagaagggcagctcgtgttggccaccgaggtatcctcccggagagagggagacgggacgggcgacggcggcgttcgggtcggctccgaagaggatgcaggagcgacgcagcgtgccccttcgaggtcatcgtgcggcgccgtgcaacttccacgcggccacgccatccccacctccgaaaggcacaacccccacgacgcaggagcgctggctccgggcgttcgggtactcggagacggcgttgggagaggagaaccgcaccgcggcgcagacatgggcgagttctgcccctccccgcagggggactccgcgctggcggcgccgcccttgacgctctcctccccgtccccagcaacggcggttaggccgagctacgggagctgcgaccgccgctacgtgaagctggtcttcgacaacctccacgggagcatctccgtagacccgttggccctgcagtttgttgataccgaagagtttcagaggttgcgggacttgaaacaacttggtcttacatatctcgtctatcctggagcggttcacacacgcttcgaacactcattaggtgtatattcgttggctggaaaggctataaataatcttaagacatatcagggagaagaacttggaattgatcatgttgacatgcagactgtaaaacttgcaggtctcttgcatgatatcggacatggacccttcagtcatttgtttgagcatgagtttcttcctcgagttgatcctggctcatcctggtctcatgaagatatgtcagtgctccttttggacagtattgttgacaaacatgcaatagatattgaaaatggttatctcaaaatggtcaaggagatgataactgccagcgctaagcctaccagcacaaaaagtgcaaacgagaagcattttctttatgacattgttgctaatggtcgtaatggtatagatgttgacaagtttgactacgttggccgtgactgcagagcatgtggtcttggctgtaatttccagtattggaggttgtagtgctggtctcgccccatgaaaattatggattatcggttaaaagtggttttggggatgaaagactctagg

SEQ ID NO: 32148 - DNA, 3320 bp, Zea Mays
cgacctgcttggcttggcttgcattcacagttgcacgccggccgccgccaaccccgcccccacgtcgcgcgcgctgtctccctctcgcctctctcgtggagacgactgggcgacagccgacagccgctgtcgcccaacgcaagctgcccaggtcttcttcgggctcttcgccggcgacgagcacagccaggtttaggtcgagcaggggccgatgggggaagaggcggagagcaactgcaagcgcaaggcgccggactcgagcgtggaagagcagccgagcctcgcgccggcgccggcgcagtcgcaggcggacccggcggccaagcgcccgaacatctcccgctcttgcgtccacgaggtagccgtcccgaatgggtacgagtcggttaaggacgaggcggtgcacgggacgcttgccagcccggccttcaatggggagatggccaagcagtacccgttcaagcttgaccccttccagagcgtatccatcgcttgcctggagcggaacgagtccgtgcttgtctccgcgcacacttccgcggggaagaccgtcgttgcggagtacgccattgccatggcgttcagggacaagcagagggtcatctacacctccccgctcaaggccctgagcaaccagaagtacagggagctcagtcaggagttcacagatgtcgggctgatgactggcgacgtcacgctccatccgaacgccacatgcctggtcatgacgacagagatcctcagggcgatgctctacaggggctccgaggtgatcaaggaggttgcctgggttatattcgatgagatacattacatgaaggatcgtgagagaggggtcgtgtgggaggagagcatcattttcttgccccctgccatcaagatggttttcctttcggctaccatgtcgaatgcgaccgaatttgctgaatggatatgcagcctgcacaagcagccctgtcatgttgtgtatacggacttcaggcccacaccattgcagcactatatgtttccaataggtggttctggtctttaccttgtagtagatgaaaatggccagtttagagaagataactttgcgaagctacaagactcctttgctaagccaaataatcaactggatggaaggaaaggtggtggacctaaagcgagtggccgaattgcaaaaggtggaagcgcctctgggaattctgacatatacagaattgttaagatgattatggagcgcaagtttcaaccagtcataattttcagctttagtagaagagaatgtgagcatcatgccatgtctatgtcaaaacttgacttcagcactgaagaagaaaaggaatgcattgagcaggttttctgtaatgctattggttgtttagtggaggaagacagaagtttacctgctatagagttgatgttgccacttcttaaacgaggtattgcagtacaccattctggactacttccaataattaaggagctagtggaattgctctttcaagaaggtcttgtgaaagctctctttgctaccgagacatttgccatgggtcttaatatgcctgcgaaaacggttgttttcacgtctgtcaaaaaatgggatggcgatagtaaccgctatattggttctggagaatatatacagatgagtggaagagctggccggcgtggcaaggatgaacgtggtatctgtgttataatgatagatgagaagatggaaatgagtgttatcaaggacatggtgttaggcaaaccagcacctctagtcagtactttccgtctgagctactacactattctgaacttaatgagccgtgtggagggccaatttaccgctgagcatgtgattaggcattcattccatgaatttcagtatgagaaggcattgccagaaatagctcaaaagattacacggttggagaatgaagctaccttgcttgattcttctggcgagactgatcttgctgaatatcacaaattggggcttgatatatctgaactggagaagaaaatcatgtctgagatgattagaccagagagggctttgttgtatttggttcctggaaggctggttagagtgagggatggttcaacagactggggatggggtgtggttgtaaatgtagtgaagaaacctccagcatctgggactctccctcctgcattaagtgcatcgcgcagcaacaactatacagtcgataccttgcttcactgctcctctaattccagcgagaatggatcacgttcaaagccatgccctcctcgcccaggggaaaaaggtgaaatgcatgtggtgcctgtaccattgcctttagtatctggtctaagcagtgttagaatcaacattcctcctgatctacgaccacctgaagcaagacagaatatactttctgcagtgcaagaactaggaaagcgctacccccaaggtcttccgaaactacatccaatcaatgacatgggtattcaagaacctgaactagttgacttggtacataaacttgaagaccttgagcagaaacaatgctctcaccgacttcataagtccggtcaaagtgaacaggaactatcatggtaccaaaaaaaagcagatctgaatactgaaattcagcaactcaagtcaaagatgcgggattcacagctacaaaaatttagagatgaacttaggaaccggtcccgtgttctgaagatgctggggcatattgatgctgacggtgttctccagttaaaaggacgtgctgcctgtctaatagacacaggggatgaactgcttatcactgaacttatgttcaatggtacatttaatgatcttgaccatcatcaagttgcctcccttgctagctgctttgtaccttgtgataaatcaagtgagcagatacgcctaagaaatgaactttctaggccgatgatgcagcttcaggaggctgcaagaaaaatagctgaggtacaacgagaatgcaaactggaagtaaatgtggaggaatatgttgaatcaacctgcagaccctaccttatggatgtcatatactgttggtcaaggggagccacctttgcggaggtgatggaaatgaccgacatatttgaaggaagtgtcataagacttgctagaaggctggatgaatttctgaatcagttgagagctgctgctgaagccgtggggggaggttaaccttgaagaagaagttcaagaatgcaagtgagagtttgcgtcggggtatcatgttctccaactcactgtatctgtaattagcactttagcagcaatagtaccatatgttagccgacaaatgctagcggcgggaagaagttcaagaatgcaagtgagagtttgcgtcggg

SEQ ID NO: 32149 - DNA, 1530 bp, Zea Mays
gctccgcctcctggcctcaggtcccatcacattccctccctcccttctcgacgccgccaaaacaagccatctcgtctcttcactcttcttctgcagtcctgctgccggtgctcgccctcgccctcgaccgtcacggagaaaacgaagagacccctagttagcatgcagagatttccctcatccacgacatctatgcgctgccttgccattcagcagcagttctcatgcaagtcattgtagcatgtgccattgttatgtctgtgattgtcctgctccctgtgccctatgggacaagcattgtcatgctacggacaaggatagaaagtggaagagacttagggaaatatccaaaaataaaagccagccaaatcctaaacgaagaataccccagcatttcaaacgctcagtcacgacaggaccatcatcctcacagtattccgcaaatatgactggttttactggaagatttcctgcttcgggtactgcgaaccaaattcaacaggtggatatctctgttatggttgcacaggatatggtgaggggtatcagtctgccgagtgcaccatctcctacgccaagaactaaaaatcggagctatggatccaaaggaggtcatgttagcgctaagacttttcagagtaacccatctcagttttgtgttcgtgcaccaatgggatctcatggacacaggtaccgaccaccatcatatcctcagcctcctcctaacacagttgttggcactggtgtgcccctctcacggtgcgcctcgctgaacgctgaggctcagggaacacaacgcccacaagttccgccggcaggtacaatatcgaaggaatcacttgcaaatttggcacgtcggctgggattaccttattacaatactaatcagccattaggtcagcagtcaacgagcacatctcaatttctgcatatgcatcctcacgagatgctacctgctcaaggtgctcaaaacacgacctggcaagcttacgttaagaaaagtgtggcaacaacttcacaaatcgtgccttctagtgaacataattcgtcaattcatgcacctgggagcactgttcttccatctggttcagttcagatccagcagcctttgcgccaattcaaatcgggcactgttctatcatctggtgcagcccagatccaccagcagcctctgcgccaactcgattctcagagcagtgttactccgagtgaaaccgttccaagtactctctaccttccgcagccatgaagtttcatcggaagtgttctcatcctagactattgttcctttctttagtgtacttgtagtttttttatatcatagataatcattgacagatatcttgctatcctaacctttctgctgtaatggtttaaagctgagaattaatggtcaaatcttgcggtggtcgggtggtaacactgatttgcaacatactatagctggtgaggtttcagcaccttgtccaatggtaaaacaggtgctcgttttatacgagtgaggttagacgacgagagttaataatgatg

SEQ ID NO: 32150 - DNA, 1870 bp, Zea Mays
atagccttagcccggcgcgagaagaaatcgtatcctcgccagctcttcaccaacagattcgtctcctcgcctccgccgggtttcgaccagaacgccgccgccagcccaccagtaattcctccgggcactggtctccacctcctctgggatcaccacccaagaaaagggtgcgcggcgcataggcgaccactgagattttattctctatataacatttggctgtaagtggattataatctctataactcttaaataagtgcaaatatctcaatgtcaagtgtttcaaattctattgctgtgggtcttccaagctatgggctatatctagagacaaggtttctcacgcagacctataggaacttcgcacagaaatcctcttacaagtattccagaatccgtgcagtgcagggaaatggtgggcgtcgaaggctggttgacataatccgaatcattccagaactctcaagggactattttaaaagtcgatcgaggcgagctctttttggtggcatctcgttgcttggcggcttttacgttgcacagacaatctcgctctctttcggtaccttgggtgtgaatgatgttatagcagcggttgtttgtgtcctgctgacagagtatgtgacaaagttctattacagtcggcctaaggttaccttccccattgctctcctcaacaatttcaagatgggtttcacatatggcctgtttattgatgccttcaagcttgctagctgagctgcactatgtcctgcttggctacttctttgcacgctcttgatcaccacaaacatgactatatatgacatacatcatttttgtattgttgtatgtgaagattgaatccagtttacatagccttttagtttacatggaattcatctctgctgtgcaattttgcaaacttgaggttaatccaagctaattctgaactgagcggcagtaaagttcctattgggttactgtctgttactgttgcctgccaaatttataaagtccttcagtaatatcagtgtgtcttgattgctagcagcaatgcgacaaacatggcagattccagtgatgctgtatcaaaatgtgtttgcctgtttggtctgtgcacagctttaggtggtttcttggcaccatgctgtattctgattattttgggtatttctcagaatctctaatagttggctgtgcgttgagaagaggcgacgatattattgtagcattattggaaatggatgtacactgaggcattgggaatggatgccattttatgtttgaaaattacacttcgtgaataatgatctgctttgggacgcgatatcaatagtcatgttctttgtgtgctgattttccccctcaaattctgcatccggtactatccattcataatttgtgatactttttttttgtacacgtttaaaggtgcacccatgtgttggtgattcagtgacgccatttcgggcgtcagctagaatcgtctgtgcatatgtgaacgggtatgccattttctattgttgagaagtttttcttatatggagtacatgtgactatgtaagctctttcctctgtatttttttctatgatgagaaagtgcatataaaacacccggcgagtgtcagccaatggttatgcagttacattaaaacaaaagcatgatttattttgtcgctactacaatgtagttaacttattagtttgatgaagggggtatatgcttttgaacacgaccagaacaataattttaatatgcaggtttgcctcacttgggacagaccattgttcaagatggtgaaactgtaagctaaattcattgcacttgcagatgtggcgaatgcacagtcagtgagatggtatttatctaatatatcgtcttcctcca

SEQ ID NO: 32151 - DNA, 2199 bp, Zea Mays
ctcagtaaagtgatgtttgatgcaggttcccctcgtcctgctccacataaaagtaacagtacttctgcaccaagccatggatatcctggtagtactgcacctgcacctgtacgtttgcctccgccaaaaggaaagggagaaggaaattttgctcatgctccaaaccatcccaatcaataccattcaacgtcatattctccaggatcagctctaccacctgcgcatccacctgacattcctgcatttagaaagcccaagattttggcaccagcgcctagtcaatcgctgctacctccaccaacaaattcatgccttcctccgtcaccaccggcagcaagcatgaacaatggtcttagcaatgtaaatggtccaagtttgcatccgcttgctgctgatgtgggaaattatagagaaagaaaaggcaggcacgttattataataattattctatcaagtgtgtgtgcttttattttatgtgctggagctgcactagtgctttatttcaagcttcgaaaccacatccatttaactgaagcgtcacttgtgccaacaaaacctacaggtcctgtttctgcaatggttgggaacaggctagaaagcagacctatttcggcatcaccatccttcagctcaagtttggtggcatataaaggatctgccaaaacatttaacctggttgagatggagagagctacactaggatttgatgagtccagaattattggtgagggtggttttgggcgtgtctatgaaggtattcttgaggatggagaacgggttgctatcaaggttttaaagcgggacgatcaacaaggtacccgggagtttttggctgaggtcgagatgcttagccgattgcatcataggaacttggttaagctgataggtatatgcacagaggggcatagccgatgtttggtttatgagcttgttccgaatggcagtgtggaatctcacttgcatgataagggagctgctcagtttgattggaacgctaggctcaaaattgcacttggtgcagcacgcgcacttgcatatttgcatgaggattcaagtccacgtgtcatacaccgtgatttcaagtccagtaacatcttattggaacatgacttcaccccaaaggtgtcagactttggcttagcaaggacagctttgggtgagggaaacgagcatatttcaactcgtgtcatgggaacttttgggtatcttgctcctgaatatgcaatgactggccatcttctagtaaagagtgatgtttacagctacggtgttgttcttcttgagcttcttacagggaggaaaccggtagatatgttaagacctcctggacaggaaaacttagtggcatgggctggttctcttctgacaagcagggatggtctggaatcaatcatagatcattcacttgggcgcagcattccatttgacagcatcgcaaaagtagcagccattgcttctatgtgtgttcagcctgaggtggaccagcgcccattcatgggtgaagtagttcaagctctaaagctggtatgcaatgaaggcggcgagttcaatgagtcaacctttagccaagatttgcatatccaagatgtcgaggttatgagtagagcaagtacggatgtagacgttgacccaacgctatctgctgagctgttcacttcatcagcgcgttatgatgctatagatgcccctggttctttccgaagatactcaagttcaggtcctctaagagtagggagaactggactgaacaaagagaggggcctgtcaacaggcagctcaagtgaacacgttgggctacagaggtttaggattgatggagaatagtcagcctgcaagcagctcatgatgatgtgcgcatggaagaaatacacattggattattttcttccaagccagatttcatactcatcgtgaatagtatgtggaaaattgagaaaggcgtaaaaatcagtgtgccactgttcggtgctcccgtcgccttctttggaaagctcaaacaagacttcacacgaatttttgtacagttctagagatgatagatgcttttaggaaagaaggggtgtacacgagtttttcagctgtaattccccacgaaccgtattacgtttcgccgtagcatcagtgcaaatcaattaaagggcgtgcacgcagtcaccattttgagttcaatgaaaaaaaattcatcctgattgaccgcaa

SEQ ID NO: 32152 - DNA, 2125 bp, Zea Mays
gtcaattctttatttggctggttgcccaaaacaggtgttggacgacggacagactggctaagagactaagagagggtgtttaatttatgaactattttctggtgcaaagctggctagaacagaggaccttcgaaatactgcttcaatcccaaagattaccagaggctcttgaattccacaccttctcgtagactaaatccttcaaaacttattgacaacagcgagtttttccagaacaagttagtagagaccatccagttcatggaaattcttaatttgaaagacacctttgagaaagacagtttttttcgtaaactccccaatatagctgaacagcttcctcgtgaaatagttctgaaaaagctgctccctgtattggcttcttctcttgaatttggttcagctgccgctccagccttaactgttttgttaaagatgggttcctggcttcctgctgaccaatttaatatcaaggtcttgccaactattgtcaagctttttgcctccaatgaccgagctatccgagcatgtcttttgcatcacataaatcagtttggggaatcaatgtcagctcaaattgttgacgaacaagtttttcctcatgtagccactggcttctctgatactgatggtactattcgtgaactgacattgaagtcgatgctcgtattagcaccaaaattatctcagcgtacaatctcaggatctctcttaaaatatctctctaagctacaggtggacgaagaacctggtatcaggacaaacacaacaattcttcttggcaatattgcaggctacatgaacgatgggacaaggaagagagtactgatcaatgcattcacagttcgtgcattacgtgataccttccctccggccagagcagctggaatcatggcactgagtgtcactagttcatactatgaaatgacagagattgcaactcgcatcctgcctaacattgttgtgctcacatttgacccaaatagtgatgtccgaacgaaggcttttcaggctaccgatcagttcttgcaaatagcaaaacaacaccatgaaaagcttaatacaggagacaacagtgtggctgaaagtactggtgttaagttaaagcctggaaatgcaggtttacttgggtgggccatgagttctgttacacaaaagggtaaaccttttgaccatgccccaatatctactgcaaatgccaataattctcaagcatcaacaacctcgactgccactccagacactcaggcttccacactagcgtatgcaccatccacatccacctcgcttgatcaagctgcatcagcatcagcaaggtcgtcagtagatgggtggggtgagcttgaggatggtaatatccatgaggagaatagtagcgataaagatggatgggatgatgtagacccatttgaggacaagccatccccatctcttctatccaacatacaggctgctcaaaaacgtccagtggtgcaaccaaagcaaccggttgcaaactcatctaaaccaaacccactgaaagcgccaaagtcagaagacgatcctttgtggggtcctatagctgctgcaccacctaaaagtgcagtaaaatctgcagacatcaagccatcaacatcacataatgatgaggatgacctctggggttcaatagcagcacctccaaaatcatctgggaagcctttgaagccagctgtagcgaatagtgacgacttatggggtgccatcgcagcacctccaccagcaaccaaagccagacccttagcctcgtcaggtaggggccgaggaacaaagccagcgcaaccaaaacttggtgctcaaagaataggaagaacatcttcaactggaatgtgacgtcttatgatatcaagtgttgtacaagaatgcaaagttttcctttttttttcccctgccttgcgttgagtctgtccaggatgacattctttgtaaactagtaaaaagatttatgtatatgagcacagttttgaccaatgtattagtattattttaccattgtgtattaaaatagatccagaagatttttgcacatcacagctgcaatcatcttaagtccatattattaatatattgctatgtcttattttggcgtgataagagcaacttaatg

SEQ ID NO: 32153 - DNA, 2962 bp, Zea Mays
caaggatgtaacgaaagaaatggacgcaatggcaaattcgtaaaacacgtgaaatcaggaaaggaaaacagcaatcccctcatcatcgcttcctccaaaccctagcctgcctcttaccccgcccgacgacctgtttctgccagtcatatttcccgggcagcgcgcgatctcaacgctcccgtcgcgccctgcccctgcgcttcaaccgctccatccaggcgagatcctgcggatggaacccccggcggcaaaggaggcgccgtcaccgccgctccagcctgcggcggaggaggacgcgatgctctctgcgacggcggtcatggcgaaggaagcctctgtagcgttccagggacgtcgctacgccgactgcgcagaagtgctcacgaggctgctggacatgaaagagggcgatcccaaggtccaccataacatggccatcaccaaagccttcttggatggttgtcctgattcaaacaggctgcttaaaattctttgtgatgctaagagaagaagtgaagagcttgcatgtgcaactagagaacaagctgattctgcaaatggggtaggaaatagtgctccttcaggatcaagagggagtggcgttgcactacctttttctgctacacataatgtgtcgacttatggggatgagtttgacacgaccataattacattcaacatggctgtcatcctgtatcatcttcatgactatgaatctgcactatctgttttggacccattgtaccgaaacattgaaccaatggatgagacaactgctcttcatgtatgctttttattattggatatcacattagctttgcaagatgcaacaaaggctgcggacataatacagtacatggaaagggcatttggagtagctaacataacgagcccgaatgaaaatccaagcatagctcagcagcaattagctcaaccgaagcctcctgtgaaaattagcgtgcctccagattctgaattaaatgcttatgctggtggatatgagaacctttcggctggaattttaccagatgatcaaatagaatttgaatctctatactctagttttgatggacatcagaatttgggcaggcgtatctttaatgatttctcaagggcatctgctgatcttgctgctactgctgctgatttgaaagttagacttcagatttacaagggattcatctacagagcttctcttgaaatctcagctggagtatgcccgggggaattataggaaagctgtgaagctattgagcacaccacataatcgggctgaaccagcaatgctagccattttctacaacaacctgggctgtatactccaccgacagagatcgtatcacacctctatatggtgctttagcaaagcgctgaaatacactttatcacttcgttcagagaaaccaatgaagctgtctacattatcacaagacaagtcttgccttatttcatacaactgtggtgtccaacatttgatgtgtgggaagcctttgttagcagcttcttgttttcgtgaagctatgccgctcttctacaagcgacctcttttctggcttcgtttttctgagtgtagtctgctagctctagaaaagggtctcctgtgtgcaaaaggtgcttcttcatgcaacgatgagattgaagtcattgttgtggggtcaggacaatggaggcagttgattgtcaaccatgtgagcttgagaagtaatttaggttgtgcaggtgtgacttcaggtgaacataaaaagttggtttcacttggatttgctagacagtgtctactcaatgcgctgctactattgaatgctactgaacaggaaaattgggtaaccacatctaatgcagaggattacatccaaggaacattacaaggatataaaaactcaggtcagaagaacactacaagtacggattctaaaacaccttctgccccaactctagctaatgtaaatggtgaacaaaagggaacgagcttgaatgctaccttgcagagttctcttgctttctataatgagatctgtcgaaaagagaacctgaaaatgagacaggccatcctggggaacttggcgtttgttgaattgtgtcttgagaaccccttgaaagctttgtcttatgcaaagtcagtaatgcaggttaaagactgttccaggatgtatatattcctcagccatgtatacgcagctgaagctttgtgtactttgaacagaccaacggatgctgctgagaagctatcagtttatataagagatggcaatgatatcgagttgccgtataatatggagaactctgaaaaggccttggttgagaaagacagtgacagtgaagacttggctgctgctacagtgacaaaagtagccacagaagaatctgagtactcagagggcctcaggcctgaggaggcccgtggtgtcttgtatatcaaccttgccatgactgctgcagtgcagggaaaagttgagcaagccaactacatggtcagccgtggcctggcgatgttgcccaacaaccctcgagcagtgctagcatcggtttacatagacctcttgcaagggaagtcccaggaggctgtcgtgaagttgagacactgtaggaatgtgagatttagacccggtagcatagcagccagcagctgagcatagagaagcctcacttttcatggtttctgtagtttacaattaccatcatgatatttttggacgctgaccccaatgtggatgatcaaagatggtaatgttcctcctgtgtaccatacataagaaatgaactgtagcactgcccttttagcttcaggggtcaaatctcaaatgtgttgtaactgtaccggtttaatttgcctctctttggactgaagagaggtcaagtgatcaaaaacgtttcctatgttacgccaatattttggaaaataatgcttaaaagctgaggggtctgatcgatatacatttagggcttgttcggttagctctca

SEQ ID NO: 32154 - DNA, 1360 bp, Zea Mays
atcgacttctttctgttctattatctctctgatctcggtgatgaacaataataaaaaaaaataagctcaatcacattaatcgagacctttctgtgatctcataaaactgatgtggattaggagttctagggttcttaggatgcctctgataccattgttagaatctatgctgtctaggatcgattcctaagtccctagaatacaaatccgtaactgaaagtaaaaccttgatgacgtgtagatctgatctactgatctactgagaggaacggggaaacataccttgttgttgctgttgctatcttcatattgttgccctgcagagaagcagcaggcatcgtgatccgagccactgtctggttgtcgcgtttccaaacacttcgacgcctaggcgatgggggcctctcggactagggtttttttttggggcgaggtactagcgttaatctttcctgcgaccccttagtcctatatatagcgtcgtgtgtctgggggctccaaccgaggttagcgtgggccctcccaatcaagggcccatttaaagagatagatagttgggtttagcccaatccggtcactgatgaccagctgtagaggacacacccaacagatactgccgctgcgttgttgcatccgcgcgcctgcctctgcggcgcaaagagaaatgaccttgaacaagcctagcaaccggccgccaaccgcggctgtgtttcgtttcgaaccgttggtacgtgcacagcgtctctcacgcatcgtacagtacagtagtgtcaaaaaaaaaaaaacaggagcgtgcagttatctgatcctaattcctgtaacctgaggtacattctgggagtccgagctatttctttcaatcaacgttcgcgttagaaatttgtttgatgacgatgttgcctggcgcattggacaaaagagataacttcttttattttgggaccatatacgactaggctattcgcaagagattgtaaaaagtagaaaatttagagtgtagattacactttttgcagagcgaaattcgaaatagagaataagatagaagatactatataatagttgttgtagtgtagacggctctcaacatcatttccggcaaaatgggaagcggccccatctttctagccaccatctgtttttttaactttgttgttatccgcaaggacaaatccggcaacagagcaataagctcgctttcatcgctcggatcaactccaactgtagcgagctagctttctcgtgctcgtgcggatcgaaactcttgaatggaaacagatataaactcttgaatgtaaattgaaaaaaatgtaaccccagctccttcaaaaatggtaagatctttggcgtaagaagaagt

SEQ ID NO: 32155 - DNA, 1680 bp, Zea Mays
ggtatacctgccaccccaccaaaggcgatagacacctatttctgtttcttttatcatttataaaattttcgaacattttaaacataaaaaaaatgaaaagctacacagatcccacggtttgccgggccggatcactagcctagcccaacagacccaaatagtacacattgagtttgggcccaaatataatgagcccgccgtctccttgaccgaagcccactctgagaaacagatcgaacagaagcgcagccatccatcagctattcattcagctatcacaaaagaaaaaaaaaaggccgcgacgagccgacgagcaacgacgaccatggcgacgatggccgcttcttcctgccacgggcaacttctcctgtttctcctcgtggccgtcgcgtcggcctgcctcggctccgcggcagcgcatcaagccggatctggagagggctacacgatcgctggccgcgtcaagatcgatggcacgagcgtgaagggctttggtcttgcaacaaagacatcaaacacaaaagtgatacttaatggcggccagagggttacatttgccaggccagacggctactttgcattgtatcctacaaaagatgcattgccataagttcaattttattctgatttttcctggaaacttcatctattaaaatgatatagctcgtactatcatacatttatctgtttgttgttggtaaaattgatgccgagggatgggtatgtactaagcaaagaaactgtagctctcatcatgcgcataccattaattcttgcccgctcttgggtatatctttcattgtatacaattatagatcagtgttaggagatcactatatttgctttattgttggctccttgacctgatatactttagccacaacgtgccagctggaactcatctgattgaggtctcctcaattggttacttcttttccccagttcgcgtagatatcagtgcaaggaatcctggttatattcaagcagcattgactgaaactagaagagttctaaatgagcttgtcctggaacctctgaaagaagagcagtactatgaggttagggagcctttctccgtcatgtcacttttgaagagccccatggggttgatggttggttttatggtcttaatggtctttgtgatgcccaagatgatggagaacatagatcctgaggagatgaagcaagctcaagaacaaatgaggaacaaccccgtatcattgtctggcttgctagccagagcgcagggctagaagtagcacatgaggatgctgcaagggtctagattctataatgtgtttaagggcagtactgaagtgcttgacatgccatgtcactcggagtaatttcctggggacaaggtggaaactctttcccctgtttttactgtattttaacttgcagtttttctgttagggcttgttcggttattttcaatccatatgtattggaggggattgatacggattggaggggattttgactttgaatccccctcaatccatatggattggggcagaaccgaacatggccttatgtagaaccttctgaaacctctagctgagctagtcatttggcacatcatataaccacacattgagatattcttgttcaatttgtattgtatgaatcagctgaatctaacacattgattagtcatcggaccgcggctgcacccag

SEQ ID NO: 32156 - DNA, 1408 bp, Zea Mays
tgttcttaatatgtttcatcaacatgaatataaaatttgatttggagttatgattctctgcctttggtctgctgaaagctgcaaattcatgaatgagtacaatgtgccaaattctaaaacattagtcgactttgattttgatgaaaataagattgtaggtttgaccagctcccagatttgcatatggagacgcagtgaaccaagaagcatatttcaatctggtggagcctcattcaatcatgggttatgcatgagttttgctgatccggaggttgtaattggttgtgaggatggtcgagcctttgtatatgatatgtacagcaggagttgctcacgtatttatcggcttcactcctctcctgtgacatgtttgatgataacggatgaccagctgattgttggtggatcaacttttggaaatgtagctattgcagatcaaacctcagggcagaagttaggtgttctaaaatcagatcatggaccattggcaataagatccttatcttcctgcacaaattcacacatgatatttgctggttcgtcagctggttatgcacattgctgggacttaaggactttgaggcctctctgggaaaaaagagtcagcccaaatgtcatctacagcacacgtcatttgcccggtgacacggcaacgctggcagttggaggcattgacggcgtgctccgcgttatatgccaaaggactggtgacatcattcgcagtcttgtcgttgacgcagatctcccagcagaagccacatctagatcccggcagcaaatagagaagaaacgtgttcgaaggattgaccctgatgcacagttggacggtatcccgaggcgtttgcgccctcagattaccagcctatcggttgggatgaagaagattgtgaccacgcatggtgaaaactacattagggtttggaagtttcgcatgaaaagttcgtaaaaagggcgagatgatggtaatctagttatctggtgtaacctgtactgtagtctactgaataagatggcgtggtaccgtggtgtgtcacctgcgcttgtaataatagcctgaaacatagttcatttgtacacttgtagtcctctttaggatactattagcaattaaaaaaatgtttgtgctcggttcttttttttttacaatagatcgctatatgaaaaaaagtctgtactcagcttacggtagagatgcctggtaagctaatgcgtggatgaaagctgaacttaaccttatcaacacattcaaaccgttgtagtttgaacctgaatgtatccaaacattgtcggcaacaggattgcttcaaaagaaagaagtgataaaactatgaagtcgtagactcatcaattaaatttttttgtatagattgtaattgtatttgagcttatatataaatgtaaaagttgt

SEQ ID NO: 32157 - DNA, 857 bp, Zea Mays
cttctactagcccacccaactccaggaaaagacaagggcccacttgcagcccgagccccttgattccctcgccggtgtcacgcgactccagatccccaattcggacagccacctgctcggcgagccatggccggccgccgcgaaggcgagcaccaggcgagcccgtggcgatccgggacgcccgcggcggaggaggactcgggcgccttcccctccgccatcatcttcttcgctctcgttggcgctaccgccaccaccgccgccgtcggacaactgcgccggacggtcagctggttctacactcaacttagtaggtcggaaccatatgttttctgggaagacatacctcgtcgaccaaatcgtcatcggtgcggtgaagcctgggaacgatatcaccagaggatgcgtgacaggaccgaggatcaaagggaaagagtggaacgcatacggcacatgcaagatgtatttaaaaaggagagaagtaaatgtcgggattatcgaaattgggatagccataatcccaactattatcagcatcatcaaagagatgactggtactggaacgcagaagcattttatgccaatcaaaggacaaatttcagggcaatgaccagggaagccatgacttacactatgtcacaccactattctgttttgggccttgacaggtcaaggtcagagccattttcagatgctgaaatcaagcgcgtcactaaggaaacggtggcccgatccttgttcacttgacactgtgtctagatgacgacatgacgcatcaacaagggggtgtcaatctggcccttggctatttaacatcatactcaggttctgatatggctcgtcgttaagaagtttgc

SEQ ID NO: 32158 - DNA, 2478 bp, Zea Mays
cttacaatctccagcattaaaacaccaaagctaagaacctccggcgccggcatttcgccggcggacacgctcaacagcgggggcaacgtcaccgatggcgagacgctggtctcggccggtggcacattcaccctgggcttcttctccccgtcgaccacggtgctgaccaagaggtacctcgggatctggttcacggcgtctggtacggacgccgtcttgtgggtggccaaccgcgaaaccccgctaaacaacacctccggcgtcctggtgatgagcagccgggtgggccttcgccttctcgacggctctggccggaccgcctggtcctcaaacacgaccggcgcctccacctcttcggtggcacagctgctcgggtccggcaacctcgtcgtgcgcgagaagagcagcaacgccgtcttccagtggcagtcgttcgaccatccgcagaacaccttgctcgccggcatgaggttcggcaagaacctaaagaccggcatggagtggtccctgacgtcgtggcgggcgcaggacgaccccgcgacgggggactaccgtcgtgtcatggacacgaagggccttccggacatcgttacttggcacggcaacgccaagaagtaccgcgcgggtccgtggaacgggcgctggttcagcggcgtgccggagatggactcagggtacaagctgttctccgtccagatggtggacggcccggacgaggtcacctacgtgctcaacaccacggccggcatccccttcacccgcgtggtgctggacgaggttggcaaggtgcgggtcctgatgtggctgccgaccagccgggtgtggaaggaatacccatggctgccgcgcgacgcctgcgacgagtacacgtcctgcggcgcgttcggcctgtgcaacgtcgacgccgcgccgacgccgtcctgcagctgcgccgtggggttcagccccgtgaacgcgtcggagtggtccaggagggaagcctccggcgggtgccagagggacgtgccgctggagtgcgccgccggcaacgggacggcggtgacggaccggttcgcgcccgtgcacggcgtgaagctccctgacacggacaacgcgacggtggacatgggcgcgacgctggagcagtgcaaggcgaggtgcctcgccaactgctcgtgcgtggcctatgcccccgccgacatccgaggcggcggcgatggcagcggctgcgtcatgtggaaggataacatcgttgatgtccggtacatagaaaatgggcaggatctgtttctgaggttggccaagtctgaatcagctacaggggagagggtccgtctggcaaagattttggttccagtgatggcgtttgtgcttgcactcacggccgccggcatgtaccttgcttggaactgcaagcttagagccaagcgtcggaacagggataatttgaggaaagcgatcctaggatactcgactgcgccaaacgaactcggtgatgaaaacgtagagctcccatttgtcagccttggagagattgctgcagcaacaaataatttttccgaggacaacatgcttgggcaaggtggctttgggaaggtctataagggtacgctgggacagaacgtgcaggttgcaatcaaaaggctcggccaatgttcaggacagggcgtggaggagttcaggaacgaagccgtcctgatcgcgaagctgcagcacaggaacctggtcaggcttcttggatgctgcatcgacggagacgagaagctgctagtctacgaatacttaccgaacagaagcctggactccattatttttgatgctgcaagtaaacacctccttgattggccaacacgtttcaagataatcagaggagtatgtcgagggctcctttatctccaccaggactcaaggctgactataatccacagagacctgaagacgagcaacatactgctggacgcagatatgagccccaagatatcggatttcggcatggcaagaatctttggtggaaaccagcatgaagcgaacaccaatcgagttgttgggacgtacggttacatgtctcctgaatatgcaatggacggcgtgttttctgtcaagtcagacacgtacagtttcggcgtcatagtcttggagatcataagtggcctgaagatcagtttaacccattgcaatggcttccctaacctgctagcttatgcatggagcttgtggatagacgacagagccatggatctcgtggactcgtccctggagaagagcagttcctgcagtgaagctttacgctgtatccagatcggactgctgtgtgtgcaggacaacccgaatagtaggccgctcatgtcgtcggtggtgaccatgctcgagaacgaaaatgtgtaatagcgcattagcagcttatattgttctagagaagtcatatatttatatatcgattgctattataagcaagatgatattacagtgtttgtgctcatctcggccggcggagacttc

SEQ ID NO: 32159 - DNA, 1211 bp, Zea Mays
ctcgcgtgctcgattcccatctccccctccctgcgcacacccgcacaccaccaacaccagacgccgccgcccctcatcgctgtcccgtcccgcgcgcggccgccgcatccgtccgggcctcctcgtctccccagccccgctgccgccgcagcaaaaacctccacgaatcgccgacactccaacccggaagagccaacgaggtgactccgcgccccggtcatgggtgacagccaatactccttctctcttaccactttcagcccgtcgggaaagcttgtgcagatagagcacgcgctcacggctgtcggatccgggcagacctccctagggatcaaagctgccaacggtgtagtgattgccaccgagaagaaactgccttctattttagtggatgaaacatctgtgcaaaagattcaggcactaacaccaaatattggagttgtctatagtgggatgggtccagattttcgtgttctggtgagaaaaagtcgaaagcaggcacagcagtattatcggttgtacaaggagcatatacctgtaacacagcttgtgcgggagactgctgctgtgatgcaggagttcacacagtcaggtggtgtaagaccatttggagtatcactgttgattgctgggtatgatgacaatggcccacagttgtatcaggttgatccctcaggatcatacttctcctggaaggcatcagccatgggaaaaaatgtgtcaaatgcaaagacatttcttgaaaagagatacacagaggatatggaacttgatgatgccatccacactgcaattttgactttgaaagaaggatatgaggggcaaatttcctccaacaacattgaaatcggaattattcgagctgaccgtgagttcaaagttctaagcccatcagagatcaaggatttcttggaagaggtggagtaagttgtctgttgatgatttactgtttcaaacaagaatagcagcatcacttatgagcagccagcctgaagcttgtcttggttttatcactctgtaaactgatttgctccagcgacatgtcttggttttatcactctgtaaactgatttgctccagcgacatgtggttcttacatttgaaaccctcctgagcgcatactgtagacaaatgagatacgtaagatggatgttgtatttgacagtctctgcagtttgtttatgtgattcacgttcttgtgtgctgtatcg

SEQ ID NO: 32160 - DNA, 174 bp, Zea Mays
cttcctcccttcttccctccaccaaaacgattgaagactcgcaccacgacgacggtgatccgagcggcaaggattggcaccttggggaggaggggattgagaggggggggcggctagggtttggtggctgcaagaattgagagaggaggagatgggcaggggggcggcagccaa

SEQ ID NO: 32161 - DNA, 2985 bp, Zea Mays
gccaaaccaaaccaaacaaaccatcctctccctccctctctccccgctcgcttcttgcaactctcccgtaaatctgcacaggcgcagcgcggcatttaatgctctccaacctttggtctctgcctgcccccaaacgctcccccattccgtccactcccctctctccccaccaagcaccagcccacggatgcggtcgcgaccaccgcggcaaggtcgaatccatggctagagctagcagaagcagaagcagaagccgcgggctcggcgcttgagccctcgatcctcgggggtcccggttccttctccctgcattgatcgcgtcactcgacgcgagaaggcgagcaaagaggggaaaaaaaggaggatcctttcccgtgtttcttctgtcgattctgcggttctttgcaagtggcaatgaggcggcatgggtggcagctcccgtaccaccctctccaggtggtggccgtgtccgtcttcctggcgctggcgttcgcgttctacgtcttcttcgcacccttcgtcgggaggaaagtgttccagtacgtggtcatggggctatacactccgctggtattatgtgtcttctttctatacatctggtgtgccgcagcaaacccagcagatccaggggtcttcaaatcaaagaagtatctgagcttgtacggaagcggcaaacacaagcatctgaaggaatccagaaagacttcttcagatgctcggttacaaatagagggaactagagaaaaacaagagcatgaggtcgcagcatctagcgagaggtcaattactcaatacaaggacaataatccatcttgcttgagttcaaccctctctccttctctccttctattctaccctctctcttttgttttctcctgctgccaaccacatgaaagttcctctgagcagcaagccaccgaggaagggatgtttttctgcagcctatgtgaagttcaggtgttgaagtatagtaagcattgcagagtttgtgacaaatgtgttgatggttttgatcatcactgcaggtggctcaacaattgcattggaagaagaaactatagaaggttttttattctaatgtcaactgccgttatcttggtctccatggtttgtgcaatttgggccagcttatcctacaatcagcaattggagtattggtgctagtgctatgctttgttgagcgaaaggaattctctatgcaaattgtttcaaagcttggaagcagcttctctgtagtgccttttgttattgtggtggcatcatgtaccatcctagccatggtcgcttcactgcctgttgctcaacttctttttttccacattcttctgatcaagaagggaatcagtacctatgactacatcattgccctgcgagagcaagagcaagatgatctgagtgggcagcagagtccacagatgtctcgtgtaagctcctacaccggactcagcagtgctagttcctttggtccacttcgtcgtggttcatggtgcactccgccaaggctgtttcttgaggatcaggtgtgaaccgtacatccttaggcttcttgaattattaaacagataatgttcattcccaggctgactctttatttatatgtcacatgggtagtatatctggcgaatggaagttaagttggtcacttttctaacagtcatgctaactctgagtttctaactgataactaacactagtgtcttgcacatctaactggtagcaatttcacatataagactcatcatgagctgtacgtacgattaaaaaaaagaaacatttcacatctgccgattaactcactactgacatgaagttactgaatcttctagtttgatgttattccatcggaggctgcttcttcgcataattctgctacgaagaggaaagaagaccaggggaagaggaaaaagggctcaggggccgtgaaaataagcccatgggcattagctcgtcttaacgctgaagaagtttcgagggttgctgcagaggcacggaataagtccaaagttttagtgccaatcagaaaagatgactattcacgaggccacgaaacagatagtagctatggaggcaccagcagtggtaggatcgatctaggacccgatagcaagaggagaacaaacagaagaggaagacagcccagtgatctctttctcaaacctgttgcaaagatatctacagatgctattgattctgccagcagcgacatgtccaatttagcaccattgcaacttgaggcacggagcgccttccatcccagcagggctgcatcctctgtgaatgttggtgggtcatctccagatagcagcttggattcgcctgacctgcatctgtacagagtctcagctgtctcatcgtctggagccgaagacttgcagctgacagctctcactgctccaggaagcacttcacatcaagggattcaactgtcgagatcgaccagcgatgggtatgaagcgtcagggggtgaagacagcgaccgcattccgtcacagatagtgcaccgctcgtcaaactgggcaagcatcatcctcaactctgaccagagtgcgtcctcgtctggcattcttgtgccgaagaacagattgtcctgaattcagataaatgaagattgtaaatgatcaaccaagaacgggaggttccagtatctgagctttgttttcaatgtcgaatcttgttgcagggatggcttgatactgcgcaaatcattaatttttttattagtttctgaatcgctaggtaggcaagtgtctgaatttcttccgtggggtgttcaggtgcttgtaattttgctgtcagacgacaatgaactgatttgtttagaggttggtaccttggatcaaatgcctgattagttggtgattgttcttgtggttgacttgtcggctctgacggcatgtacttatatgctgcaataggcaacgagcattcagaaagtactacatccatcctagaaaaaaatgccattatagaagactgtaatatttt

SEQ ID NO: 32162 - DNA, 1316 bp, Zea Mays
tgcttccccagtattctgctcaagccgagcaccgcagaaaaagaaaaagaaaagccaaaggcaaaggcaaaggaatcccaatcaggcaagcaaaaggaagaaccagctgctgcggccggagatgtcgtcgcagctgatcgaggagcaccggtcgggcgcggaggtgcacgtcgggcacgagctgtgcgagcgcaagtcgcgcgagttcatggtggagctgggcctccccgacgggctcctcccgctgcccagcctggacgaggtgggctacaaccggcctgacccacaccttcggctccatcggcaagcaggtgtggtacgacagggaggtgacggcgttcgtggagcccgggcggatgcacggcctcgccggggtgaagagcaaggagctcctcatctgggtcaccgccttccagctcgagcccgcggcggcggagggggaccacaaggaggaggccgaggacgccgccgccgccgccgccaactgatctgctctagcttccggcggcggcggccgtgcgtgggctgctcgatccggtagtggcagtggctttgtgagacagtcgagtcgattgtggtttcccctcctccgccatgtgcgtgtagtggatgatgatgcaggaataaacggtgtccctggatccagaactcacggttcgatccatccagtttatctcatgcttgtgtatctctatgtatgcattgcctgtttgttcgctggaatctactacttgcagcggcctcgtctcttcagatcttgggtcttcacaatgcatgggtttgtctgctacttagacgttcatgatccgtcaatttggtcgtgttttctgtgaaactggtcgcctgtgagtgtgaggttgagatcgacagctcggcatctcactcgtgttcatcaaatcaaatttagtagtaggttgtgagttactacgagctgatcaaggtggttagcattcatgtgcagtgcagtaccactacaaccacctagatctgggcacttacttgtcgaccggcagttggcatttataaatcctgtctctggtacacgccgttcggcccggctcgaaagcaacggaaaccgctcgcttttacggcacatgctatgctggtgcacagacacatggcattgaagaactccaaattagatttggttcattcatgtgaatttctgtcaagtccaagtgtcctgcttatcattgttctgcattgtatctgagagcgtgtgagttcagacgatactacagcttgtacttggagtgtgagccaatcaaaaatatgttctttatcaaagtcttgacataacaggtcttgaccgtata

SEQ ID NO: 32163 - DNA, 504 bp, Zea Mays
acaggagaagaacatgtggttcaagtggagccacgtatcgaggggttcgattcgatctaggtggcgtctcccagttgactttatggcgccaaggatggactttagttcgatctatatttatcttctattttgtaagacttccgctatgtaacaatgtcggggaccataattaggggtacccccaagactcctaaactcggctggtaaccaccatcagcacaaagctgcaaaggcctgatgggcgcagtacaggtcaaagctctgcccactcaagggacacgatctcgcctcgcccgagcccagcctcggacacgaacagcagacccaggtggattcacgtctcgcccgagggcctcctcaagcaacgggcgcaccttcgaactcgcccgaggcccagctcgggcaggcttcgcggagaagcaaccttggccagatcacctcgccaaccgaccgtatcgcaggagcattcaatacaaggattgtctgacaccttatcctgacgca

SEQ ID NO: 32164 - DNA, 2445 bp, Zea Mays
acccctgtagtctaattttttttgtccactaagctggattagtcctccaatctcattcaaatttctcaactgacaagaaccgcaaatcggagtactcgacccattccctaccccttcgagttcaaatatctgaggggtcatgggtcttagcgtgctatttccttgctgtctcctccacagcattataccaacttaccaacaaggtctaatcgccatggcttacctttatctgcctgttttgatcttccagttcatggtttgtttttgccaatccgttgacaggctaacacctgcaaagccgctcttgcatggtgatgttctcatatcaaatggtggtgtctttgctcttggcttcttctccctgaaaaactcaacttcgagctcatatgttggcatatggtacaacaacatccctgagcgcacatatgtgtggattgccaaccgtgacaacccaattaccaccaatgcgcccgggaagctagtttttaccaacagttctgaccttgtcttgttagactccacaggccacactatctggatgacaaaaaacaacatcactgcaggagaaggtggaactgctgccatcctgctcgactcggggaactttgttgtccaatcacaaaatggcactgacatatgggagagcttccattatccgactgacaccatggtccctgatgtaagtttttcattgagctcgtctgatgttgctaagcgccttgttgcctggaaggggcctgatgatccatccagcagcaacttctccatgggtggcgactcaagctcagatctccagattgttacttggaatgggacacggccatattggcggagagccgcatggggtggtgaagtgacattcggcacatttgagggcaacaccagcttcatggtgtacgaaacaatagttgacacaggggatggatactacatgaaactcactgtctctgaagggtcaccaagtatacgcttaactctggattacacgggcatgttaactttccgaagatggaacgtcaacacatcctcatgggcagttttcggacaattcccaagatgtcggagaaaggaggagctgaaatgtggtggcggagataaattcttaaccttgccatctatgaagactcctgacaagttcttgtacatcaagaacagaagttttgaccaatgcactgcagagtgcagtaacaactgctcatgcacagcgtatgcttatgctaacctgcaaaatgttgacacaacgcatgacacgacaaggtgcttggtctggatgggggagcttatcgatgcagagaaacttagtaacacatttggtgagaacctatatttccgggtccccacctcaccagtaagcaagaagaagagcactgtactaaagattgtacccgtggctacgggtacttttcttcttttaatcacatgcatatggcttgtatgcaagtcaagagggaaacaccaaagaaggaattctcagaacaatttactatgcctgaatccttccagcgaacttgggactgaaaaatctagatcttccatcagttagctttgaagacatcatcactgcaacaaataatttctctgagcacaagttgctcggggaaggtggttttggaaaagtttacaagggagtgctggaaggtggcaaggaagttgctatcaaaaggcttagcaagggttctgttcaagggatccaggagtttataaacgaagttattctgattgccaaactgcagcacagaaacttagtcagacttcttggtttctgcattcatgaagatgagaagttacttatctatgagtacttacctaacagaagcttagatgctttcctttttgatatgtgtcccaagatatcagattttggtacagccaggatttttagtggaagcgaacaacaagtaaatacaacacgagttgctggaacatacggttacatgtctcctgagtatgccatggaaggctcattctctgttaagtctgacacctatgcttttggtgttctgctacttgagattgtaagcggcttaaagatcagctcatccctaatgaactttccaagcctcatcgcttatgcatggagcttgtggaaagatggaaatgcattggaattggtcgactcatcaatttctgtgagttattcacttcaggaacttgtacggtgtgttcagttagggcttttgtgcgtccaagaccctccaaatgcaaggccactcatgtcatccatcgtgttcatgctagagaatgagacagctccacttcctacaccagaagaacctctatattttacagttaggaattacggaactgatcgatcaaatgaatacatgcagaggtctctgaataacatgagtatcacaactctagaggcgcgttagacatttcgcttcatcgttccttaaatttgtagacatttttaatctgtgttattgtacatttacactagcc

SEQ ID NO: 32165 - DNA, 1499 bp, Zea Mays
ggacagtgaagatatgggagccctggaggattgaatggacagaagaaaaatcgaggctgatctttttggggggaaacttcatggagtcgctgctactaatgctcttgagctaggaattgatgttggacatattgatgcaacattgcatcttggatttcctggtagtattgccagcttgtggcagcaagccggtaggtctggaagaagagctaaacaatcactagccatttatgttgcctttgagggtcctttagatcagtatttcatgaagttcccacataaactatttggcaggtcgattgagcattgccaagttgattcacataatctaaaggttttagaacagcaccttccttgtgctgcttatgaacatcccttgtgcgtgcaatacgatgagtgctactttggctctagtctcgatagtgtaatgacaacccttaaagacaaaggttatatcatcaataatcgagctggacctttttcttcaagcatgtggaactatattggacccgagaaaagcccttcacaggctgtaagcatacgggcaattgagcaggacaggtataaagtgattgacaagttaaatagtcgattacttgaggaaattgaagaaagtaaagccttttttcaggtttatgaaggtgctgtttacatgcatcagggtgccaattacttggttgaggaacttgacttggcatcaaggacagccttctgtaggaaagctgatttgaaatattacacgaaaacacgagactacactgacatcaatgttctcggaggagaattttatatgtagaactaatcgggtgaagacaactgctcaagcaaatgactgcacggtgactactaaatggtttggtttttatcgcatatcaaaatctagcaatacaatatccgacagcttcgagcttaacctgcccccatactcctttacttcccaggcatatgatgtgcagtgcttctgacctaggaacagagtgcgctaatcctcatgaaagccgtggcatcccagacagaatccttttatatgatagacatccaggtggtatcggcatagcatcacaggcccaaatgctcttcgaggaactcctcctggctgctttagaagtcgtttccacgtgcaactgcacaagtgccgttggctgtccaaactgcatccaatcactgacgtgcagcgaatataacgaagttttggacaaggaggcagcgattttgattctgaagggagtaatcgactacgagagatcgtattttgaagcggaagacgcttctcagcgaagctgctgacgtcgaggctacagtaggcagcgaggagtgacgtgttcattactgtttgttcgtttggtgtttctctcgtgtatgtagatgggagaggttcggtctgtatctgcactcacatttgtagcctcgtcatatcaaagttgatatcatatcctacgacaatcaggtccatacatctgtacaacagtacaacccaaacatgtgagagctactggcga

SEQ ID NO: 32166 - DNA, 2346 bp, Zea Mays
atcccgtctcccctccactcgtctctccgttcggccgtgtccagtctccagtccgcaacggaaggagaggaggcgtcgagggaaaatcgcgccaaccgggccgaacgaatcgtcggaaggccggggaggaggtctagaaggtgtgggaatggcgacggggcttgccttggcggcggcgcctcatgttgcttcggtcacgggatcggggacagtggaggagcaggcggcgggggtcggcatcttgcttcagatatcaatgctcgtgctctcgttcgtgctcgggcatatcctgcgccgccgaaagttctactacatccccgaggccagcggctcactcctgatcgggatgattgttggagggcttgctaacatatcaaacactcagaaaagcatcaggagatggtttaattttcgggaggacttcttccttctctttttactgcctccaattatattccagtccggattcagcttagcaccaaaaccattcttttcgaacttcgatgctatcataacatttgcaatcctgggaaccttcattgcctccattgttacaggtcttttagtctaccttggtggattactatacattgtctacaggctcccactggtggagtgtatgatgtttggtgctcttgtatcagcaactgatcctgtgacagttttgtctatatttcaggagcttggcactgatacaaatctatatgcactggtttttggagaatccgttttaaatgacgctgtagcgatatccttgtacaggtctatggcatctatgaggacgcaccattctggaaaaaactttttccttgtaattctgaggtttcttgaaaattttgttggatcaatgtcatcaggcattggtgttggactaatttccgctctcctcttcaagtatgcagcactgggcgttgagaaccttcacaatctggagagttgcttgtttgtgcttttcccatacttctcgtacatgctagcagaaggcattggtctatctggcattatttctattctcttcacgggtattgtgatgaagagatacacattctctaacttatcagatgattctcagcgttttacagctcgcttttttcaccttctttcttcactagcagaagctttcgtgttcatatacatgggatttgatattgcgatagaacgtcaaagctggtcacatattggattcatatttttctcaattatcttcatactagttgcaagggctgcaaatgtcttctcttgtgcatacatactgaatttggcacgacctccacattgccaaatacctaggcaatatcagcaggctctttggtatagtgggcttagaggagctatggcttttgccctcgctcttcagtctgttcatgatcttccggatggacatggcgagacaatttttactgctaccacatctattgttgttctaactgtaggttgctgggtgtaattcttcccacattatatcaaaatgaaactagaatatttgtatggtaatgatttggatagtacgcctatgatttttgttatcctacatcagaaggccttgcttgagtattctacttgatttgaattgaatttattcttgtggagttcctttcaaaattcctgcgaagaacctccagataggcataaataacgcttgcatggcaatgttcaaggtactccttattggtggctcaactggaacaatgcttgaggccctacaggtagttggggacagcaaccgttattgccaactgtatgaggagagttctaatggcaacgacactggttacacgggacaaaattatgatgaaggagcatccacttcaagcaaattcagatctaaacttagagatctaaggagaagcacctcgtctttcgctttactggacagaaattaccttactcctattttcacttcgcaaaacggcgactgcaatgataacactacagaaagtcccaatgaagaattgacgatattcagaggacctggggatttggaggtacatgattgatgactgcagatatgaagtgcttatcttccatgaatctacacgatactccttgtaccttcctcggcgacccaaagtggaaagtgcaaccagacattcggccatagcattgccatattattaatctataaacattagttagctaggatagttcaacgtaagtctttgtacgtagaatataggtgtaatttatcagccttgaaattctgttctgatccgtttcagaaactttgtgcgtacggacgcatctgccttcttgtgcacctgcaacactcgtaggttccttgaaatgccttcttgtgcacctgcaacagtgcaggttcctccaaattgaactcgcccagatttccgg

SEQ ID NO: 32167 - DNA, 2189 bp, Zea Mays
ggccaggtgcctgcctccatctccctcctccactcgggtcttcacgatgccgccgccgccacacgacatcgcacatccgctcttctccctcccctcgctctcggcggtcgacgtccgctcccctggtgccatcgcttgtgcctggctcccgccatcgctggctccccgatggacctcacggctagtgtggggccatggatccccgacggatcgagggtcgcgccgcctcatgaggtcagtgagcccgcccacactctactttcttgctccttgttctacgagcttcggctgcgctgaggcggtcatggtcgctgttcatgtggaattagatgtgagagaaggagcgtgcagcgccgccgcagctgtggactcccatcataaaattcgaacatggagaaacttgaaccttttctaatgcaacattcatgtgttggtattctattttggtatattatagattttgcaggacaagttaagatggagttggaagttgaggcatatattaggcaacattatgaaggggaaatttctgacatagaaataattgagaaagaggatttagatctagtttttcacttgctctgcatactaaatctaatattctgtttgacgtccataatgaaatgatgtcatggcgataagtttggctctgtttaattgtttatgtctaagatttttctacaggaattttgatcttcttaggtttgtgtcgttgtacttgtttatccattgatggccatccttgtgttatagccatagtgatgttcatatatctctagaatttagctgaagttgaatgctttatatgttcagacttcaattttgatattaaacatgtagattatcgttatttaaatatgagtaagggagatgccaatgtgctaattgtttgtttcttttttctgccattttgatgtgcctgtgccaggtgtagaatataacttttaacatcccactcttgttgcagaaaattcatctttctggctcgaacagaaaatacctgaagcttcaatttgacgtcgtgtagcaatgaatgcgtgcaaggaatgctcttttacatgttgagaatgaagaaaaattagatgtcgtggaggcatcccaaaacatgtactttccattttgcacattttagtccaaggttcaatacaaactttctcagaaaactatctcaaacactactaatcgttgttggtctgcagggtttcaaattaggacttagctatttttccatcagcctgaaacagcctaataatcttactttgatcccttgggaaaaaatgttcttattattttgagtttttgacctatagtcaggtctagaacatacccctgacatcacactactaatctgggacaaaaatatgtagttctccaaaagaaaattgtttctaatcctgccttgaaaatgtttgctgaaatactatttggtaaagttgctgaaatactgtttatgtatatttctctttcaaattattataatttggatgcgctccttgtttgagtgctccaaatctgaaaaccaagaaggtaagaaaatgtaaaggcattggtccaatcagtaattccaggcatatttagggcacatgcatttaggagtccaagtgtccaacattgctagatcaataagaaataaagattgatgatttgaaaaaaactgaagtagcttaaataaattgtttgattgacaaattcagatagctgtacctttgaacttcctcttacttggaggactttcagtgtttcttctatctgcaggaatgtcctcaggaggcttggagccttcatgctggtcaatcttcccaagaagaaagctgcagccgaaacagtagccagctgaacatgctgacatgttattgcgggtggtcaaggctcaggattcagagcagaagatacacataaatactggtgaatgatgccatcgacgatgatgaactgatcaaacgatggatgatgccatcgatgaaagatggaatggaactcaaatttgggtggtcgcacaagtgtggagacttgaatttatatatacttagtctcaatgttagcacaaacagttgatgagcaagttttcccattgtattttagtttgaatttagagtacacttatgtaagagttatttgacaatgcttatttatgagatattgaatgatatttatatatattaaattaattataatgttattaaatatat

SEQ ID NO: 32168 - DNA, 2600 bp, Zea Mays
cttcaagtccggcaagcccgacgccttctttgacagtctccctttcctggatacatgctcgatgctcctagtaaacactaaacaccgtgcgtgatgttctgaacatctatctatctctctctctgagctagatttatgtggtacgaagaaccctcctgttcagatgggcctatgtatgatacgtgttgctcactcgcttgctcctcctcgcagtctcaatggatggatgctgtcgttttttgcctttgcccgccctgaatggctgctgcaaagtctggaactgaaacagcttattaaggcagattaagcaagagctcgctcatcaccattaatcagttgtgctgatcaaacagacgaacagtcagatagacaggcaaccagaccatctgacctggatgcaccattaattgcaggttcggtcgcactcgcacgggcgtgtaccaaggcttcatgttcagcagcctgacggtgctgatgacgacggcggaggcgtgcaagcaggtgctgatggacgaggacgcgttcgtgacggggtggcccaaggcgacggtggcgctggtcgggccgcggtcgttcgtggcgatgccgcacgacgagcaccggcgcctccgcaagctgacggccgcgcccatcaacggcttcgacgcgctcacagggtaccgtgccgtaggtgctcttccccatgatttcggcggtggcgcacagcaggtcgtcggccgtgaacgccagcggcccatcaaagtgcaccagcttgccgcccacatcgccaccggactccacctccgccgccgacgaccacataggggcggcgacaccggttctgacgggagaagaaaacggcgcgcggacggacagcgacggagcatgattaatggttctcctcaacggctaataacgattcttcaggaaagttttactcttattaaactccctgacatcgtccaaggaagcaagtgatttcattatgaaagattggtctattttctccaaatttgatcataatggagcttacctccccatgttgccaatcgactctccaatatctcatgatgttgggttaggattgatatcacaagtcggaaacttagttgaatgttcatttcaacatccaaggcatatatgtgctacggggagtggcacagttcaggaagcattcagctgtttgaacaagtttgctgaagctttctatttctggttttctagagcatcgaatcctaagctattccaaaggctatcagctgctgcaggctcaagttcaagagtttgtcggtcacacataaagcaagtggcctcttgcttgcagcatttaccaggactacagtttggttcacaattaagaaaagatcatgctgtacagatgcttttagcgaggcttgcaagcacaacttttggacgcctgtggacggaggtggaggagcatcatgcctgcaacatccttatgttggctgccgctactgtagtaccaccatttgaaaacatatgctggctgagtcaatggcactaagaaaagatggtgggaacatcccctgctggacagtcatactcggaagaaatccgtccaggttgtgcgtgtgttgctgtgccaagagtactcttgcgagaagatgtaacagaaccgaaaactggcatcaagttccccactctacttaaagacaattccaatctgactacagaggtccttgttggaatgggtttcagaagcatgcgaataatgagggttaaagatctgaatctttatgcctttggattatatatacaacctgattctgtttgcaaaaagctgggtccaaagtatgcttgtattccagatgctgagttgaaggatcacccagatttctatgaagatcttttgagggaaaatattgatatgactgttaggctagtagtaagctacaatggcctcagcattggcacagttcgagatgcatttgagaagtctcttgccttccggctgaaaaagggtacaaagatagacttccggcaaacatccgatggtcagctaataactgaaattgatggcaaacaaattggcactgtccacagcaaatatctctgcagaaccttcttcgatatgtatattggtgacccccctgtttcagttgagaccaaacacggcattgcgcaaaatgtggctggactcatgagaagatgctaggaaaacagggaaaccaaaccgaagaactcggaactatttcctccatctatacaaggagagatgtacatagaaaggaagccaggagaggattgattgtatttttagtggtagacagcgactttgtatgctgtaattaacaggcagaaggtttcgacagacaggcctggcatccttagcaaatgcctcctatgcttctcatatggtatggcattttgccatttcctggttcgctgggggcactgtatcatgagcatatccaagagcttctcagaagtctcccctaaattatgttttttttttgaaaaatggcggttccttttaccaatcattctcactaattttttaaatgtcccttagaactgattttcaggagttattttgtacaacaggaggatgtttctctatcccaagtcaaaaaaatggcggggttcagctttgtccctac

SEQ ID NO: 32169 - DNA, 3281 bp, Zea Mays
aaaaaaaacagaaacccgttacccgactcgactcgtctcttcccctccagtctccaccgagccaagccagcctgctccagcggcagacccgctaccgatctcctctgccgcggcccgcggcggcggcgatttcccctccgcgaatgccccttcaccgctgcagttgatacgccacccaagtggttcgttccacccttccttccctcgccggtctctccatcgccgcagcccgcagggcgccaccttgtcggaaggcgcgatccatggaccgctcgatcaacttccgcggcatcgccgggagcgccggaaacatcatgcagggaatggggaaattcgttttcggcaacgaggggatcgagtcaaaggaagatagctacgtcgagagatatctttatcggataagcaatggcacgatacctgatgaccggaggtctgcaatgactgagctgcagtctctagtggcagaaagccgctcggcacagatgtcgtttggagcgatgggttttcctatcctcctcaatattttgaaagaagaccgtgaggatgtagagcttgtgagaggtgccctggagacctttgtgagtgcattgactcctattgagacgtcacaagggccaaatactgaggttcaaccagcgtcagtgaactctgatctgctatctcaagaaaccgagaatatttctcttcttttgagcttattggtgattactcatcttttgccttaacaacatgtaacctgcatcgcctgcttcatgtgtactgagtcctggcttattgctcctgtctggtttgaagtcagaggaagacttttatgtgagatactacacaatccaacttctaacagctctacttacaaactcgctgaaaaggttacaagaagcaattctattgattcctcgtggtataacagttctcatggacatgcttatggaccgtgaggtcataaggaatgaagcactgttacttcttacttatttgactcgggatgcagaggaaattcaaaaaattgttgtatttgagggtgtgtttgagaagatatttagcattattagagaggagggctattccgatggaggtgtagttgttcagatgcttttgaaagagacaatgggctttgacccattgatatcaatactaaagattaggagaggcagtgcatttaattttacccaacagaagacagtaaatcttcttggtgctttaaatactgtggaattgcttttgatggggggcccatctggtgaagcaggtaaagacgctaacaagaatgcaaatcaaactgcattggctcagaaaaacattctggaccatcttcttttgttgggcgttgagagtcaatgggcccctgtcgttctccgctgtatggcactgcgatgtattggcaatttggtattaagaaatcctcagaatcttgattctcttgcaagaaaacaagttggagaagagcctcatgttcaacctgcactgaatgccatcttctctataatcttgcggacctctgtagcgcaggaatttgttgctgctgattatgtattcaagtgtttctgcgagagaaatcctaatggccaggcattattagcatcaactattgttccacatccgaaccaaggaaatatgcatgaacctgctatcgacatgccttttggaagtgtacttctgcaagcactggtttcaagtgatgtcaatggagatatggaggcatgttgcagagcatctagcgttctttctcacattgtcaaggacaacatgcaaagcaaggatcgtgtattgcaaattcagcttgagacacttacaccgtccttggggcgcactgagccagtattgcatcgtattgtcacatgtttgtccatcgcagcctcaacagagggagaaaacaaccaaaacaaccaaccagaagaaccgtacattcaacctgttattcttcggctactcatcatatggcttgttgattgttcaaatgctgttaactgcctgttggaatcagcagtgcatctgaactacataatagagcttgcttcaagcaaacgttacactgcttgtgttcgtggactggctgctgttgttctaggtgcttgcatcctgtacaatgctagccatgagaagggccgtgatgcttttgctgttgcagatgctataagtcaaaagattggcctcacaacgtacttcttgaggtttgacgaattgaggagaagcttggcacatcctttgccagagcagcatcatcgcaaggagctttcccgatcaagtgcgaatagcatgtcagatttccaagaaattgaagaggatgaaacaaataaagatgatcaacaccctgtcctctcagaaatatttgattcacagtttgttaattttcttagtaagctcgaggctgatattagagaaaacataatggatatatttagtcggacaaaaactgcaactgcactccttcctactgaattggagcagaagaacggggaggttgatggagagtatatcaaacgactaaagtcgtttgtagagaaacagtgcaatgagatgcaggacttgctggctcgaaacgcaatgttagcagaagagttagtgagaactggtggtggtaccaccacagatacttcacagagaccgaacaacgggcgagaaagggtccagatcgaagccctgagacaagaactggagggagcgagacgacagatagaggcactcgaaactgacaagtcccagatcgaagccgaagctaacaaccaacgaaaccttgcagtaaaactggagtccgatctcaagagcttgtcagaagcttacaacagcatagagcaggccaactaccgcctggatgccgaggtaaaaaccttgcggcagggaggcagtgtgccgtatcctgacgtggaggcaataaaggcgcaagccaaggaagaggctgagaaggacagtgaggcggagctgaacgatctgcttgtctgcctcggtcaggaacaaactaaggttgagaagctgagcacaaggctggcagagctcggcgaagatgtggatgcccttctgcaaggtattggtgacgacactgccattccggacgatgatgacgacgacgatgaagatagtgaagagtgatatgtttatgtaaccctgtaggtctgttggtgcacacaacctcacgttgggtcatgatattgtaatggcaattggcattgtacagtggataatgtgtagacaaaggcaccgttccaatttaagttatttgtggagaaactagttgaaaactaagtggcggaccgtccggtcccggacggtccacacctcgcgat

SEQ ID NO: 32170 - DNA, 1171 bp, Zea Mays
cgaggccttccttcaatggcgcatggaaggtcgtctgttattaattggtgcggccacggacgacaccatggctccgcccgacgccccctctccccgcaactcgcaagcccgagattgtcggcgttctcgcacccaccgatttggcctgcttcccccaggattgccgacgttctcccccctccccgtcgcgccgcgcgatgccagtcgtgattcccgcgtccgcccgccccacatctacaaacttgctctgcagatgccctcccgcccatcgtcatccatcccctgtcgccgccacggacgaccttcctcggccgccaccagggggcttctgtaagcgagcgcgcaaggggagttgtaggcgagcgcgcaggggggcccgcacacgacgacgcccgcgaggatgctggaggacgaagagctgcagcgcggacaaccatgaatccgagaacaccgcgagcacggagagctgcggcgggcgcggtggcgccgtcttggggctcttgttcacggggaagacggaggggtggatggacgcgagcaatgcggcggcctcgttgtacgcctggttgggccgcttccgcggcgcgcgagcccacttgagcgacaccgacgtctccgacgatgatgaggcgttggacacctctgacgacagcgtcgacgacggcaacgagtagtgcgtcgggcacaacggtgacgagtgcgcgcccaccggtgacgccgccgccttcaccatgtccaggtccagccgcaggccggtcggtatgcaggaagacgactttgcaccgcctcaggcacgcaacaggtaccgctcaaacgatcgccttgcctcgcccccgccctcgtcttcttgtaagggaaaacgagcagctccagctattctcggattagctccagctattcttggattagagcctccgacgcgctctttttggcctagaaacggaggaggcgatgcggcgccgtctcgcccgtcaaccgacggtcgcaccaatgagttccacgccgccacgctgcaccttcctcatcgtcggtgtcctcctcgaacctggtccgatcccttcccctgcagtaaaggctggggtgccattcttcctttagagttttccatgtgttcttctttcaagtgaaactgtgtttttcattcatacatgtagtaaaggctgtaaggctg

SEQ ID NO: 32171 - DNA, 6448 bp, Zea Mays
caaaacacactccagactccactctcccacggagaaaaaacaaaacaaaacaaaagaaatacgaagcctgagcctctcagccagcaccccccaggcgaaaagggaacgaacgggggcggagaggaaaaaagggggtttggtttttattggctgcacacaatggcagcagcgatccgaacccaatccccatctccgcagcgcgtgggtaataatcccagttcgagcagtcgccacacgcccgttgctgctgttcctggcttgcggcttcgccaatctccgccacacccctatcctttcccttcttcgtcgcctcacccaccaccccatccgctgcggcggtgttcgtggtgttcaagtaattgtttttggtggtgtcattattccttttcctcctcccagttcaagccatcggtgctgggtattcttcgccacggggatccagccgcacatcgattctcctttttccaccccctcgctccgcgacgcggggtataatagcgactgcgaggcatttggtgcgggcagacgctacgaggtggggtgagaaaagtttctgcgccttgctttgcagaaggtgctcggatctaggtttcaaggccgtcgatcgccgccatggacgccggcggggacgaggacggcgccgggaaggcggcgctggagagcactgccgaggccgcgaccctgccaccggcgtcaacagtggcggtcccgtccccggtcccggcttctgcgcctggggcggccacggggacctcagggtcgggggagaagccggtgaagcggatgatgaagaccccctaccagctcgaggttctggagaagacctatgcggtggagcagtacccgtcggaagctatgcggctggagctgtcggcgaagatagggctgtcggacaggcagctgcaaatgtggttctgccaccgccgcctcaaggaccgcaagccaccgtccaagcggcaacggcgggaggaagagtccgcgctagtaccagtgatgcctccaccgccagtgttaccagcacctgtgatgcctctggcaagcagtgaccttgtggtgggtgctcctgggccgtatgatgagccgctgcacccacttcactcgcgaaggggtgctgggcgtgggcggtcctcagcagtccccaggatttccatgccggatattgggaggaggtattacgagccaccaccaattatgatagcgccgcctatcccgtcgatgcagctcacgcaatatgagctccgtgtgattaattctgtggagtcacagctcggggaaccattgagggaggatggtccagcgcttggcgttaattttgatccccttcctcctggcgcctttggtgcaccgattgttccagagcaacaaaagcagcctgtgcgatcttatgatgcggagatattttcttggcatgatcaaaaactcttaaaggcttcagcatttttacctaatatggaatccccatttgttccaaattcgtttactgggaagagaaaatcaccagttggtaattcagccatagttcaacctcatgttggatcacgggctgttcatgagtatcagttccttcctgagcaaccaagtgatacatatgagagggcaacccgatctcactactatgacactccagtggaagtttcaaatgctaggataccttctatcacatcaggatcacaacttctccatggatctgaggaggctgcgcctagttatgcttttcaaggtcacacatctggttctagcctgttgcctccgtccagcaggccccaagtgtttccagcagcaccaacagattatgagatgactcagtctaatagcaaccttagttctgttcctgttgaaggacagtttgatatttctcaggttgctgcatttgaaaacccacctgtatcatctgaaataatagcttatcatgatgaagatacttctcgcgtggaaagaaaacgaaaacatagtgaagaagcaaagattgcaaaggaagttgaagctcacgaaagacgaattaggaaggagcttgagaaacaagatatgttgaataaaaagagagaggagcaaaggcgcaaggaaatggagagacttgatcgtgagagaagaaaagaggaggagagattactgcgtgagaggcagcgagaagaagagaggttccaaagagagcaaaggcgcgaacatgagcgtatggagaagtttttgcagaagcaatctagacgagcagagaaacaaaggcaaaaggaggaactccgaaaagaaaaagaagcagcaaggcaaaaggctgccaatgaaagggctactgcacgtaggattgcacgggagtatatggaactggtggaagatgagcgtttggaatcaatggaattagctgctcaaaacaaagggttgccctcaatgctgtatcttgacagcgacacattgcagcagcttgattcctttcgaggcatgctaagtcaatttcctcctacaacggtgagaatgaagttgccattttctataaagccttggactggatccgaggataacgttggaaaccttttgatggtgtggaaattcttaattactttcactgatgttctgggtctttgtccagttacacttgatgagtttgttcagtctcttcatgattatgattcaaggttgttgggggaactgcatattgctctgctgagatccattataaaggatattgaggatgttgctagaactccatcaattgcactgggggtgaatccaggaggtggccatccacaaattgttgaaggggcatatgcctggggattcaatatacgtagctggcaacgccatcttaatcttcttacatggcctgagatattaagacagtttgctttatctgctggttttggacctcaattaaagaaaaggaccgtagaagattcttactatcgtaatgataatgagggtcatgatggtgagaatgttatattgacgattcgaaatggtacagcagcagtgaatgctgctgctaagatgaaagaaagaggttacaccaatcgccgtagatcccgccaccgtctcactcctggaactgtaaaatttgccgctttccacgtgctttcgcttgaagggagcaatggtctcacaatattggaagtagcagaaaaaattcagaaatctggattgagagacctcacaacaagcaagacacctgaggcatccatagctgctgccttgtctagggatacaaagctttttgagagaactgctccttcaacatattgtgtgaagtcgccttatagaaaagatccggctgattctgaggctgtgttgtcagcagcgcgtgaaagaattagggcttttcagaatgtgctttctgactctgaagctgaaaaggaggtagatgaagctgagagggatgatgattctgactgcgatgatggtgatgatgaccctgatggtgatgatgtgaatactgaggtggaagacgacaaggatcctcttcttgctgtcaagtcacaagatgaagtaccgagtacaactacagttattggcataaaggccaatttagatggtgtgggtaatgcattgaactcatcaagtagttttactaaatcagcaaaaggcgctcctctcccttctttaggcaggtccaatgcagcagatacttctaatgatttgcctcttggagtctcatcagctaatcatgaagtagtacctgatgattctgaaaatacacaaattgatgaaagcaatcaagccgagccttgggtacgtgcactagcagaaggtgactactgtgaccttagtgttgaagaacgccttaacgcactggttgctcttgttggtgttgccactgaagggaactctattcgtgctgtacttgaggagcgtttggagttagcaaatgccttaaagaagcaaatgtgggcagaagcgcaacttgacaagaggcgtttcaaggaagaatttactagcagagtacaatataactctgacatgggtttgaagcctgatatatatcaagaaaacaacgtgacagagattacttcaactccagcgtgtgatgcttatagagagaatgatgaacatgtcgggacaatcaacaattgtgagatgcttgatcagcataatcagggtaatgctggtagtctaccttatgagagaaatggcgtatgccaggaaatcctcgcaaccccagatacttcgtatgttcagcagtatgcttatgctgataaaaggcgatctcagttgaaatcgtacattggtcaccgggcagagcagctttatgtttacagatccttgcccctaggtcaggatcggcggcgaaacaggtattggcagtttacaacttcagcatcaccaaatgaccctggctcaggaagaatcttttttgaatccaaagatggatattggagagttatcgactcagaggaggcctttgattctttattggctgccctcgatacacgtggcacccgggaggcacagctgcattcaatgttgcaagtgatcgagccaaccttcaaggaagctattaaaagaaatgtgagtatagaattatctgctggaaggtatccaaagaatggagctactgacatgataagggcaaattatcacagtgaggttggaagctcaagcagtactcctagtgctacatctgacagtataacagcatattctgattcttttaaagtagagcttgggcgtaatgattttgagaagacagctatctcaaaaagggcagatatatttttaaaatggatgtggagggaattctacaatcaggaattgacatgtgccatgaaatacggcaagaaaagatgctctgaattgttgcattcgtgtaattgctgctatcagatttacctagcagaagaaaggcactgttcttcttgccataagactttcaaatccatttacaatttttctgatcatacaacacaatgcgaagagaaacagagaacagaacctttctggaacatgcaaaacactgattattctgtcccaataggaatggtattactcaagcttcagttagtttcgattgaggcatatataccatcagaagcacttcaaccattttggactgatgtgtatcgaaaatcttggagtgtgaagctgtacactaccaaatctattgctgaaatattccagcttttgactgttctggaaggtgcaataagaccagattgcctctcttctgattttgaaacaagtgagtgtctaaactcacaggttggatctgcttctgtccttccatgggttcccgacactacttcagctgttatgctccgaatgttagaccttgactcagctattttgtatgttcaaaatcaaaagatggatagagatgatggaggtttcatgaaatttccgtcaaggtatacagttgctaagagcaaacaagaaacaacacctgaaacagctggtttggatctgtatgatggaaggtggcttcctggtagtggccgtaggggtcgtggacgtggaagtagaggaggtagcaggggaggcagaggtcgaagtcgaggtggaaggatcccaagaggtgttagcagctcatcaaggatcgagttcaagggtggtattgttgcttctgataaagcgccaaggaagaatgtacgccgagggcgtggtcgtggtcgtggtcgtagacgtggacgtcgaactgtgaggcctcggcagccatctgttggcagagccagatcaattccaaaggaaaatttgttgggaagctttagcatgcttagcagctcaaaggctgctaccattgaggagtctccacgaagctctggcgcagacgagtggggcttggagaccagaacgacatacactgaatgtgatgagaacagctctggatcacagtcagaagataacgaggaaaatggccagcccatggatgatgattatgaagatcaagttccagattactcaataggctattctaccggctcgaggcaccatgtaatgatgtccatgatggaccatgatagtgacgaggaggatgaagatgctgaaggtgatgagaatgtggaagaagatgcagaccttgcagttgacgatgccgatgttgagatggacgaagatgatgaaattggtgatgatggagaggatggtggcgttggaggggagatgaatgcggatgaggatccggatgctacttcatattcatccgattacagcgactaagaaagcagaaataagggaaccttatcccagattcctccctcggcatggaatgcatgtagtaccgagtaggcattcccccccgttgtgagccaaaagggagcttagatgcttaggttcgaaggagcgaggaactgttttttaggcaccgcaggttttaatagaatttctgacgcattcgacgaagtgtttggttgtaccgtggtagttgtgttactggggaattccccgagttattatacaatgtgttaagacaaaatactgtcatatcgcatctggttgccatgcgtctaactggttcacggttttaccgtta

SEQ ID NO: 32172 - DNA, 572 bp, Zea Mays
atggcgacaccgtcgtcgtcgctttgctccagcttcgcctccctgcggaccgcctccatcggccaccctcgcgacatcacgtcatctacgcccaggttggtggagcatttgcttattttggccaaaagactcaagtttaccatcaaaatttccttccctggcgcaattgctattcaggcattgccagaaatagctcaaaagattacatggttggagaatgaagataccttgcttgattcttctggcgagaaaatcatttatgagatgatgagaccagagaggactttgttgtatttggttcctggaaggctggcccggaacccagggtctacacatcttataactgaaaaacacatgagcagcaagaaggtgagcaagaggaagcacgctagaatcattgacaagaagattgccaaaaagaagtctgaggctgtcgagtaccaaaagcttcttcccataggctcaaggaatagagaccgccacaatgagagcttggccaagagaagatccaagctttctacctctgccaagtcttcctctggcacctccgcttaagaatgttcagtgctttt

SEQ ID NO: 32173 - DNA, 1046 bp, Zea Mays
cgcaaagccgcggcgacaaccacttgtttaagccgcgacctgcgtcccagcatcagtcagtgcatcagcattcatcgccccctgcctccccttccattcgccctcctcccactccaccagctcctgcctgcctataaacccagggccgccctttgactctccttccctgtccagtggcggggccgcttcccttgcgttcgcggagagtctgtctgtctgtctagctagctagctagctgccgagagcgtgaggaggaagggggatccatggcggcggagaacgaggagaaggagacggcctgcgcggggtacaagcacgggccgccatgggtgttcaaaggcagcgcattgtaccagctgcatttggtgaaggcgtcgacggcgcgggccttcgtgccgcgggacctccgcctggttgaggccttcggctacacgctcggcggcatgttcctggcgcgctaccacgacagccctgccggcgaattcgacgagctcgtggtgatcgccggcattgtgtggaacccgccgacctcctgcgcgtgggctgccagggtgctggtgaacagcgtcgaagcctgccggcacggccgcaaggaggtaggactgccaagccatgtcgccacattctcgtcaaagaacgaggctgcttcgcttggggatagaccgttggctagaccaaacagcttcctcaacatgctggggatcgggtcgacagccttcgagcaagggaatggccgcgagattgaggtttcagagtccaagggcggctcgtctactcggcatctgtgcaacatcagcctgccatttaccgcaggatcacataaggaccaccagtgggcgggcccagcaatcagaatgtcactcccgagtttcagcggacgtacagtggaccatcctgatcttctcaagtactcctgtcaagtagaatgcaggtgatgacaaaaaacaaaactctgtgaacgtcctgggctagtgagctatccattgatggcgtacgatctacccgtattcgacgcactgttgacatgtttccttccacagggtgc

SEQ ID NO: 32174 - DNA, 4129 bp, Zea Mays
taaaccctacctcgccagtaatggcgggaactccccagtttcagtccccgcacttcccgcctccctctccccctctcggtcccaccttcgtccctccggcgatgaactcaggcggacgcggcggcaagcggcggggtcccccgcccctcgctccctccggtgcggcggcgaagagggtcaatcccagccccggcacgccgcatgtgcctcctcccgcgtcggcggcggccgccgtggaggaggacatgatggacgaggacgtgttcctggatgagtccatcctggcggaggacgaggcggcgctgctgatgctccagcgcgacgaggcactcgcgtcccgcctcgcgcggtggaagcgccccgcaatacccaccgacctcgccgccggatgctcccgcactgtcgcttttcagcagttggaaatagattatgttattggtgagagccacaaagaattactccccagctcatctggttcagcagccatactcaggatttttggtgtcaccagagaaggccacagcttatgctgtcaggtgcatggatttgagccatatttctatattggctgtccttcagggatgggtcctgatgatatatcacgctttcatcaaacactagaggggaggatgaaggagtcaaatagaagcagcaatgttccaaggttcgtgaagagagttgagcttgtgcagaagcagacaattatgcattaccaaacacaacaatctcaacctttcctcaagatagtagtcgctctgcctaccatggttgctagctgtcgtggtatcctggaaaggggcataacaattgaaggccttggttcaaagagttttctgacatatgaaagcaacattctttttgcccttcgtttcatgattgattgcaatattgttggtggcaactggattgagcttcctgctgggaaatacaggaaagcagcctgtatcatgtcctattgtcagctagagctagattgcttatactcagatctggtaagccatgcggctgaaggagaatattctaagatggccccgtttcgcatattaagttttgatattgaatgtgctggtcgcaaaggtcatttcccagaaccaactcatgatcctgttattcaggttgagttcattattcatgtatctgatactcgttaccatttagtttcaatacagatagctaatttggttacacatcaaggagaagaccaaccttttgtacggaatgtcatgactcttaaatcctgctctcccattgtgggagtcgaggttatgtcatttgatgcagagagagatattctacttgcatggagggatttcatacgtgaagtggatcctgatatcataattggatacaacatttgcaaatttgacatgccctatcttattgagagggctgaggttctcaagatagcggagtttccaatacttggccgaatcagaaatagtcgtgttcgtgtccgtgatacgaccttttcctcgaggcaatatggtgtgcgtgaaagtaaggatgttactattgaaggaagagtgcaatttgatctcctgcaggctatgcaacgggattacaagttgagttcttattcattaaactctgtatcagcacactttcttggggagcaaaaagaagatgttcatcattcaattatatctgatcttcaaaatggaaacccagagacacgaaggcgacttgcagtttattgcttgaaggatgcttatcttcctcaaagactgttagataaattgatgtatatctataattatgtggaaatggcgagggtcactggtgttcccatttcgtttctactttcgaggggacaaagtattaaggtcctctcgcaactactcaggaaagcaaaacagaaaaaccttgttataccaaatataaagggtcaagggtctgggcaagatacctttgaaggtgcaactgttttggaggcaagggctggattttatgagaagcccatcgcaactttggactttgcttctttgtatccatccatcatgatggcatataacctttgctactgtactttggtgccccctgaggaggcccgtaaactcaacttacctccagaattcgtcaataaaaccccatctggtgaaatatttgtaaaaccagaactacagaagggtatacttcctgagatccttgaagaactattagcagctcggaaaagggcaaaagcagatttaaaggaagcgaaggacccactcgaaagggctgttcttgatggtcgtcaacttgcactgaaaataagtgcaaactcagtttatggtttcactggagcaactgttggtcagttaccttgcttagagatttcttcaagtgtgaccagctatggacgacagatgattgaacatacaaaaaagcttgttgaagataaattcacaacagtaggaggttatgagcatactgcagaggtaatttatggggacactgattctgtgatggtacagtttggtgtttctacagttgaagatgcaatgaagttaggaagagaagctgcagattatattagtggaacctttaccaagcccatcaaactggagtttgagaaggtctattttccttaccttctaatcagcaagaagagatatgctggtttgtactggacgaatcctgagaaatttgacaaaatggatgcaaaaggtattgaaactgtaagaagggacaactgtttactggtaaagaacctggtaaccgagtgccttcataaaatactggtagaccgtgatgttcctggtgcagtccaatatgtcaagaacaccatatctgatctattaatgaatcgtgtggacttgtctcttcttgttataacaaagggtttgacaaaaacgggagaagattatgcggtaaaagctgctcatgtggagcttgctgagaggatgcgaaagagagatccagctactgcacctactgttggtgaccgtgttccttatgtaataattaaagcagcaaaaggggcaaaggcatatgagaaatcagaagatccgatttatgttttggacaataatatacccattgatcctcaatactaccttgagaaccaaattagcaagccacttttgaggatctttgagccaattctgaagaatgccagcaaagagttgcttcatggaagccacaccagatctgtttcaatctcaactccttccaatagcgggataatgaaatttgcaaagaaacaattaacttgccttgggtgcaaagctgttatcagtggtgccagtcagacactttgctcacattgcaagggaagagaagcagagttgtactgcaaaacagtagcaaatgtttctgacctggagatgctctttgggaggctatggacacaatgccaggagtgccaaggatctctgcaccaggacgttctctgcacaagtcgggattgccccattttctatcggcgaaggaaggcacagaaggatatgaccgaagctaggctgcagcttgatcggtgggacttctgagcttggaaattctcacatggctgcctgcgtctgcttatattgctgtggaagacaggaagctaccgtcgaccgcatcataatgcatgtgaagatgagactggacttctgcgagcatccagtcacacttgcgtccgtgtcacgtagactgacttgccagtacgattcattagcatgttttctgcttaggttttgcgtaatagtttaggtgtgagttggtacttggtagatggtaggtgtcaccttcctgtggctagtgccgagaaaaatgcttggtcctgagatgaggtgctgattatgtacagggcagaagcaatctggagcagttattatgtaacagagtgagacgagacaatttgaatggcacatgagttctctatctgtctgaattctaatgctgtccgcagcgctcgccgcctctcctagtggataggtttactttggctatgtgttttacctttctagcttagttatagactagtggatagatttagaacctaggttgcatgactgttcacgatagagatagcaacacttagtcaaaatcatagttacataagcttggtcctttttatttgttttgcttaagagaaaaataggggccatatattagaaataaattgtattgcctaattcacacttcttaggcatcaccattctctaca

SEQ ID NO: 32175 - DNA, 1976 bp, Zea Mays
aagcagacaagcgtcctgaggacctcatgctcagtttgttagtggggagaaagagaaggaccgatcagataaagaggtgtaactccatggtttaagttcttctgagagacatacaggactgttctagagatactgaggaacaattcaaagcttgaagcgttatatgctatggctgctcatagggcttttcaattctgtaaacagtataagaggacaactgaattccgtaggttgtgtgagataatcagaaatcatctcgccaatctgaacaaatatcgcgatcaaagggatcgtcctgatctgactgcacctgaaagtttacaactatatcttgatacacgtgttgagcagcttaaagttgctacagagctttgcctttggcaggaagccttccgatccgtggaagatatccatggtctgatgagcatggtgaagaaaatgccaaaaccttctatcttggtggtgtattatgcaaagctgaccgaaatcttctgggtatctgatagccacctttatcatgcgtatgcgtggctcaagcttttcaacctgcaaaagaactacaataaaaacttgtctcagaaggatctacaattaatagcatcttccgtcttacttgctgcactatctgtggcaccttatgacaaaaaatatggtgcatctcatcttgagacagagaatgagaaggagcgtaacatgaggatggccaaccttgttaacttctcgcttgattccaagcgtgaaaatagggaaatgccttcaagagcatctcttctatctgagttggcctccaaaggagtcctttcatgtgcttcccaagaagtgcgagatttgtacaaccttttggaacatgagtttctacctctggaccttgcatcaaaagtgcagccacttctttcgaagatttcaaagatgggagggaagctttcatcagcttcttctgttccagaggttaagttatctcagtatatttcagcattggagaagctgacagcattgagagtgttacaacagggaagtccataattgaaaaacgcaaagaagagcttgagcgtcaaatattggagaaggaaaaagaagaagaaaaaaagagaatgagcagtcaaaagaaaaccgcagatgaggaaagggtgaggcttctcaatgaacagagacagagggagcaggaccggattcgtagagagatagaggaaaaaaataaagccgaagcaaaaaagttgctagaagacttgaagaaggcagggaaaaaacatgtcgttgttgaaggggagcttactaaggaggccataatggaattgacacgaaatgaacagttgaaggagcgccacgaaatggagaaaaaactgcagaagtttgcaaaaacaatggattatctggaaagagcaaaaaggcaggaagaggcaccactgattgagcaagctttccaaaaacgtcttcaggaagagaagatccttcacgagcaagagcagcttcgggagattgaactcagcaaacaacaccatgctggcgacttgcaagagaaaaacagactttctcgaatgttggaacacaagaatgctttgcaggagagaattgtccaacttcgtgaagctgagtttggtcgtctgaagaaagagagagacgaacggttcagtcagttgatatcatcgagaaagcgtgaaagggagagagtgaggaagttgatgtattatctgaaccgggaggaacagcggattgaaatgcttcgtgaggaagaggaagctagaaaacatgaagaggaagagaggaggaagagagaagaggctgaaaggaaagctaatcttgatgctattgctgaaaagcagcgattgagagagatagagttggaggagaaggcaaaggcgaatagggagaagctcttaaaggggtctgagctgatggcagtcagatgttatgcggtattgtttgattgttccctatattgccaataaaaaggtttgcacattgacagttgaaatgaa

SEQ ID NO: 32176 - DNA, 2249 bp, Zea Mays
aaaagtaccctcgatctccaaccggttcaccactcaccactcaacagccctcccctctcatcatctcctccccccgcacctgcacagcctctcccgccgcgcgccgcctccgcgcgccatccagacgccagtgcgcgtcgcggtccgctgcccgcgctggtgttacacacgtgtaacaatacattacatggcgctagtacagttcaatggtgccttgcttccccaactcggtgaaaaacctcggccgctatcctcgccgcctgcagttgcaagggctacctatgccgatgcaaggttcctggcaccgaaaaccagttcaagaggtagaggtaaacacctgctatcacctagttatagtttgcattcacagacctcttctgaacaaataaaccatgtaccgtcgtcaagatctcgccagaaaaggggctcaagttttgtcgtcagagctgaagctgatttctataacgtacttggtgtctcaagaaatgctagtaaatctgaaatcaagagcgcctatcggaagcttgctaggagctatcatccagatgtaaacaaagatcctggtgctgaacaaaagttcaaggaaatcagcaatgcttatgaggttttgtctgatgatgagaagcgatcaatctatgataaatatggagaagcaggtctgaaaggtgctggcatgggcacaggagattactcaaacccgtttgatctattcgagtccctgtttgaaggattcggtgggatgggtggaatgggtggcggtcgtgctgcccgtaacagaccaatgcaaggtgatgatgagagctacaatctggtactcaatttcaaggatgcggtgtttggtgtggagaaagagattgagataaccagattggaaggctgtaacacctgcgatggaagtggtgctaagccaggtacaaaggcaacgacatgtaaaacttgtggaggccagggccaggtggtctcctccacaagaacaccactcggaatattccagcaagtctccacctgcaatacctgtggtggcaccggcgaattctccacgccttgcaacacctgttcgggcgatggccgagtgcgaaggacaaagaggatcagtctaaaggttcctgccggagtggattctggaagcaggctgagggttcggtctgagggtaatgctggccggagaggaggccctcctggggacctttatgtcttcattgacgttctctctgatcctgttcttaagcgagatgggacaaacattctctacacgtgcaaggtttcttacatcgacgcaatccttgggacaaccgtcaaagtccccactgtcgatggaatggttgacctcaagataccttcagggactcagccaggcacaactctggtgatggccaagaaaggtgttccgcttcttgggaagtcgaatgctcgcggagaccagcttgtgcgcgtacaggttgagatcccgaaacggctgagcagcgacgagaagaagctagttgaggagcttgcaaacctgaacaaggctcagacagccaatagcaggagttgatttattgagcaaatctttttaggacaccatgcttgtggtcacaggcaattttgatgcaaattgcagtgatgaaaagagttggtagtggttcaacacttctacgaactaaagaggtacactggagcgaagcgtgtcatgctcatgccatatctgtggcctcgtttctaagctattggaaaccaagtcggtgaccactggacgtcttgcaatagcttaacatatacgactttattagccattttttgttacacggctttttgtattcttgagagccttaggcaaaatctctggtagtggaatcaggcttagacttttacatttcttgcagaaatgctgcaccattgatggaatatgtaagctgcaccatggaaatgtgactgcagttttatggtttgtgatgcgtcgggggtttattgttttgctcttcaagttcgttatctaaacaatacatttatttgcccctggcaggggcagctgttgatttgaagctgcctctgcgcagagcaggtgcatttttgtggtctaggcagctgttgacatgaagctggttgttctgtgtttgcaactacttgggactctaatttaattttgttcctgtatgatgtttttaataaaatcgcaaatgctttttttctgcatgcacatgcgtaaaggcatccgcatgcacagtaggcattacaaatccggttggaaaggacgaaaatttgtccaaaaa

SEQ ID NO: 32177 - DNA, 2197 bp, Zea Mays
gactcacgaaggaggcgcgacgtgcgcgtgccgctgtgctgcactgctagtgttcctgcgcgccgtgctgtccggcccgcccgcgccgcgcaccgatgccgccaccgtcttcctcgcgctactccccgggccggctgctcgccgcgcgcccggcgtccgccaccacggtggggagatgggcgcgcttgtcgtgctcgctgtccatgaacgggtgcgcgccgggcgccggggaccgcggcgcggtgtgcgtgcgcgagacgcgggcgctgccggccgcgccggcgccgcacgacgcagtggggcggctcagggccgccgtggacgcgctctggtccaacgcagcgccaccggccgcgccctccggcatcatccgcatcgaggtgcccatcacgcagcgggtggacgccgtggagtggctgcacgcgcagaccacgctgccccgctgcttcttctcggcccgggcgccgttgcccgacgcgcccgccctcgccggcaacggcaacggcaacggcagtgtccatcggcagcagccggtgagtgtcgcgggcgtgggttcggcggtcttcttccgagggacggagcccttttctctagctgattggcgcgcaatcaagagatttcttccaagggactgtccactggtccgcgcatatggcgccatccgtttcgacgccacgagtgacgcttccgttgaatgggaggactacggctcattctacttcgttgttcctcaagtcgagttcaatgagctcgaggagagctcagtcctcgcgacgaccatcgcgtgggacgactcgctctcatggacatggcacaacgccgtggaggagctccaatcgactctgcgaaaggtgttgcgcgttcctcgtcgtccggttttttaaccgtctgctagaagactgtaacagcctgtagtactttttttccctcagatatcgccttgctcttctgttcaagcgaacaaggccagcctacagacagccatcgtaagtctcaatcatgtcccgaccaaggcgtcttgggatcttgcagttactaaagctctccatatgatcaagggcaggcaaagagaattggtaaaggttgtactggcaaggtgtagcagatacattactgacacttgcattgaccctgtggaactgctggcttgcttgaaggctgagggccaaaatgcttatcaattctgcatacagccaccgggtgctcctgcgtttgtcggaaatagcagcaactatttcatcggaagtacttgaacatttccagcgaggctctagctggtactcgggcaagagggaagacaagggcagatgactttcaaatcggtcaggatttgcttctaagtagcaaagaggacatcgaattcactatagtacgggacagcatcaagaacaagctggaggcaaatgatctgtgatgaggtggttgtccatcccagcaaggctctgcggaaacttccaagagtccagcatctgtcagcgcagttagctgcgcgaataaggaacgaagatgatgaggtgacctatgacaaaacttctactacttgagttgggtgaacatcatataaggtaacgatagcaacttgtgctggcgatgcagtttgagattctaaacaccctccatccgagtccagctgtttgtggcttgcccactgaagaggcacgccaattcatacgggattgtgaaatttttgaccgtggaatgtatgctggtcctgttggctggcttggaggagctgagtgcgagttcgctgtcgggattagatcagcgttacttggaaaaggtcacagcactctggtgtacgccggtgcggggatcgttgaaggtacaaacccatcttttgaatgggatgagcttgatctcaaagcatctcagtttgcaaagctgttgcggtaccaagaacgacctattcgctaccaagaggctgaaaatctgggaacggtgatctgaatagagaagtacagaagaaactagaaagtcatcacaaagttcggcattcatttagcgagttatttatacaattgtttgtttgatatagtaagctagaagggggattcagttggatttgtgtaattatggaatccagaacagcggcagtgctgaaaaatacattgattgaacctgaatgggaaattgttcaatgtaacaaaaatatgtttacaacataaactatttgattgaatcagtgcgtgaatgtgac

SEQ ID NO: 32178 - DNA, 1321 bp, Zea Mays
cctggacccaccacccaccccctctcgacgctcacttcataaaaccactccacctcctgtctcccctttaaacacaccgatacagcacaccgtccatctctcccctccccctcgcaccgccgcgcggacacgaacacgcgagccaccgaacgggtccgggcccgatcgcaccgaccagccgcgcccgcggggcggggaggtggatccagtccaggggtgggctcctcttcaccgccgccgatggacttgggcctcagcgtcgcgggtaggaccggcagcggaggaggaagagggggctggagagggagcgggggcggcgcgtccgcggcggcgtggacccggctcgtcagctctggcgtggaggacgagctggtggccgcgtcgggaggaggaggaggaggaggtggtggacgcgctggggcgagagccggaggcctgccgctgggccactttttggaggcctgcttcctctgccggaagcccctccccagcaaccgcgacatatttataggtgacatcccgttctgcaccgaggattgcaggagggagcagatcgaaatggacgaggagatggagcggaaggagagcaaacccaagaacgtggcgccgagaggagctccatcccccaaggacgtggactccccgccgaggcctcccaaggcccgggccgggtcaatccttgccggctaacaccgtgaagaagaaaaaaaaaagctcacaaacgagctctcacgtatgcgcgctccccctccccaaaaccaagagatcagaccccctcttaccaccacgaactaccaccgctacagttacgtatatgggtttgtgctttttgtttaaaccccttgcgccattggtggcgccgtgacctgctcagtgtcagtgcctgcctacctgtatggctgtgatgatgtatagagatgggggaggggaggggaggggaggagagcgcgctggtgtttaggaccgcatgcagctcttattgcgctgctgtgtcgttcgttgtatcatgtgtgggtgtttctgcctccgtttacaggggatttttgtgaaatttctgtgtgctacgtagtagtagtagtagtcggtaatgatggttttaggcttatggtttcccgtaatgatgacgacggaaaatggaaaacatatgtctacagaaagaaatagacatcaagtacatgactagctcctgtgccatcgtggatgatcctgatttccttttttttaaagtaccttctgattggcaacaagtgtgtactgttcttggtcgatacatccaatgttttgttttttattagtggcgctgtgcaagtgctaagcgtgc

SEQ ID NO: 32179 - DNA, 929 bp, Zea Mays
actctctccattccggtccaaggactagcataaaaaaccttcggctggccgcaacgggcatcctccattgggctcccaacatgcactaagcgatatattctgctgggccttggtgggcatttgctgaatggaatatgtaccgtatcattgaagtccgtacatcgccccaatataaatatatatgtgatcacttctatctgaattgcaagttattttccattccagtcaatttctctactaggattagctttgaacatttttttcactatatatatggaggaggacaggggggtgaccgtgctttcaagccgcatagaacggtggcagctgaggcgcggcgatcacatctatgcctggcggacaggctactcccatcatgtgagtgtttatttacctgcaggaatctacgaaagcgacgagaagcaagtgccgtgaagctatgcgtggaggcggtgtcgtggtctgctgcctcgactgcttcctggaaggggacaatctctgcctcttcgcctactcagtgtccatggcattcgctgcactgagcaatatcggtgctcaagacacctgctccgtggtagacgaagacccacccgacacggtcttgcgccgcgccaacgacttcctcgactacggcggcttccgcagctacaacgttgcaggcaataactgcttccactttgcctactactgcaagacaggacgcgaatatctctcaccagtgcggatgattgctgacccctcgcaggaacaccaacgttccccggcatgtacaatcctttagagctcctttggatggttgggtagtacccactagagatgattttacccgatatcaatttaggagctctaaagttagaaaaatcacgaaaaaacagatgattgtgaaatgttgctgcaatccacaaaattagtggcaaaaataaacttta

SEQ ID NO: 32180 - DNA, 2272 bp, Zea Mays
aatcacatccttgtagcagcatctgcattgacatcagaatgacattttctctgaagagaaacatcctgtcattcttcgttagcagctctgcaactattttgaagccttttttttgcagatgatgcgaatcaactttgtatagttagtttcgttgatgtacgcctgtaccatgttgtagtaaatgataaagagaataggagtcctcggatcatctgctcgtttgaaccattcagtcatcagccatcgaaaatagctgtctgctatattttttttcgtcagcgacgatctgtcagggtcagggacttttcattgcaacgagtgggacgaacttgtccactgaaaatgatgaggcccgacccgaagggacgcatcaaatccgaatgagcctgtgaagtcaagcactcgaagccttatctgggaaacaaaatgctattcctgatctgacggaagcatccaccaatacagctagtttgggtacacacgctgaaccagctagttcgcctgggagaggtctctgtcttgtttacatgccatcgtctagaagttgtctcggaaaaattttaagcgaatgttgcaatgaacagagttccttttgttgctgtgatttgtcattggtcgaagaggactaactgcagcgtttgtctacctacaatacttgtttctttgttgttgctgtcttgtagtgccagcagcgatgcctccttgttcgtgctcggcaagtcggccggtgtgagcaaaatccgtacgtcatcgtctccagtggtgccattctccgtggctctgcacacggtcggggactcggcggccttgctggatcatttgtgccgccaaacgtgaagtccttcccgagggatgacccaaagaagccctgtcacctcaccgccttccttggctacaaggctggaatgacacacattgtggtgaggtcgagaagcctggctccaagctccacaagaaggaaacttgtgaggctgtgactatcattgagactcctccccttgtcattgtcggacttgtggaatgtgaagaccccccgtggcctacgaaccctcaactctgtctgggcccaacaccttagcgaagaagtgcggagaaggttctacaagaactggtgcaagagcaagaagaaggctttctccaagtatgccctcaaatacgacagcgacgcaggcaagaaagaaatccagttgcagcttgagaaaattagaaagatgaagggtttgaagcagaagaaggctcacctcatggagatccaggtcaacggtggcactatagcagacaaggtggactatggttacaagttctttgaggaggtccctgttgatgctgtgttccagaaggacgagatgatcgacatcatcggagttaccaagggcaagggttatgaaggcgtggtcactcgctggggtgttacccggcttccccgcaagacccacaggggcctccgcaaggttgcctgtatcggtgcatggcatcctgctagggtgtcgtacactgttgctcgtgctggtcagaacggataccatcaccgcactgagatgaacaagaaggtttacaagattggcaaggccggacaggaaagccatgacgcctcaactgagtttgacaggaccgagaaggacatcactcccatgggtggtttcccccactacggtatcatcaagggcgactacctgatgatcaagggttgctgcgtcggccccaagaaaagggtggtgactctccgccagtctctgctgaagcagacgtctcggttggccctggaggagatcaagctcaagttcatcgacacctcgtccaagtttggacatgggcgcttccagaccacagacgagaagcagaggttctttggcaagctcaaggcctgagttgctgatggtgtcaagcgaaatggaaatgtattaccagatagttttttgtttttcagattcagctttgttggagatatcataagaacatgtttgatttgctagtctgagttgattctattgcgggcggctgaagttatattacctaatgaactcgaaagtcagcttgctagttgcgtgactttacctgcgctagcacttgccaattttgatggaatctcaaatcttcccgcacgcaatatgctcttgctcaattcagccgtttttttactgtaatcgttgtcagcacatctgtctacagtgaattaacgctgtaattgttctgaatttttaaaacaattatcttattattccataaaaagtgcaaagtgcttcatgtatgctccctatcgcacctccttcct

SEQ ID NO: 32181 - DNA, 221 bp, Zea Mays
atttaaatatataatgttatatatatagtttatatatttggagccatgggtgacgacgctcctaaatcagacgagcgacggtggtacacctcaggcccggtgacgactgcggttgcacgagacgcggtaggcttcggcagcggcagcggtgggcataggagacgcaggtggctctggtgatcgtgcgaggcgcgatcgtctcctgcgatggcggccacacg

SEQ ID NO: 32182 - DNA, 2545 bp, Zea Mays
tcctaacggcgtaaggtatatttacgtcttcatgtggcggatgcgtactaccgtctccgcacgccagaaccccaaaaccccagcggccagcaaaagcagcggcggcgcggccagggaccgacgtacccgccgcgagaagctccggttggcaccccaacggcatggatgctagcagcgtcagcccgtgcgatctagacagggagtttgcgctccaaatcgctcagctcctcgccacgcctcctctccaatcagcccaggaatactatggtgaactcatacggtccaagaagcttgatggcattagagtgagctacagtggcaagcatgggaaaggtgtttatgcaaatagggactttggtgaagacgaccttgttctgaaggaccaaatgttggtcggtgctcaggacagccttaacaagattgactgtgttgtgtgtagttactgcttccacttcattggttctatagagtaccaaattgggcgtagattgtatttgcaaagccttggtggtagtggtgatggcactaccgagagacactgccatgggagtgatgttgggtcaagtactggctgttccggtgcatcaaatggaaatagcaatgctgtgccacaagaggtcctgttgtcacttatggatggtaatacgctgttgcctttaaccgatcagttctgtttgccaccagttgttgcttgccctggtggatgtgagggagaactctactgcagccaatcatgtgcggattccgattgggattcttatcactctttgctgtgtgctggatccaagactgaaccattgcggaaatctgcccttcagaaatttgtggggcatgctaatgaaaccaatgatatttttttggttgctgccaaggtaagtggcagaagtatgcatactatatagtatgtttgcatccaaagatcagtctaatttactatatttgtttcgcatttctaatcttgttcaagtgatatcttctttttatattttaaaattgcagcttagtcttggtcaaatgcacatagaaatttgagcatcagacttaagagttgatatcagtcgccaatatttgtcaaaactgtgaacctgctatagaccaatgcaccaaaacagatcatttcatgataagacgattatatgaatttcatgaggctaaaaagagcaaacaaaaaaatcactctttgtcttctggcctctaggttgcaatccaataacacttcttgattctcattcacaaacatccgcttttatatgtcaggctatcactttcaccttgttgagatataggaaactcaaaagacagcatgtgtctcatgaatcaagctcttcgctcctcttggaagcatggaaaccactttcaatgggcttcaaaaagagatggtgggagtgtgttgctttgcctgaagatgttgattccagtgaagaagaattgtttagacagcagataagggatctggcgtttacgtcactgcagcttctcaaggatgcaatctttgatcctgagtgtgcgcctttgttttcgcttgacatctatggccatataattggcatgtttgagctgaacaatcttgatttagttgtcgcatcaccagttgaagactatttcatatacattgacggtcttccagagagcgacaaggaggaagcagagaaggtgacagggccattcctagatgctttaggagaagactacttagttccgtgcgagggaacggcattctttcctctgcagagctgcatgaaccattcatgccgtccaaatgctaaagcatttaagagagacgaggacaaggatggccatgcagtgataattgcccttaggcccatcagcaaggacgaagagattaccatcgcctacatcgatgaagaccttccttacgaggagaggcaggcgcagcttgcagattacgggttcacgtgtacatgcttgaaatgccaagaagagcgaccggtctgaaaggacaaatatgtttgaattttgcggcattcagcctatgtcactgggtagttttgaaagctcgcgagaagtgagtgcacaaaatgatgtttgttttcggctgtaacttgcaaaagttttgttgttgtccaatgaatatgaatagtgacgaacagacgatcagtcgtcgtaaccagcagcctcatgggactaacacaaccacaagagcgaatggcaatagcagcaggttgacacttgcaactattttggttatacttgtacattaacacaactggctgattcgccaagtatgctagtattacatttgtcatctccctgcatagattatgggggcactgcatatcgcacaacaacgtgtacatagcacaggcttttacacatggtacaggaaaaatgagttccatcactcgagccgagctgacgaaagaaggaaaaaaaaaacaatgatgtcctccgttctcactaagccgctgccaacacttcgctggatggagtttgacctgcaggtaaagaaactatggaaattagggtattaattcttctggagttgcacgcaatcatcatcttggatcttcttatattgtttata

SEQ ID NO: 32183 - DNA, 4794 bp, Zea Mays
cagaaggacagcaccgttgcccttcggcttcgataaacacccctcaacccccattgctttctagccccagatccccaatccccaagaccccaacgcctcacgcacccctcaaccctaccgcagctgcgcaggcacacgacctccgtgtgcagcgcatcgccgccatgacgggtcccttacactccagctccggccacaacgccgccgccggcggcgggggcaagaccatcgaggaaatgtaccagaagaagacgcagctggagcacatcctgctgcgccctgacacctacattggctcggtggagaagcatacccagacgctctgggtctacgaggacggcgccatggtgaaccgctccgtcacctacgtccctggactctacaagatcttcgacgagatcctcgtcaacgccgccgacaacaagcagcgggatcccaagatggacgcgctccgcgtcgagatcgacgtcgacggctgctccatctccgtatacaacaacggcgacgggatacccgtcgaggtccaccaggaggagggcgtctacgtgccagagatgattttcggccacctcctcaccagtagcaactacaacgacaacgagaagaagacaaccggcgggaggaacggatacggcgccaaactcactaacatcttctccacggagttcgtcatcgagaccgctgatggacgtcgccaaaagaagtacaagcaggttttctctgaaaacatggggaagaagtcagagccccagattaccaagtgcaagcagggcgagaactggaccagggtcaccttcaagcctgatcttgccaagttcaacatgatccatctcgaagatgatgttgtagccctcatgaggaagagagtggttgatatggcaggcactcttggcaaaacagtgaaggatttatgagcaagtaaatgatcggtgggaagtgtgtgttagtcaaagcgaagggcagtttcagcaggtcagctttgtcaacagaattgccaccataaggggtggaactcatgttgattatgtcaccaatcaaattgccacccatgtgatggcttttgtgaataagaaaaacaagaatgcaaacatgaagctacacaatgtgaagagccatttgtgggtctttgtcaatgcgctgattgacaatccggcctttgattcacagaccaaggagaccttgaccactcgtcagggaagctttgggtcaaagtgtgagctttctagtgatttcctcaagaaagttgagaaatctagtgtaatcgataatgtcctctcttgggctgatttcaaacttagcaaagaattaaagaagactgatggaagcaagaagtcaagaatttctggcatccctaagcttgaggatgcaaatgaagctggtgggaaggactctcacaagtgcaccttgattctgactgagggtgactctgcaaaagctcttgctatgtcgggcatagctgttgtagggagagattactatggtgtatttcctctcaggggaaaactattgaatgtcagagaggcaaaccacaagcagataatggacaacgctgaaattcagaacataaagcaaatccttggtttgcagcatggaaagcagtatgatagcaccaaaggtttgagatacggccatctcatgataatgacagatcaggatcacgatggttcccacatcaaagggttgctgatcaatttcattcactcattctggccatcacttcttaaagttccatctttcttggttgagttcattactccaattatcaaggcaaccagaggccaaactactaagtcattctacacgttgccagagtatgaagaatggagaaataatttaggagcaagtgcaagttcatggactataaaatactacaaggggttaggaacaagcacagccaaagaaggccgaaagtacttcgaagatattactgaacataaaaaagattttctctgggtagatgaccaagatggcaatcatattgaattagcattcagcaagaaacggattgctgataggaaacagtggcttacaaattttcagcctgggacatacattgaccaacgtgacaaacatgtcaagtatagcgatttcatcaacaaagagctgatactcttctcaatggcagacctgcagcgatcaataccttcaatggttgacggccttaaaccaggccagaggaaaattctgttttgctcattcaagaggaattttgttaaggaagctaaggtggctcagttctctggttatgtgtcagaacactcagcataccatcatggtgagcagagtttagcaggtacaattattggaatggctcagaactttgttggcagcaataacatcaaccttatgtaccctagtggtcagtttggcaccagagctcaggggggcaaggatgctgcgagtcctaggtacatcttcaccaagctgtctcatatcacacgttcaatttttccgaaggatgatgatattcttcttaattatctgaatgaggatgggcagtcaattgaacccacctggtatatgccaatccttcctatggtcttggtcaatggtagtgaaggaattggaactggatggagcacatatattccaaactacaatccaagagacattcttgctaacctcaggcgattgctgaatggagagtctactgtaccaatgcacccatggtacaggggatttaagggctctatagagaagacagtcaatacaaaggtagctggttccacatatactgtcactggaatcattgaggttcttgacaacactacactgaggatcactgaattgccaatccgccgttggactcaggattacaaagattatcttgagagtttggctccagatactaagaacaaggacaaagtaccattcatagaggatgtcacatgtcaaggtgataatgaagatgtttacattcagttcacattaagtgagaaaaatatgaatatagctatggaagaaggactagtgaagaagtttaagctgacaacaacaattgggacatcaaatatgcacttgtttgattcagatggtaaaattcggaagtatgacactcccgagcaaatacttgaggagttctgtcatttaaggcttgaattctattgtaagagaaaggaagcattgttgaaaagcatcaagttggacttaaagaagcttgaaaacaaagttaggtttatccgctgtgttgttgataatgaaattatagttaacaaccggaaaagggcagatctatttttggagcttcggcagaagaattttgatcctttcccaaagaaaaaaaagagggctgaaccagctgctgtaggtgctttagaagaggaggaaaatgaagagagtcctgaagctgctggagcggaacctagtgactatgagtatctcctctcaatgtcaattggtacgttgactttggaaaagatacaggagcttaatgctgagaaacaaaaattagtggatgatgttgaggaattggagaatatgtcaccaaaatcactatggttgaaagatcttgatgcttttgagaaagaactggatgtgcttgatcaaatggatctagcagaggaactgcaaagggaaaagaggataaatgctggcaaaaaaggaggatcaaaagctgcacccaagaaaccacgtaaaaaggctgcatctaaaaagctggatagcgatacagaagatgatgattttgaaccagcggttgcaaagcgtggagctcaaccgaagaaaacatccagcaaggcaaatgattctgcgtctgaagatggagattatgtggctgctgaaaatcaaaagaaacaatccaagaaagcaagtgcccatgtggacgaagaagttgacatgccttcgttaaaagaccgtctggctgcttttaatatcagcgactcctctccggatcattctgccatggaaactgaagtaacagaattgacagaacagcagaatgaaaacaaagcgacagagggagcaagcaaaagaggcggacgaaagaaggcgtcatcatccttggcgacgataccatctgatgttgatgaggaagtcctagaggtccaagctcagaagaaaggtagaggaaggaagcctgctgccgttgtgaagcccaaggctcctgccgccgccaggaaaagggcgccggctcagggcaaggtaacacagaagaaaatagatgagatgctcaaggccactgaggataacaacaccagtgcatcttcccctgagaagaaggtccggaagatgaggtcctctcccttcaacaagaagagcggctcaatcttacagagaggctcgaccgcttctgcaagctctggaacaactgttgaagcttcaccaccctctggcagctctgcagagccagttggtgctgcacaacctagaaggacagccagggctaccaagaagcctatctatattagcgatagcgaccctgaggatgaagtggagttgattgatgattcggactttgatgcggacggtgactctgacgagtgaagattgtagtcatccgtactttggctgcaacaatatccagtttgtgtcgttgcatgtgacaatttgataatgcatttcttgtgcgttgtatgtgttcgttgcgttgttcagaactgttgccaagagctcaagacaacctggttaactggttaactgaattgtatgtctaattttggcatacaagtgtgcctgtggtatgttttatgctctgatgctggcatgctgctctcagagcgcccattgtgtgcattatcaaagtttgtgcggggagtttccagggttatatataccaaatctaagtagttgaagaat

SEQ ID NO: 32184 - DNA, 2336 bp, Zea Mays
ttctagtgaagtcgagaaggcgcaataacacgctgctccgtctccatctccatctccaattacctatcctctccgtcgaatcagaaaccctaacctcaccgtaccacggcctacgagccggaatgaccacatcagccgccgacgatggcagctctttggcgcctaccatcaccgagggagaaaccacagccgacgccggtgctggggcaggtgttgagtgcgtcgagggcaaagagatgaaggttggggccgcggctccagttgaggagccggataaggaggcggcgcgggaggaggatcctggtgatgatgatgactatgaggaggaggaggaggaggaggaggaggaggaggaggaggaggaggaggaggaggaggaggtggaggaggagacggaaactgcgaatgggaaagaggctgagttgatggagccattggcggcgctgaagcctggggaggaggtcaaacctgaaaagctagagggggagaaggaagagctggatgaggagcccgaggcatcggaagaggaccccgaggaggtggaagagttgaaggaggagggcgacggtattgcggaggaaggcttggtggatgggtcggaggcgaacgatgataaagatgctgatcaattgagcagtgggagtgatagtggtggaagcagaagtcgtggtatgcagaactctgaacttgctggaggtcttgaaatatttgttgatgacttgcctcaagattgtgtcaaggaagacattgctatggccttttctcaatcaggggaggtcaaatctgttaggataattaaaaattcatcaactggaaagaaccaagacattgcatttgtttgttacacaagtattgaagctgcaaagaaggttcttgctgaatttaaggagggaattgaggtaaaaggaaaaatggtcagggtatctgcttgtcaagataataataccctttacctggggaacatttgcaagggttggaccagagatcaggtgttgaacaccctaaaaagtattggaattcaagagtgtgagataagctttcccagttacaagggaggaagccgagggtttgcttttcttaagttcacctcacattactatgctagagcagcacttcgtcgcttaatgaaatccgatgctatttttggtactgatagaagcgctaaagtatccttttatcgaacccccacaaaatcatccaagagacttatacagtctggacctaggccttgtcatttggatgaaaaaattcacccggggagggtaagatcaccctcgcgtagtcacggtattatattaatagaaggtcatgacaagttgacaatggtctcgaccgagcaacccccgaaccctgtcctcccatcatcaatgggccgcttcaagctgtccactctgcaaatgcccatccagggtggtgcacagccgagtcgtaacccgagagtggatgagaaacacgaggagatgtcaatgatatatgcccaggcaaaaatagtatacctggaacatgtccctctttcttgggatgaaaataaagttaaggaatactgtgaagaatatggggagatcctgaaagctgatgttttccagatatcaaagaatatggaaaatgaaacaatttcttttgttgaattctcatccaggaagggtgcgttagcttgtgtgacaggaataaacaaagcaaatattgttgatggaagcttcaagttgtgtgcatatcttgcttggccaaaaagtgcttcaaaggtcaatagtgctgcaccttcaaatgctgccaccgcaaccgagaaggacaaaacccacacagagaagattcttgtagacatcgatttgcaacataaattccagaaaggcgacaagagcaaacttacatctcagacaaaggaggcaattatgaagaagaaaaaatcaagtaaattaccaaatgacaatgatacaaaactaacctcacaaggtgctgccgaagtaccacaaacctccaaatcttctgaaggcaagaggaaagttggaaaaaacaaacatgcctctgtataccaaaaaccattgaagaaagcaataaataatcgtaacgttgatgagagccagctaactcatcggagtgctgcagtactgcaaacgtctaacacttccaaagggaaaaggaaagccagtgagaacagaagtttatatttaaacgaaaaggctctcaagaaagcacgtggcaatagtaatttgggtggaagttcaagatctaaatcatatgcctctgatctggaacctcatgctggattcatttcgcctgcgattcgagataatggcagtgatgcatataatcgacagagttatgttttatgatctcac

SEQ ID NO: 32185 - DNA, 207 bp, Zea Mays
ccgcggcagagcgcaggtcgacggcgaggaattgccctggcgcagcgatgccccgcttgaaattggtggtcgccgaggttcccaggttcgccgccgcagccctggaacgccctgcgggtgcccgagcgacaccacccacgagtcggacggcggtggtccgaaattctctctccacctccctagtctctctctcacgatttcctgacg

SEQ ID NO: 32186 - DNA, 801 bp, Zea Mays
tttcaagaatctatggtgagtgtgattttcttttctcttgtatatcaagatgttgattgcaagttcttcagtacttgtgatgatataattttcttgctaaattctgtcttgctttatatgatctctaggattcatctttctctcaagtaatcactgaaacaccaacttcagcaaccgaacttcagcagcatgtgtttacagagggcacatttggatgcctccctctgccttgctttgcttggctcagcatcaagatacaccgtttggttggtttgcttccagtctcggttcttgcactttccagaattttcattgccagcccaagcgacctgaaaccgctctcagcagctggtaagcctggtcttgctgagcgaggcgaggcaagctggccacataaaccaaccaaacgtgcctagaatctccagggtccagcttgaggcagcattttgcagttgaaaggaaatgggcccttggtcttcaggcaattttcacgttaagtaataacatcttatgatattttccctgaattattctgattcatttatccgtaattgtctagcagtctcaggcacatccattagaaataatagtagaaatgcttaaagctctgtaagaattgaatattaactagaaaaggattggacactacaacatgaaatgagatgggagtcctagctgtcttgagagtatgatgcataacaatgatggctttggtgcggaatctgctatgcctgaaactgatgatctcatcgataaatcaacccctatagtgaagtttgagatttgggtatcatttggaac

SEQ ID NO: 32187 - DNA, 2711 bp, Zea Mays
ttttcttctcccgtccttcccggtcgcgtactctgtcttctcgtggttctcccgtgcccctcgcgtgcgctctctgtctctcggggcgacgactaggcggctgctcgccggccgccgacgccgacgcccgccgccagattcccaggtatctatcttcgggacctcgaccggcgacgagcacccaacaggtactgattttgctgaagcaacagaataatgtattagccctcatgcgttaacacctacataaactttgagtatcctagtttcaagtgaaatcatggcacgaaaaggaaatcaaagtaagagtggccccaatcatgcttcacctaagtggaaaaatacaactgatggtgatgcactaagtacaccagaaagaggtgctgcagatagtgaaaatccgagttcacatgttcaaggcagatcaaagggtcctgaaggaagcagtgagaagaaaggaagaggcagcaaaaggaacagcacaaacaacggcatatcatcctctggaaaaaaacaacaaatggacaccggttgtgatataaacagttcagaagaaaaggagattccggaaatgttttggagaagaccaggtgcattgcttgcatggctgcatccattattagagcttccatgatatatctagttgaagaaggcaaaagatttatcgaaaaaagaatgccaacaatcaacacttatatggcttttgtcaacaaagggcatgcatatgtcttaagcaaaattgcatatgtttatcccatagttcgagcttggatgcttaatgctggaagggtgatgctgctcttgtttacagtttggttagactgcaatgtaaggggctttgattctttgctacgattggggacaaactctctcctagcagtactttggtgcagcacgctgtcaacttttgcaatgattgggataaaaaagatgctcatattcatggcgattgcagcttctgcgtttgccttcataggtctaggttttgctatcctgcttatatcagtgcttgcagtggtaatcttatggttttatggaagtttttggacgaccacttgtgtaatgattcttggaggtgttctctttttcttgaaacgcgaaagaataactcttcttgttgcctgtttatattcgatgtattgcgcgagatgctatgttggatggctcggattgcttttgggcctcaacttatctttcttttctagtgatattctagtgcagttcctaagggacaatgcagacaataaaaaattcaatggttcttcaaggtactcagagcgaagctctggtagacaaggcaatatctttgaagaatttcagccatcagcaaatagcacctaccaagccagatatgctcgagcttcagatcgagatcctggtgatccttcaacaagtggacctgagaaagagcttacctctgaagatgaagtggctcgtttactgaactgcactgaccactattcagcattaggtttccgtcgatatgagaacatagatgtatcatctcttaagagagaatacaagaaaaaggctatgttagtccatcctgataagaatatgggcaatgataaagctgctgatgcatttaaaaagcttcaaaatgcatatgagattcttcttgattcactgaaacgcaagacatatgatgatgagttgaggagggaagacctcttgaactacttcaggcagagtgtttctcaaaagaatggaagaaacagtactttccaacatgggttcagcccttcagaaggtgttgatgaaggtccttatggtctttccagaagaatagcttgtaaaaagtgcagcgactttcatctttggatttatactggaagagctaaatcacaagctagatggtgtcaggactgcaaggagttccatcaagctaaagatggcgatggatgggttgaacagtcctttcaacctgttctatttggcatgctgcagaagcctgatttacctcatgcatatgtttgcgcagaaagctacatatttgatgtcactgagtggttcaactgtcagggaatgagatgcccggcgaacactcacaaggcaaccttccatgtcaatgccaacatggcaaagcagagcagtggcaaggcgagtacctcaacgcagagggctggtaaggccccaagtggtgtaaacatggatggaggaggactcaacgaggaagagttcttcgagtggttccagaatgcagtcaactctggaatgtttgaaactacattcggggcacaaggcgacccgacttctcctggtaacggaagcaatgccaagagtagcggtagcagcagcagcaacaacaatagtaggaaaaagaagaaaggaaagaaacagtggtaatcaaagcaaagcaggctggggtctggtgatcacttctcggggcagagaaaaaaagaaacaaacagaataagcgttttgggtatgtaaatacaactcggaaaaatcggtccctggcttaaatggttcctaacgagaggccactgtaaatccttgttcatcatggggtgctgacggctgttaaatggccattataaatcctggttcattatgttgtcggatcttaatatatcgtcctggccctcggtaacttgctagcaaaaaaaatgttataaagcaagttactacgaaacaagaatttgcaagattaaagatagttttttttgactgtcatggggaatccctacctggatttcattgattctagc

SEQ ID NO: 32188 - DNA, 1555 bp, Zea Mays
gctgaatgctaggtggttcacaggggtactcgtcaactcctgctgttcacgggtttgaagcgaaaattcgcccaaaccaggccggcgacggacgcctcctcgttctccacgccgccgccgccgccgccgccgcgttggctaggttgacctgaccgatcttgacttctctaggctcttgcatccccgacgacggaaatagcctccgagtttccaacagggtggctccggtcgaccacgaagcctcgatctgcatgacgaggctactcgtcatcctgttcgccggggcgaccctagtagtcgccaccaccgcgcacgagcaccatggtgaggcgcccacctgcgccggaggcagcgagcacgtgcttgcggagttccgccccggtgaggtgaccgtggacgggcacaacgaggactgggagagcgtggaggcctcggagttcgcgctgctgccggctctagatccagacgatgataaggcctactccggcggcaagatcgccgtaaaggctgtgcatgatggcgtcaacgtcttcttcttgcttcaggttgatggggcttacgcttacactaaaggggaaagtaacaaatgcccttctgttgctctgatgttccaagttggagagaaagccacattttacaatatgggaggatgcaaagatatgccaggttcatgcacaagtaaaagttgtagaggtcatgaggttgacattatgcacttctcaattggaaatgctatccctggacgactttacggtggcaatcacatagacaatgcagctgggaatggaaacgacagatttggtcaccttgttgatgtctatgcatggaatccacattgccgatacctcgatggagtgggccctaaagagaacaattcaaatgctcaaaatgattggcatggggcttggtggcacagttcattgaccttccattcaggctttgttgatgacgataatccttatggacaacaagatgagaagggtacatattattttgagttttcaagacccttaagaacaatggatcaatttcagcaggatgcacaattcacaataggacgtcccagcaatatgtccgtagccttgtggtacccagacgatggcaaagcatggagcaactccgatcattactcagccagctgcaactgtggtagccatttgcatgtccatctttgtgggctaccgattttctaggaacaggagcactgcccagtttacaccacttgaacagatccagtttgctgaagaacgccattgattggaattgagattaggcgaagcatcaagcaacaatgtttcatctgttccaccattgtacctccaaagttgacagattgctgcattgaagttttgaaccgggttgttgtgatccagtatagggagatattgaaagcatacacgatacataatttaattacagactgccggtttttatcgtaggaaacaatttctatatgctatacatcaaaccggttattggcggctcatgactttgacgattgtttcattggttgcataatatttgaatatatctaaatttggttcgaatgctgaag

SEQ ID NO: 32189 - DNA, 1082 bp, Zea Mays
gttttctagcatgttcgagaaaaaatattgagtaaagtgtgctggttcagaggacgcttctgagtttgctgcacgcaaggcattttcaatgcaagatagggaaaaacttgaacagcagttgcatgacatggctttgatgattgagaggctagaggggagtcgtcaaaaactgctaatggagattgattctcaatcgtcagaaatagagaaactgtttgaggagaactcagccttatctgcttcttatcaagaagccattgatgttactgtacaatgggaaaaccagaaaatttcaggttagagactgtctgaagcaaaatgaagagctccgttctcacttggagaaactaagacttgaacaagttagcctgttgaaagtaagcaatatcgctacccaatcagatgggcaaactgaaaacagtatctcaaacccaccacaaatggtcatcgagaatatttctctaaagcttataaaagaacagagcagatctgaggggttgtcggcagagataatgaaactttcagctgagcttaggaaagcagtccatgcacagaataaccttgcacgcttatacagacctgtattaagagacattgagagcaatctgatgaaaatgaaacaagaaacttatgcgacgatccagtgatacatgttgacatgttgtgaaactcagtcctctggcatggccgcatgggctccacgttactgattttcgtcgtggatgtatttatctcatgccatcttcaagatgctggtgcaaagcagttcttttcgtggccaccatttataagtagagttcagtcgagatcgttgtacttgtatcatactcatgtatacccgattcccagactggttcatctcgtaaattggaagcgatgtttggatgcctatgtatcaagtggatcataaacatccaaacaacgccttaaaatagatcgtttcgacattattattttcctgcttgcaatccaggctctaacaacttctcggtcttgtttaatcctttcatttggcgagtccgcatgttcgagtttgagttctagaccagtccgcatatatggattgtttggatgaagtcgtc

SEQ ID NO: 32190 - DNA, 1476 bp, Zea Mays
gaccagcaggccccacgggctcggcccccctcctcccccgaggccccgagttcgctgcgcttccgccttccggtgacaagcgagtgaccgatctaccccgacccaccacccaccgcaccacgcgagccgcgagcgagatctctcggctccagggtaggctccctcctatggatctccgccgcctcgcggtgtttgcggccgccctcgccgccgggtggtggtcccgcggcgcggaggcgtcgatccacacctacgaccgggagcccttccgcgaggtgggcaacgccttcctcctctccggcggcagcgagggcatcgtcgccgacggggcagaccccgccgcccccgcatcctccttcatcaagtttgtgaatgttacattttggagaaccccagaagctgcggaatcacacgcaaaaatggcacatagtacaggcttggtacaggctatcctatttgaagttgtggacagggataacatcgggggatctgcctatggcggacagaggtccatatgttgtaccccagatcttgctaaactagagggctgcaagcaaggggaagtaatcaggaggccatcctctgatgatccagattggcccttcgtgctagacacacacttcagtgctaatcacctttcagtgaagttagaagatgagccagtgcgcattacaaagacaggcatgtacaacttgttcttcatatcctgtgatccaaaactgagaggccttactatgagtggcaagactatctggaagaatcctggtgggtatctaccgggacgaatggcgcctttgatgaaattttatgttctcatgtcgctggcgtatctgttggtaatgattgtttggtttagccagtacgtaaggttctggagggatatattgccaatacagaattggatcactctaatcattgcacttggtctgtttgagatgacactatggtactttgagtacttgaacttcaacagcagtggtgtgaggccagttggaatcacaacttgggtggtcactgttggagctatcagaaaaacagtttcacgtctactcatcctttctatctcaatgggttatggtgttgttcgtccaactttgggaggtctcacttccaaggtgttgctactcggacttacatatttcctggcgtctgagttgctggacattgcagaaaatgttggaacaattaatgatatatcaggcaaagcaaggcttttcctggtccttcctgatgcatttttggatgcttttctcatactctggattttcacttctctttcccgcacactagagaagctacaggcaaggaggagttctgtgaaattggatatatacagaaagttcacaaatgcattggctgtttctgtgatagcttcagttgcctggattggttatgagctatatcccattgaaagtattcggaagacacggaaaatactacatctcatgatctatatttataattgccatttaagat

SEQ ID NO: 32191 - DNA, 231 bp, Zea Mays
gtggtcgtgaacatgacggggtggcataccagtgcacagcgtgaccggtgccccatccgcggagcagctacgacggcgatgcttccttcccggatctcgcgttgcggcagagggcacgaggcagcgcgctgtgagtgtcgagcaatgctagaggccacggcaacttggggttggatcctggcgaggtgcggaccagagccgcgaccaaaactgcgaggtggcgccccgtcg

SEQ ID NO: 32192 - DNA, 371 bp, Zea Mays
cggcatccccccccctgcagccggtgagctgctgtgagcctatccagtggcgattccattcctctccgtgtggacgcaaggactcagtgaaccacttccagatactcgctgcttctcccgtgcccatggctacaccacttatagcaggacttgcagttgcagcagctgcccttgccggtagatatagcatccaagcttggaatgcttataaggcccggcccgtagttccaaggatgcgcaaattctatgaaggtggtttccaacctacgatgacacgaagggaagctgctttaatccttggtgtcaggagtgtcactgctttgttacccagttttcgtttgtaccttagagtttggcttgtgttatgtctt

SEQ ID NO: 32193 - DNA, 2480 bp, Zea Mays
ctctccctttaaatcgagcgccgcttcctctccgccgctttctctccccttcactcgagcgccgcttcctctccccttccatcgagcgcagcgcctgcgccgccgccaccactccgcaccgccgccagttccccacttcctccccacacccgaatcggattgaagccagaaggcaaggtgaagagtgggcttgggtaacggttgcaaagagatatccccaacagttgcagtcactcgcatccagtcggctcagctatggaggaggactcatcagcgatggagccgaataggctgcgcgaggccgaggcggcggctggggagctgaagaggctgcgcgaggccgggcagtctcagtacatgtaccggtctatcgccgacgccagggttgtcggcggccgggtctgcctcttcgccgtcgtctccgagatcggcgctaccgtccacagccgtggcacggatttcactgttacgttgagggtaatagatgaatcatacaagtctggaatatctgtaactttttttgctgacagcactgcactattgccttgtgtgaagtcgtgtggagatgtgatcagtctccataacgtcgtggtatagcataaaactctatttaatatgcaattcgcccttgattattcctcgaagttataaaagtgtcttttttatgtgttgttatttaagcatattttattttctcgtcattttttggaattttagtaacacatctgcactggtgcaatgcctactttaatctgtagataaagaaatatagagatttctttgtgcaatttgacaaaaagtactcttcattcgcgctgtttgaaggcaaaacgtatactgaatgcagtccatatcagacttctataagatatcatgacagcgaacacgacaaagattttttaaatcagatgagaacgtggctccctcaaggtctgaaggatttcacttcaaataattccgaattgtatttaatgaatttgaagtccgattctacttttgatctagtatgcaaggtttttcatgtacatgtggagaacaacaattcaatattttatgtttgggatggaactgatacccctgcagctgagtttccagcaatgtaagattttagatttgttttgcaattttttgtaataactaagaaaaacatctatgaaatataagatggtgttttagtgttttccaaatactaatgcagcttttaatttttgtttggttgtttttacttggtgcactgaacataagcataggtaatgaaaacataataagttttttcttagaaaaaaaatatttggtgatgtcagtcatgtcactattttcacttaatttacctgtttttgattggtgaacatatagtttggatgctgaggcagccaaatcactctctctacatgaaggcccccctctatccagggagattttatgtacaatgccagatttcggaactgtcctaaggattttttcagatagatttgtcaataaagtatcatatatgcaaaagaacatatattgggccaggttctggaacattacttgcaaacaaaactttggcatttggaaaggtactttctcggactccggtggagttcgcctattatcaaacaaagatgatagcgttgttgatcgtctaaagatgtatgacagccgcatcgccaaccgagttcgtcgtcggccgatggcaagcatcccctccagtgttactggtgacgcacaaattgagaaccttggtccgtgttgtggcagcacatccatgtgaagctagtttgctttcaactggtaactgtcatcttcggttgactcttgaggatcctacagcgagaattcatgcgtatgtccacaagaatgatttggtcggattctttggtggtggttttttgacagcagaagtgatagtaaaaaagatgaacatggtactgggcatcccggaaccacaaggcagcgtggaagttgccccctcgaccaggaatccaccttggatatggtgttgcttgatgtcatactatatggacaaaaacgatccctgggtcagcagaaagtaccggatctatagcacagccatcagggattgagcagagggatgctgctggaatgtgcaggaacaaacttgtaaatgaatgggacagatgctgtgtagtattggcatcttgcttgtagaagaggccatatgcttttgcaggtgcaatcagtgaatcattccatactgaacactgagaatagcacctcgggttcattctgtatgtgcctacactctagattgtcttttgggtgctcatcacgaaacgtgagcatatcttttggaaacagagacctgcgtttgattcctgtgcttgttatgttgtgattgatcattggggggaggttgagcttttgagccagtataaaaatactgaccggaccatcaatattattgatcattgggagtatgagtttttggacggtttctatttctgtattggtagatataaattttttttatccga

SEQ ID NO: 32194 - DNA, 3303 bp, Zea Mays
gtctaaaagctaatcccctacgctatctgtatatacaagacggaagcgcgaccccgaaaaaaaaatgtcctccatctccatcctgcacagatcctgcctccgcctaggtctgctgccgttctcaccactgcgtgctcgcgccaccactctacgccttccccttcctcttcctcagccgcggcggcatctccacctgccccgccggagcgccatgagctctgccgcgtccaggctgtcgcacatcgcggctgccaccggcggcgggggcggcgcggccggggagtcgaatgagtcgccgccggccgcatccgccgcgacccaggaagacgatggtctttcatctggggatatgggctaccgccttcctccaaaagaaatacaggacattgttgatgcaccaccacttcctgtcttgtcattctctccaaacaaagataaaattctgtttctgaagcgtcgagcactgccaccactatcagacattgcaaagcctgaggagaagcttgctggtctaaggattgatggaaattctaatactaggagccgaatgtctttctacactggaataagtatccataagctgttagacgatgggactttgggcccagagaaagaggtgcatggatatccagtaggtgcaaggattaattttgtcacctggtcacaagacggccgtcatatatccttcagtattcgagtcgatgaggaagacagcaaaagtggaaagctgagagtgtggattgctgatgtggagtctggagaagcaaggccactttttaaatcgcctgaaatatacctaaatgctatttttgacagctttgtatgggttaatgattgtacactgctagtctgcactattcctgcgacacgtggagatccaccacataagccatcagttccatctggcccgaaaattcaatctaatgagtcaaagaatgtagtccaagcgagaactttccaagatcttctgaaagatgaatatgatgcaaaactatttgattactatgcaacctcacagcttgtgttggcctctttggatggaacagtgaagccaattggccctccagctatatatacatctgttgatccatcaccggatgataaatacataatgctttcttctatccaccgcccatattcctacattgtaccttgtgggaggtttccaaagaaagttgagttgtggactgtagatggaaagtttattagggaactttgtgatttgcccctggctgaggacattccaattacgatgagcagtgtacgcaagggtaagcgctcaattaattggaggccagacaaaccttcgatgctgtactgggtggagacacaagatggtggagatgcaaaagtagaagtctcccctcgtgacatagtttacatggaaaatgctgagcctataaatggtgaacacccagagattctgcataaacttgaccttcgctatgctggcacctcttggtgtgatgaatctcttgctttagtgtatgaatcttggtttaaaactcggaaaatcagaacatgggtgctctctcctgataaaaaagatgtcagcccacgcgttttattcgaccggtcttcagaagatgtatactctgaccctggctcaccaatgatgcgaagaactgtgatgggaacatatgtcatcgcaaagatcaagaaagaagacggaaatatttatgtcttgttgaatgggatgggtgccacaccagaaggaaatattccattcctcgatttgtttgatataaatactgggagtaaagagcgtatatgggagagcgacagggaaaagtactatgaaactgttgttgcactgatgtcagacaaaactgacggggaactgctccttgatcagttaaagatacttacgtcgaaagaatcaaaaacagaaaacacacaatattacttgcagacttggccagaaaagaatcaaggtatgattcatcaaaagatggacctttgccatgtctagtttggtcctaccctggtgaatttaaaagcaaagatgctgctggtcaagttcgtggttcccctaatgaatttccagggattggtgctacatctcctcttctttggttagctagagggtttgtgattctgtctggtccgacaatcccaattatcggtgaaggcgatgaagaggccaatgacagatatgtggaacaactagtaacgagtgcagaggctgcagttgaggaagttgtcaaaagaggggtggctcaccctgataaaattgctgtcggtggtcattcatatggtgcattcatgacagctaatctgctggctcacgctcctcatcttttctgctgtggaatcgctcgctctggagcttacaacaggactctaactccatttggttttcagaacgaggatagaacactctgggaggcaacaaacacatatgtcgagatgagccctttcatgtctgcaaacaaaatcaagaaaccaattttacttatccatggagagcaggacaacaattctgggacattgacaatgcagtcagaccgattcttcaatgccttgaaaggtcatggtgcactgtctcgtttggtaatacttccttttgagagccatgggtactctgccagggagagtatcatgcacgtcctctgggagaccgataggtggttgcagaactactgtgtaaatggtactagcaaggttgactcagtgtcagaggctgacagtaaaaacaaaacattgtcagctagtggtggcagtgcagcccgtgaaggtctaaaccctgaggaactctcatcattaccaagatcgcttctgtgatcaacttcagttggtgttcatgaaacattccctggacagcaagcctaaagggaaaaaatagtgtatcgttgcacttctaccttaaccgactaccagggatgccttgattggcctcatatttgtttcgattgctgcaggtgatcatgttactggcatgcaggagccccctacccccccccccccccccacccccaccccacaaatataagaaaggcctagtctctggtggccactgcactcagatatatttgggtcaatttgtattctattggtaatggccaatggaagtcattcttgcgattaatatcatgtacagaaatatagccttttgcagttttgatcccaactcttgcacttggcagcgaactgatacgttggttttctttgacagcaatctaaaataaaataataactaatgagattatcatatgctccaatgtctcgcatcgtcacattttacctgttaccattatttactgcagctgttgtactgacattcgttgcccatttgagaggcgc

SEQ ID NO: 32195 - DNA, 511 bp, Zea Mays
atttattattaattttgttctattactcttgttatggtttggtatttacttacacttagtaactgctaataaaatttgaccaacttattaaaagcaatgctcagctataacccctattgttgatcagccttacgcttcacatgaacttccacctttggtgagttcatgcacattattccccacaacttgttgagctatggacgtatgtgagctcacccttgctgtctcacccccacaggagaagaacaggtggttcaagaggagccacacaacgaggagtttgacttgatctaggtggcatctcccagtcgactttatggcgccaaggatggaatttagttcattttatatttatcttttattttataagacttccgctatgtaataagtactctgatgatattgtgacatttatctctatacactctgttattatatgtgttgtcttctttggcgcatatatgagatgcacccggctttatcccttaaatccgggtgtgacacttctggc

SEQ ID NO: 32196 - DNA, 4571 bp, Zea Mays
tctgcaaacgttaaaaaaattaactctcttctcgggagagcccaactagactcgcagtcgcgtccatggcgatcttggtaggcctcgtcgccgtcctctccgccctcttcgccgccgcgcttcggcgcctcctaatctcttgtcgccaccccgcatacgccgccggtttcttccacccgtacaccaacgacggcggcggaggcgagcgcgtgctctggtgtgcggtgcgcgccgtgcaggagctttgcccggacctcccctgcgctgtctacaccggcgatgccgatgcggcgcccgaggccctcgccgcacgcgctctcgaccggttcggtgtccgtctcctccgcccgccgcaggttgttcacttgaataagagaaagtggatcgaagcaagcacgtatccccacttcacaatgatcgggcaaagtcttggctctgtttatcttgcatgggaagcccttactaaatttaccccgcagttttactttgatacaagtggctatgcttttgcgtatccactagctcggctatttggttgcaaagtcatctgctatactcattaccctacaatcagttctgatatggttgaacgtgttaagcaccgcagttctatgtataataacaattctcttatcgcagggaggtatgcactgctcagagtgattagtttcaactcttcttatcgtgcactagtatattaatacaggaaaaaacaagaggcattactgtatctgagaaaaaaattgcaaaacatgataaaatcaccataatgtgctagctaaccatgcatgtttgtcctcagtgctgtcttaatctatcctacgctctttattaacacatgctttgtccttcttaagatgtcacatttagattaataggatcaagtaatgttcaactagtaattattttgccactcattggtttttgcaatctagatgtcttttgctgtttccgtagctattaattatctttgtttctcaatatgtatcaatcattatatctttctgttcttatgtaacaataatgaccatgaaaactaattgggcactcattctactgtagcatttggctatcccgatgtaaaatcctctactataccatattcagttggttatatggtctggtgggttcatgtgcgcatcttgtaatggttaattcctcatggacaagatcccacatcacaaatatttggaagatcccagagcgtactaagagggtgtaccctccatgcgatacttctgctcttcagatgcttcccctggaaagaccaacaacacctcctgttcttatttcagttgcacagttccgcccagaaaagatagaaaagctctatagaagaccaaatacaaaaaaacctccttacggaggccagtagcaggcatacacaaagagatccatcagaaaacaaaccaaactaccaaaaagccaccctaaagatctgctaagggtgcagccaaatgagagaggccctttgcaccagatatttcccattttcttctttcctcatcagcagttctgagactcagagaaacacttggattccctccatcaaagacacatttattccgatacttccataaagttcaagctcctaatatgtgaagagagtcaagtccttttttggtaagaccaaagactgctccttctacctcttcccaccagcccaggaaggaatctgcatccggctgtggtgcaagcgaatagagaccaaatttcctcaataaaagataccaaaattctcttgagaaggagcatttcacaagaagatggtacaaagtttcttcctcttgttcacataagggacacttctccgggtgattcaagcctcgttttgccaacctatcagctgtccaacatctcttctgggcaaccaaccatatgaaaaaacgacattttggcaaggcccatgttttccatattcatttataatgaccaaaactcacagatcctaggaacaagccctcatatgaagatttggctgagtatgtgccgtctagagcaacactgaaaatatgcttatcctcaacctcaggctgcagctctaatcctgaaatcaaatcccaaagtcaagatttaaatataaaagcttaacttccattcacccacttcagagtaacatttatctatcttgctcttccaccaggcccatggccttcagctggaggcatttgcacttgctcttcaaaagctagaccctgactttcctaagccaaagattcaatttgtcggtagttgccggaataaagaggatctggacagactacaaaagcttaaggacaggtccactgaactacacatagatgagcttgtggagttccacaaggatatttcttacagggacctggtacaatttcttgggggtgccattgctgggctccattcgatgacagatgaacatttcggaataagtgttgttgagtatatggcagctggagctattccaattgcacataaatcggcaggaccgatgatggacatcgtgctagatgaggatgggcatcaaacaggatttctagcctccgagaaggaggaattcactgaagcgattatcaaggtcttgaggatgccagagtcggggaggcaagaaatggcagctgcggctaggaaacgtgcacaaagattttcagatcagagattccaccaagatttcactgagaccgtccgccctattttgtcagcaagggaaggctgactgacaagctgcagtttccacctaacaatctgaattctctgtcaagtttcacacggtacagtgaaagacttgcaaggggcactgaattggcagattattgctgctcccttttcccagactgcttgtgtattgtgctgcatcgtgtaacgctactgtgcagaaatagatcacagaaagaaaactttcgtcagcgatatagaattcaaaatggtgatcgtggtgcacggttttgaatctttcttgcggcactctagtaccaagttcatctttgtactgagcaaaagcttctgcttgaattgtgccactgactggcggacccatggactttttatactaattcaatctgtcttccactctagaatttccatgatggagacgcaaatattgatgaactataatttactaggaattccttagataaaacaaatgggtaagcacgttatcaccagggctttctgatcttagtgatctgccatgcacgtaacgaagtacacgaataacaaactcaaccaatctctaagctgatcaaccatgtctcattcaacagatgggagccaagtccagggagctccacagcagcacgtcgccgtcactgtcaccatggctcgcctcagacgacgaacttgtcgcctccggggcgccgtcaccgggtgaacgctcctcacgaggcggcttgacatcctctgctgtatccattgatggttcctgctcgtgctgctgctgaactatctctcgctgcttcttccggcacgcctccctcagcccggagagctgatcacgcacggcgtggccaccggcagcggcgccgaggcgcatcttgatgcactccgagacgccgctgagcgcgtagagcgacgccgagatcttcctctcgtagtccatcctgctcatcatcagctcctgaacggccgtggccggctcgccaccgccggcctccaccgcgccgccgagctctgccgccaccacctcgaacggcgagcagagcccgccctcgcaccccgcgcccggcgacgcggtctgctggtccatgaactggaagtccagctcctcctcctcctcctcttcctcctcttcttcctcgtcctctatttcttgtgagctgttctcgtcgctgccgcagtcgtagctcaagaagtcgtcgacttggaaggcgcactcctcgccgccgccgtacggttccgcgcacagcggcccctgcagcagcgccgccgccgcggcctcctgctgccgagctggggtggcgttgaggaggagctgctgctggttgttgcgggccctgagccgcaggagcaggaggttggtgaccttggacggaagagccggcggctgcgttggagaccccatcagccccggcagcggcggcggcgtcggaggaggcggcgcgggatgcgcggcggcggctactgcgacggaggaagccggcgaggggcgcggccagaagttggtgcgcgtgttggcgccgcggaggaggcacgcggcctcgtcgtaggcgcgggcggcttcctcggccgtgtcgaaggtgcctagccacacgcggatcttctggatggtgtcctttatctccgccacccaccgccccgacggccgctgccgcacacccacgaaccgcttccttccccgccgctgctgctgcgccgccgccgcctcagccaccgcggccatgctagtaccgcccgacgatgcccatgcacacgcgtctgttgaagccagagccagcggtggtggcagcgagtggacgccgtcgatacccgcggcggagtcggaggccttgcgcttcctcgccatggatgtagtagcccgatcgagctcagcgcggtggagggaggagatgatgaacaagcgcactccactgcaatatatagtgggagaggagggagtg

SEQ ID NO: 32197 - DNA, 485 bp, Zea Mays
cgctcacctaacacccgaggtccgatcgtggatctccgtggatctctagcggttagttggcgtggtcctggctataagactatgcctgggcacgcatctgaagccagctgaactccacgcttgggtcgtgcggcctaatcccttgaacctcgctgccgcctgctaggggaaaggcctgccattggctctgctctcgccatgacggttgtggagccgaattgaagcccttggacaatcggtggcgattaccaaaaccggccacaaccttccgctacggggaaatccaccgtgaggccactaatttctcaccgtcgtttcccctacgccgtgattttgcctggtacttggctggccgcaaccaagcattgactcacggtcaagaataggtaccacatgatgaggcgcatggaggatgctgcgatgtgttcgtgagaggtctaggtcgttgtctcctagtcaactttgggttgctggatcgttgtctc

SEQ ID NO: 32198 - DNA, 3560 bp, Zea Mays
gaatattagctataacctatgtttgattgtgtatatttgtatacttttattgtgtttcaggaaggacaaaatcatgttgtacaggatcctcccacatatggtgcaccaaagtttgatagaacccccagttagtcatgtcgtgacatgttcttatctctactactaattatgtgcctatcgtaggcgttcacaattccttggttctgtcgtcgcgctcgcctgccatctccctccgcgctccatccgccaccatccgcgctcgcctcccttcgcgcatcctacaaccgcgtgctccttccttcgatggtgcggatcccccgtgactaccatctccctccgccctcccgcgctccatccgccaccatccgcgcttcctacagccgcgcgctccttcgacggcgcggatcccgcaccctcgaatcacgccagcagatcccacaatcaagcagcggcgacaggaataggggcgggctacgcgggcgctactacgacgagggtgagggcgagcgctccggcgccgcggcgccattcatcataatcggtcgagctcctggagggaacggctgcagagcggacgagatcgaggagcgggcgggcgggtgccgcccgtgacggcgcctaggctcaggctccgcgacggccgccacctcgccgcgcaaaggtctcaccggctcccgagaggacagcgcccgcgcctcccaggtttcaaaaaaccttctgagaaggcctgttgatattctaaggaaattgtttgatgggaacaccttgagatcacaaatcaaagaattctttaatcgctttggtgctggagaggctgctgcaatgtgcttaatgatagctgcgaagctactttatgttgaagatagtctgataagcaattctgtttctgagaaagccactgaggcatttgaggaccctgggcttgttgggatgcctcaaattgttggtaccactgctttatctaatacacgaacttaggctggaggctttactatgggccaagttgttcaagaagcataacctttgttttctggtgcatatgaagggctttgtttgtgctcgtcaagactactttatctcatatgggagtttcctattatagtgattcgaagaccggctggtactaataaatgcaaggatggtgtaattgtttgtaggctttcagctggggccatgaaaattcttgagagcaagattcattcactggaaacatttttaagatctagaagaaataagagaaggggccacgcagtaccattgacacttaccctcaaggcctacagttgttgtaattgaagcgggtcaagacatagcatttgcaaagatttagttcattctgatcactctgcaatatttcggtagtcgatggatggagaatggtggatcgaggagaccgatgacatactgctgcatcccgtgctgctcaatgggaagcagtaccggccagtctggtcaaacgacggcaccgtgatccacgcagatttctagttaagtttcttctgatggtgatggtactaaagaggactatgttcatatccgggcaaagcgaggccaagccactaacagccaaagccttgcagaaagactagggagaaagaagataagtgagaggatgaagcttcttcaagatcttgttcctgaatgcagtaagtgcatctgcagttcttgtcaatgaaactcgcaactgttaaccccgagcttggctttgacattgagcagatcatatccaaacaaatgctgctttcacaagactgacatcttgctttctatggagtcaaaccaggatcaagcggccttactggcccatttaaccaaggaatcatgcagccataattgatgtgcaccattgccaatcccgttgatgttttgcatggagctattcacgaggcgtcaacaatgaaccattattgatttgtccactgttatgttcgttgctggtgcaatcatgggatacattatgttcactgaatctacactcccagttcacactgaacttacccctaaatcttgtggcttccaagattgcagtctagactacggtgatgaatccaataaccaaatatccttggacttttattgtagctttttgtgtgcatttgttccgatacttaacaattaacattatatgacaccatagtttctctaatcacatgtaactccatctagccatctaggtttgtcctaagtcaaacatatcttttaattttgattagaaatatctataaaaaataattgtcttaaataagcagagttatttggttttagtaatgaatttagcaatgccaatgctatttttatcgttctatataaattttagatattcatggtcaaacttaaaaatgtttgacttggacaaatatagatagacctacacatgcattgtgattttaggaagtcctacaattctcctccccaaagtctgctatcaacttctaacagttagtccagttttcatgaacaaatttagttttaatcattctatgttgtgccaaccgccagcaactaataatcagagctgggtcatatcatcatatcatagtagattgtatagctttcttccctgtgcatgcttactggttactagatgaaaaaggtcgtgttacgttatggcgcactcctctcctttgaataggacatgctttcacactctcaattcggcatatccttctagagactagctcacactccaatggtcttctaaatgaatagcacactatagtcaagagtatgacttaccaaattcattattggttccaagcatcttgaaagagaagtccatcgtctctcttactgtcatctcagcatggctaacagaagcacgcaggtactgtggtgttgaataattcatttattatccattgtacatgacttttcctttgaattgttgtcaattgttgtccattagaaaatatatactatagtcgatgataacatatgcgcaaaggttttatcgaataatttttgtgttctcgcaacttacgtgcattgtattatactaatataaagtaggagtttctccaccttcctttcatcatgctacttcttgctgagggtggcgtgaaaaagtcagcaacaagttcctctatggtggcgacagagaagacaagggaggctctggcgacattgtggcgacgacgagaagcgagcaaggatataaatcgatctgtttctttggaaattagctgtagtagaatatttacgtgatacaaatctctattctctatatctctatatctattacgtttctcatgtctctatttttattataatggtttggaaaaatgtcgctcatcttctgctctaatctttcgaaattaggtgtagtggaatattattgccagatattgctacactacaatagtgaaattattgtccaaaattgaagattgccgtatgccttaggtcactataaaatcgagttattttataataatagttttttgttttacataagccccactcttttatctaaaagcccataaattattgtccaaaatggaagattaagagtttgtttattacttctaaattatcctttctatatctaccatatgtaccat

SEQ ID NO: 32199 - DNA, 724 bp, Zea Mays
ctgtgtttggcaaagggtgggtgcgtgcgtcgtcgcaggcaagccgccaagcactagctcctccctctgctctgctgatactgagacacagacacacaacactactctctctttccatccctgcgcgtcgtgcacctcgttccatgtatctgtcagcctgttcgtacgcgcgcggggcaggaggtgccgtaatttcgtttcctttgcgtcttgacaaggggcgccgcgcgctaccccgccagcttctgcttccctgtggcggtccgtgctctccgtttcatctcctcatgcattactaattttgtttcacggggcatttgtatcgtcatggagaaagaaacttctccattccgtccccggagtctatggccgtgagacctctggcccgcaacgtcatggacagctaccaccgtcgtccggaggacgtacgactgcacgagcgtccaccccacggtttgcgacaggcgaaggtacgatccagccatgcacggccggtggcaccgcccaaggccgcgtcatatctcatatcgttcatgacttcatccctggtgcatgctgcatgcacccatccgcgaaagcgcgccattgctttttatgcgtagtgtggaagacagccgattgatttatggaagatgcagttacagattgtttagtttgagaaataaattagtttatcatcttctcactcctcattttttttgtttggtttctgattcattagcag

SEQ ID NO: 32200 - DNA, 273 bp, Zea Mays
tcccacctttggcgagttcatgcacattattccccacaacttgttgagcgatgaacatatgtgagctcactcttgctgtctcacaccccccacaggtcaagaacaggtaccgcaggatgaggcgtatgaaggatacggtgatgtgttcgtgagaggtctaggccgtcgtctcccagtcaactttgggttgctggaccgttgtctccttataatgtaattatttgtttattttgtatagaactcctattatatagtaaagttgtgacattcgat

SEQ ID NO: 32201 - DNA, 371 bp, Zea Mays
gcagaagagaatagagcaaagtgtgtgtgtgcagaagagaattgagcaacagagacagataagattacgggagagaacgcaggactgtgagagaatattcttctacgtacatcgcttttcctattacatcctacggcagcacggcgctacaccgcaccacctcccacatggtgcctacaggttcctcaagcactgacgaggaagtcgcccgcaagaagatcgaatcgaagctcttctggccccctcccaagccgctaaggaggccctcgtcgcccgcgcccgggtacagactgctgctaccgttgcaagcagacgccaccgctcaggctttgttagtttacgcaaatccagctttggattagtatggactg

SEQ ID NO: 32202 - DNA, 200 bp, Zea Mays
ttgcaatctcgatgacggagagtacatgctcatcccgagcacggagctgtccacgaggaagaccaggagcaagctcccgagactgccattgaggatctccccgcagccccagctattgaaggcaagccccggttttatgcataatcgtatctatatatgctactttactacatttaatgtttgtaggactgtaatgtgca

SEQ ID NO: 32203 - DNA, 608 bp, Zea Mays
ctcatgatccaatctcttctgactccaggcatctaacacaatttaccaagaagggttcagatcccctgtccttcaagttcgttgagcatcacaaggtagatataccttttatcctgcttaatctcttgtggttgaatctaatagagctttccttatctgcagacacaagcgtttacctttatctcatcacatgacgaaagtgtttggaacttggatggagagatgtttcaggcatgtgaggtatctgtccaagcgtgccgggggcttgtcaacttctttgcttcggggccagagctgtagtaatgatactcgtaagttcctctttgcatgaacgaaggatgccaggagttcatattttttatttagagagtcccttatttcgacatgttgacatgttgacatgttgtgatgttgtacactcttatttgtattttagtggagacctagaacactttgttgatagatatactgttaatatttgttgatagctatgtggcatggaaactacaacccatttgtgctatagaatagaggaacaaaaggttttgattgaattaatgaagtaaaagtttactttctgttttgcgagaaaaaataatgaattgaag

SEQ ID NO: 32204 - DNA, 213 bp, Zea Mays
ggattcctaggatacgatcatctttggagatgggaaccaaggcaaggtcaaaggattgggcaagatagccatcaccaacgagcactccatatcgaatgtatttctagtagagtcgcttgtttacaaccttctgtctgtaagtcaattgtgtcacatgggttacaattgtctttttttcaaatgttgatgtatctatctttagaaggagtgatg

SEQ ID NO: 32205 - DNA, 4464 bp, Zea Mays
ataaggcctgcctggccacaccgcctcttccctttcgctccgctccgctcctgcccccgccccatcccttcctcctccgcctattggcctcgtccgcttccgcttcgacccctccccggcccgcctcggcctcgcgctccctcctcctcctcctcctcctcgcctccgcacccgggcaacccccgccctgccacggcgccgcggccagagccaggctctcccgcgtggaattcacgggacggaggccgctggtgccgcccgccgccgcctccgccaagatggacgccggggagatggaggacgtgcgggccgccgcggccgccgaggaggtcatcagcagcaggggcggctccgtgctggggaagaagaccatcctcaagagcgaccacttcccgggctgccagaacaagcgcctctccccgcagatcgacggcgcgcccaattaccgccaggctgggtcgctgcgtgttcatggtgttgcaatgcccacgatggaagggattgctaatgtgctaaatcatatcggagcacacaagaaaggaaagcaaacccggattctatggcatagtcttcgggaggaaccagttatctacatcaatggtcgaccctttgttttgcgggatgttgaaaagcccttctcgaatcttgaatacacgggaattaaccgggagagagtggaacaaatggagtttcgccttaaggaagatattcttcaggaagcttcaaggtatggtaataagatactggtcactgatgagctgccaagtggtcagatggtggatcagtgggaatcagttgtgtatgatacagttaagactccacttgaggtatatgaggagttgcaacatcaaggctacctagttgactacgaacgtgttccaattactgatgagaaagcaccaaaggaaggagattttgacaacctggtacgtcgaatctctcaagttgatatagaaacagaaattgtgtttaactgccaaatggggagggggcggacaactactggtatggttatagctacattggtttacctaaaccgaattggagcttcaggtatccctagaacgggctctattgggaaggtcttctatgctggaaatgatgtagacgattatatgcctagctcagaagaagcaatactcagaggcgaatatgctgtcattaggagtttagtccgagttctcgaaggtggtgttgaaggcaaaaggcaagtggacaaagttattgacaaatgcgactccatgcagaacctaagagaagctattgctacttaccgcaataacattcttcggcaacctgatgagatgaaacgagaggcatcactttccttctttgtggagtacttggaacgttattacttccttatatgctttgctgtctatgtgcattcggtgagctctgctcaccaaacaacattatcagtagaagttagtttttctgattggatgagagcaaggcctgaactgtacagcattcttcgaaggctattgagaagagatccaatgggtgctcttggttactcaagttcaaaaccccctcttacaaaaattgttgagtctgctaatgggcgtccacaagatatggacgttgttgctgccatgaggaatggagaagttcttgggcgtctaactgttttaaaaagcgaccactgcccaggcagccacagccttaatttacccgagagggtggagggtgcaccaaattttcgggaaatccctgggtttccagtctatggtgttgcaaatcctacagttgatggtattcgagctgttatccagtgcatcagtacaagcaagggagggcgacctgtgctatggcataatatgagagaagaaccagttatctacataaatggaaaaccatatgtgctacgcgaagtggaaagaccttgcaagaatatgctggagtacacagggattgatcgtgatagggtcgaacgcatggaagctcggctgaaggaggacattttacgcgaggcagaaagatatggtggagcgataatggttattcatgaaactgacgatggagagatctttgacacatgggaaaatgtagataatgaagctgttctgactccgttggaggtatacaaaaacttggtgagtgaaggccttccgatcaaatatgcacgggtgcccattactgatggtaaagctcccaaaagttcagactttgacacgatagccttcaatgttactgctgctagcaagggcactgctttcgtattcaattgccagatgggcaggggcagaacaactacaggaactgtgattgcttgcttgctgaaacttcgaattgatcatggcagacctattagaatcccagtttgtcaatatgaccatgaagatgatgctatttactcaactggaggagatgcaacagatcacaatggtcacttgaattcagaatcatggaaacctcgtactttgacgaagttaaattctggatttggaatcaatgacattcttctgctgcgaaaaattacaagattatttgataatggaattgagtgtaggcagactttggatactgttattgatagatgttcagctttgcagaatattcggcaagctgttttgaactacacaagagtaattaatcaacaacatgttgagcctagagttaggagggttgcattaaatcgtggcgctgaatatttggagagatacctcaaattaattgccttttctgcataccttggtagtgaagcatttgatggtttctgtggacaaggacaaacaaagatctcatttaaaggatggctgcaacagcggccagagatccaaaccatgaaatggagcataagactgcgacctggccgttttttcactgtgccgcatgagcagaaagcaacatatccacctccacaagaaaaggtcaagcagtgtgaatttccggggtgcacctcatgttattaaggtggatggataccctgtgtatagcatggcaacacccactattgatggagcgagtgatgttttgtcgtatctgggctctaaagacacaaccggaagaaacattgcacagaaggtggtcgtcacagatcttagagaggaagtggttgtttacatcaagggatcgccatttgttttgagagaactagatcaacctgttgatactttgaagcatgttggcattagtggtccaatggtagagaacatagagacaaggctaaaggaggatatactctctgaagttaaacagctaggtggtcggttactgcttcatcaagaagaatttaatgcagccacaaatcaatgtagtgtggtaggttactgggaacacatagatctggaggacgtgatgacaccagctgaagtgtacagcacattgagagacaagggctattgtatcgagtacaaaagaatacctctaaccagggaaagagaagcattagctgccgatgtagatgctatacaatcatcaattgatgaatctgctaggtactatctctttatttcacacactggatatggaggtgttgcttatgcgatggccattacctgcctgggactgagtgcagatgcaaagtttgtaatggaagaaacagcagaaacacactttgtatcaacatctcttgcgaaaaatgtgtccatcaaaactaaaactgacatagcacttaagcagggtgactaccgtgacatattaaaccttactagagtgttggtacatgggcccaagagcaaagaagaggttgacacagttattgacaggtgttctggtgctggtcatctgcgcgaagatattatgcattacaggaaagcactgcaagattgttcacatgacgacgacgacgactgtgatgaggaacactcttatctcactgatatgggcacaaaagctttgaggcgttacttttttctgatcaccttcagatcctacctatacagcacgacatcatgcaaaacaacatttacatcatggatgaaggcaaggcctgaacttggccacctttgcgacaatctaaagctggacaaataggccatcttcatgtgacgtgattatgtagttgtgtcacttccttggacacattcacccagagtttcaaaaaggaaggagactaaaagaacgggtagagaggaagcagtggttatgggagttgtggacaatgaaagagcagcttaggctgtccgaaagtagggcattgtactatacttgtcggtgttaattgacaccagcaagcatgtatatattgtcaggcgtattatagatgaacatattagatatttctattgtagtattttctcaaattttaaaagaatcatttcatgcagttcattctcatgtatgtatctgatatgcttgctttttcagcagcgtttttttagacaaagctcttcggcagctttgatttttgacttctctgccttctgggcgtcaatatggccgcagccttttctaggagttgtattgagctaggatgaagcttgaaagaaatacgatgtcttgtttctaaagccccct

SEQ ID NO: 32206 - DNA, 1691 bp, Zea Mays
gacaaatggagtagcactagggagacgtgcagctgatgagtgacactggcctggaggcctaccgcttctccatttcttggtccaggcttattccaagaggaagaggagccatcaaccccaagggcctcgagtattacaacaacctcatcaatgagctagtaaaacgaggaattgagatacacgtgaccctgtcccacctggattaccctcagatcctggaggacgagtaccacggctggctgagccccaggatggtggacgacttcgaggcgtacgcggacgtgtgcttccgcgagttcggcgaccgggtgaggcactggaccaccatggacgagccgaacgtcaactccatcgccgcctacgacaacggcgccttcccccccggccgctgctccccgccgttcgggttcggcactaactgcaccgccggcggcaactccagcgtcgagccctacgtcgtcacccacaactgcatcctggcgcacgccgccgtcgccgccctctacacccgcagctaccgtgccgaacagcagggcgtcgtcggcatcaacatctacaccttctggaactaccccttctcccccgcccccgccgacgtccaggccacgcagcgctcgctcgacttcatgatcggctggatggtcaacccgttggtgtatggagactaccctcaagtgatgaagaggatagtcgggtcccgccttcccaggttcaccaagcggcagtcggagatggtccgcgggacggcggatttcattggcataaaccactacacctccgtgtacgtcagtgatcgccccaacgacgcagcagccgacaccacggggccccgggactacaatgctgatctgtcggctaccttcagattttctcgcgatgatccagctactggccagttcgtcccaatcaacatgccaagcgacccgcagggactgcaatgcatgctcgagtatctcagccaaacctacaacaacatccccgtctacgtgcaggaaaacggctacggggcgctcttcaacgactccatccatgaccacgagagagccgagtacttgagtgcctacatgggcagcgcactcgctgcactcaggaacggagccaacgtgaaggggtacttcgtctggtcgttcctggacgtgtttgagctgctggcgggctactactcgcgatacggcctctaccatgtcgattttcaggacccggagctgccgaggacgccaaaactctctgcgctgtggtacagcaagttcttgaagaatgaaatcgacataatagagaacgttgtcagcgatactgacgatgcgcgctcgcatgctgctgaacaatgagttagtttgctagcaagcagcaggcagcagcacacgacatatcacatatgcatgtcgtagtagcggaggaaaagaatgtttcttatccattctttttttttcacaagtccacagaagctcagaattttcagcagttggtcaggcccggaattcagtgttcgtgaatcgtagccataggcaccctctttggctgtagccctgtagtatgcgctacgtacggcaacagttgtcatgagtcactctgtcgctactgacacaataagtaatacagaaaggaactattactcttgcagttgcacgtcgacgttttggatttcttaactaatttgcctatgagtgtggtgccggcatccaccatttttc

SEQ ID NO: 32207 - DNA, 5113 bp, Zea Mays
ttgctacctccaagcgagaagataattacaggtcgcgtctcgtagcgtccacccacgccgacgccggactgtgcgcattcttcgggaacgggacagaggagagaggcgagcgagcaacgagacgctgcgctgaccgcccgccccgcccgcgcccattcctcctcccactccatcctcctcctccgcagcccgcgcttcgccgctcgcgcctccttcccatcctcttcttttcaccgccacccctcttcgctctttcggagccaccgtgagtgcgccgcggcttcatcttgctgatcgtgtccgtggcttcttgatactccgtgactgtctccgtccgaagcgagtgagcaagccgaccaacagcggctgagattcgctgcaacgtcggtatcaaaaggtgtccgagcggttgagattcgcgtgccatgtccggattcagtgccgcggccaacgcagcggcggctgagcggtgcgcgctcgcgttccgcgcacggcccgcggcctcctcgccagcgaagcggcagcagcagccgcagccagcgtccctccgacgcagcgggggccagcgccgccccacgacgctctccgcctctagccgcggccccgtcgtgccgcgcgccgtcgccacgtccgcggaccgcgcgtcccccgaccttatcggaaagttcacgctggattccaactccgagctccaggtcgcagtgaacccagcgccgcagggtttggtgtcagagattagcctggaggtgaccaacacaagcggttccctgattttgcattggggagcccttcgcccggacaagagagattggatcctcccgtccagaaaacctgatggaacgacagtgtacaagaacagggctctcaggacaccttttgtaaagtcaggtgataactccactctaaggattgagatagatgatcctggggtgcacgccattgagttcctcatctttgacgagacacagaacaaatggtttaaaaacaatggccagaattttcaggttcagttccagtcgagccgccatcagggtactggtgcatctggtgcctcctcttctgctacttctaccttggtgccagaggatcttgtgcagatccaagcttaccttcggtgggaaagaaggggaaagcagtcatacacaccagagcaagaaaaggaggagtatgaagctgcacgagctgagttaatagaggaagtaaacagaggtgtttctttagagaagcttcgagctaaattgacaaaagcacctgaagcacctgagtcggatgaaagtaaatcttctgcatctcgaatgcccatcggtaaacttccagaggatcttgtacaggtgcaggcttatataaggtgggagcaagcgggcaagccaaactatcctcctgagaagcaactggtagaatttgaggaagcaaggaaggaactgcaggctgaggtggacaagggaatctctattgatcagttgaggcagaaaattttgaaaggaaacattgagagtaaagtttccaagcagctgaagaacaagaagtacttctctgtagaaaggattcagcgcaaaaagagagatatcacacaacttctcagtaaacataagcatacacttgtggaagataaagtagaggttgtaccaaaacaaccaactgttcttgatctcttcaccaagtctttacatgagaaggatggctgtgaagttctaagcagaaagctcttcaagttcggcgataaagagatactggcaatttctaccaaggttcaaaataaaacagaagttcacttggcaacaaaccataccgacccacttattcttcactggtctttggcaaaaaatgctggagaatggaaggcaccttctccaaatatattgccatctggttccacattgctggacaaggcgtgtgaaactgaatttactaaatctgaattggatggtttgcattaccaggttgttgagatagagcttgatgatggaggatacaaaggaatgccatttgttcttcggtctggtgaaacatggataaaaaataatggttctgattttttcctagatttcagcacccatgatgtcagaaatattaagttaaagggcaatggtgatgctggtaaaggtactgctaaggcattgctggagagaatagcagatctggaggaagatgcccagcgatctcttatgcacagattcaatattgcagcagatctagctgaccaagccagagatgctggacttttgggtattgttgggctttttgtttggattagattcatggctaccaggcaactaacatggaataagaactataatgtgaagccacgtgagataagcaaagcacaggataggtttacagatgatcttgagaatatgtacaaagcttatccacagtacagagagatattaagaatgataatggctgctgttggtcgcggaggtgaaggtgatgttggtcaacgcattcgtgatgagatattagtaatacagagaaataatgactgcaaaggtggaatgatggaagaatggcaccagaaattgcacaacaatacaagcccagatgatgtagtgatatgccaggccttaattgattatatcaagagtgactttgatataagcgtttactgggacaccttgaacaaaaatggcataaccaaagagcgtctcttgagctatgatcgtgctattcattcagaaccaaatttcagaagtgaacagaaggcgggtttactccgtgacctgggaaattacatgagaagcctaaaggctgtgcattctggtgctgatcttgaatctgctatagcaagttgtatgggatacaaatcagagggtgaaggtttcatggttggtgttcagatcaatccagtgaagggtttaccatctggatttccggagttgcttgaatttgtgcttgaacatgttgaggataaatcagcggaaccacttcttgaggggctattggaagctcgagttgaactgcgccctttgcttcttgattcgcgtgaacgcatgaaagatcttatatttttggacattgctcttgattctaccttcaggacagcaattgaaaggtcatatgaggagctgaatgatgcagccccagagaaaataatgtacttcatcagtcttgtccttgaaaatcttgcgctttcaattgacgacaatgaagacatcctgtattgtttaaagggatggaaccaagccttggaaatggctaagcaaaaagacgaccaatgggcgctctatgctaaagcatttcttgacagaaacagacttgcccttgcgagcaagggagaacaataccataatatgatgcagccctctgctgagtatcttggctcgttactcagcatagaccaatgggcagtcaatatcttcacagaagaaattatacgcggtggatcagctgctactctgtctgctcttctgaaccgatttgatcctgttttaaggaatgttgctcacctcggaagttggcaggttataagcccggttgaagtatcaggttatgtggttgtggttgatgagttacttgctgtccagaacaaatcttatgataaaccaaccatccttgtggcaaagagtgtcaagggagaggaagaaataccagatggagtagttggtgtaattacacctgatatgccagatgttctgtctcatgtgtcagtccgagcaaggaatagcaaggtactgtttgcgacctgttttgaccacaccactctatctgaacttgaaggatatgatcagaaactgttttccttcaagcctacttctgcagatataacctatagggagatcacagagagtgaacttcagcaatcaagttctccaaatgcagaagttggccatgcagtaccatctatttcattggccaagaagaaatttcttggaaaatatgcaatatcagccgaagaattctctgaggaaatggttggggccaagtctcggaatatagcatacctcaaaggaaaagtaccttcatgggtcggtgtcccaacgtcagttgcgataccatttggcacttttgagaaggttttgtcagatgggcttaataaggaagtagcacagagcatagagaagcttaagatcagacttgcccaagaagattttagtgctctaggtgaaataagaaaagtcgtccttaatcttactgctcctatgcaattggttaatgagctgaaggagaggatgctaggctctggaatgccctggcctggtgatgaaggagacaagcgttgggagcaagcatggatggctattaaaaaggtttgggcatcaaaatggaacgaaagagcatattttagcacacgcaaggtgaaacttgatcatgagtacctttcgatggctgttctcgtgcaagaagttgtgaatgcagattatgcttttgtcattcataccacaaacccatcgtctggagattcttctgagatatatgctgaagtggtgaaagggcttggcgagaccctcgtgggagcctatcctggtcgtgctatgagctttgtttgcaaaaaagatgaccttgactctcccaagttacttggttacccaagcaagccaattggtctcttcataaggcaatcaatcatcttccgttccgactccaacggtgaggacctggaaggttatgctggagcaggattatatgatagtgtaccgatggatgaggaggatgaggttgtacttgattatacaactgaccctcttatagtagaccgtggattccgaagctcaatcctctcaagcatagcacgggctggccatgccatcgaggagctatatggttctcctcaggacgtcgagggagtagtgaaggatggaaaaatctatgtagtccagacaagaccacagatgtagtatgtatgcatctattagacagctcaataagcactgttgtacgcttgtatggttgggacatatgggcgttatggcatgtatagttgtatgcctagatgtacaacacgtgtactcgtatatatatatataaatgctgaaacaagcattggtcctgtactgtagtttctacatttcattgtcaccaataattaagtgtactcctatggctgggagtctatgaaaatggacgtgttgacttattgggtaataaataatttatatatatacttgtgcaagaa

SEQ ID NO: 32208 - DNA, 3121 bp, Zea Mays
aataagcaagaaccttttctgcagtaagccaataagcaatgcagtagtgggcgcagctccggaggagtggaatgacggcgccaccgaatgctagcatgggaccgctcagtttgggtggctgcggggctctcctctccactcctcagcctaattcgtggcattgccgcgggttctcgattcctgagaggagcgtctttatgttgccactgcgccggggtttgtcaaggaagaggggctgggttcttgattcaagaagtaacggtgctgtggctcgtgatgaggtcggtgccgggtcgtcagagcttcggcacatcgagaaggagctgacgttcagcccgactttcactgactatgttaaaatcatggagtcggtgaagttggacaggagcaagaatttacatggcgccgatggccagagtttgaggagaaggttcgcgggtgatggccgacaaaggaataggaggtctggtgatgcaaggaataaatcatttgaaaggaatcaggggcctcagagggacttggcgaaggatgagaatcagaaggatgttacaggctttgtggataaaagagcaactggtcatgtaaaaagtagcaatcgcaggcaaggggaggttgaagactatgcacagagaagaataattcgtggtggtacaagaggaaatggagacaatgggcagttctcatcacctgtgaaggctaaagatactaggggtagtatgtctgttcataggttggtgacgaacaaacagactcagtcagttgcagggaacgatttacaagggcgagcaacttatactccatctcggacttctgcccttccaaatagcagtattccatcaaagaatgctaaggttcaaatgagaaaatacgactatactatgacaagtagcagaatagacttaaaatatcctagagagacatttcccaatactgaggtcaacgctgacagtaatgttcaaagaaatcagcaaagagtggagaccttagggagaaactttgtagtacgtaggtttggggagattggcaccgactctaagaagtctaccgtaagcaaaatttatgggagtacacaggcaatgcctgagcatgatagccattcaagtgataatttggagagtgatgaacgtaggacagttcaattgcatagaggagcaaatgttaaaatggggaaatttgttagtagggatgctgaaactacagattttgatgatagagctgctttcaaaacttttgaggtatttactgatgtcaggaataggccacggatccttcgaatggaaatggaagagagaatccagaagttagctagtcggattgttcaaatgttgggtcgatatggaaattggaaatgtgttttgcaagtggttgaatggctccagtcacatgaaaggttcaaatcctacaagagcaggtatatttacacaacagttctcgatgttctagggaaggcaaagagaccattcgaggcgttgaatgtattttataccatgcagaaccaattgtcatcttatcctgacatggcagcttatcattgtattgctgttactcttgggcaagctggtcttataaaagaattatttgatgtgattgattgcatgtgttctcctcctaggaagaagttcaaattgagccctcttcagaattgggatcctcgcttggaaccagaccttattgtatacaatgcagttttgaatgcttgtgtgcaacaaaagcaatgggaaggggcattttgggtactgcaacagttgaaagagaagaacatttgtccaacaaattcaacatatggtcttgttatggaggtaatgcttgtctgtggaaagtacaatttggtttatgagttcttcaataaggtggataaatcatcaatacctggtgctctgaactataaagttcttgtaaatgcactttggagagaaggaaagattgatgaagcagtgatggctgtgaaggatatggaaagtcgtggaattgttggttctgctagtctgtattatgacctagctcgatgcctttgcagtggtggacggtgcaaagaagcacttctccaggttgaaaagatatgcaaggttgccaacaaaccgctggttgttacctacacaggactcattcagacttgcatagacaatggtggcatggaagatgctaaatacatattcaaccacatgtgcaactactgttcacctaattctgttacttgcaacatcatgatgaagtcatatattaaacatggaatgcttgaagacgcgaaagacctgctccatgatattctgaattgcaggataaggagtaaagcggattctaatcaagtggcaaccgctgacaagtttactttcaatactttcatggaggcctgtgctgcagcaaaaaggtggaatgacttcgagtatgcgtttcgtgagatgttattgaatgggtaccatttcgatgagcgaagacaccttcggatggtacttgacgcttttaggcatgggaaggaacagctgttggatgatctatggcactacctgtgccgtcacagccgtgtcccgccctcccctgtcataatggaaagattctgcctaaaactgatgcagggagatacactggcggcgatctcctgcgtcagcagcttccatgagggcaagatatgcaacgtctcctccatgtcatggctcaatctgctgagccgcaatgcagataggctgaaggaggagcatgttaccaagttagctcatgaactcaacagcctcattagcttgaggagttcctctgatagcattagtcttagcctgtaccaaaaaattattagtagctgtacggcattcctctctggagccacagttgtagaaaaggcaccttctggccaataggtggtgttacagaaattataataaccacagttagtaaattctagtactccaaatcataattaccacgactgatggagtgtattgcattcaacgtttggttatcggtacaaagttagaaatggaaaattttcacgtaaggaattagttctttttttagtataatacaaaggctgatttgggagcataagcgataaagcttgctttgtttgattaattttatactggttactttcaaattcacaagtcataataccatgagcatcatttattga

SEQ ID NO: 32209 - DNA, 1567 bp, Zea Mays
ggcggcggccgccggaggagggaggcggcggccacaagccacaactaacaggcccagtaaacacatgcacaaagcacttatagaagcagaaggcaattgtttttccaattttcacgttgctggaagctccagtagggtagcatttgctttagtcaagaggaaagcaatgaaggcgaggcacatcaatgtgagtagccaaagggaatgaagtggtggtatcaggtgtgaaaactgggcttcagcgacatgaagggtactgcagttcctcgcacaagagcaagtccaagaagacgcatatggatatcagttgtcgtagtatttgtcgccattactgtgctgtgggcttatctctaccctccccaggattacacctaccctgtcagggactggtttccctcggaacctacgcgggaacttactgatgcagagactgctgcacgtgttgttttcagacagatactctccacgcctcctttcatatcaaggaacccaaagattgcctttatgttcctgaccccgggcaagcttccattcgaaaaattgtgggagttgttctttaagggtcatgatgggagatacactatatatgtgcatgcttcacgggagaagcacgaacatgtcagtcccatatttattggtcgagacatacacagtgagaaggtagggtggggtatgattacaatggttgatgcagagaggaggctgttggcaaaagctctagaagatatagacaaccagcattttgtattgctttcagacagttttcacgaccctgggccacatggagtttacagatactcaaagaatatgttacctgaggttcgagagtcggagttcaggaaaggttctcagtggttctcaatgaagcgacaacatgcaatggtggtgattgcagacagtctttattactcaaaattcaggctttactgcaggcccggaatggaagaaggtcgcaattgctatgcagatgagcattatctgccgaccctattccacatgatggaccctgctggcattgcaaactggtcagtcacctacgttgactggtctgaaggaaagtggcatcccagatcttttcgtgctaaggatgtcacttatgaacgcctgaagaatatgacttcgattgatgtgagctaccacatcaccagtgatgacaagaaagatctattgcagaggccttgcatgtggaatggactgaagagaccatgctacttgtttgcaaggaaattttaccctgaagcattagacaatcttgtgaacttattctcaaactacacaattttctgagttctacagctggaagcataaacatttttggaagcattggtgttcatgttaattctttgtagattgctggaggggcagatatattgacactaactcagtatatgcatgatagtgaacaagtattagacaactgtgtcaccgataaactgttttaggattatattattttatataggttttcagtgttactctttttttttgtgtctcctggcaatagctaattatgtcaaaactgtcatttataccaccttttccattaatcattcctcaaaagaatgtg

SEQ ID NO: 32210 - DNA, 3385 bp, Zea Mays
gacccgcccatgtcccctcgatagcaccccctgttctttcccatctctccaactctccttgcccggctgccccacacctctgctcttccctctcgcctcccgccgttacagcttgcagctccagccccaacccccgtccctctctccctgagccgtcgccttcgccttcgctgcgaaatctagggtttacgccgcgcatcgggtaccgcgcacgcaccgaccgaccacccggcggtcggcgccgctacacgcgggctcgctctcaggtggttgagcgtggccggagaaggggaggggcgacactgctcgtgggtgggtcagccagtgtgccccacgaggaacggcaatcatgtcgcagacgaactgggaggcggataagatgctggatgtgtacatatatgactattttgtcaagagaaacctgcaggcaaccgcaaaggccttccaagcagaaggcaaggtctcatcagatccagttgctattgatgctcctggtggctttctctttgagtggtggtctgtattttgggatatattcatagcaagaacaaatgagaagcattcagatgttgcagcatcatatatcgagactcagctaattaaagcaagggaacaacaacaccagcagccacctcaacaacagcaacagcagcagcaaatacaaatgcaacaaatgctgttacatagagctgcacagcagcagcaacagcagcagcgtagagatggttctcttctcaatggtactgcaagtggattttctgggaatgatcctttaatccgacaaaatccagctaatgcgaattcgatggcagcaaaaatgtatgaagagaggttaaagctccctccccagcgggattctctggatgaggcgtcaataaagttgcagcaaagatatggagaaaatgtgggacaagtaattgatccgaaccaagcactattgaaagcagctgcagctggacaatcctctgggcaaattttgcatgggactgctagtggtttgtcaggtactccgcaacaagttcaggcaagaagcccacaacaaccacctacagcagaacagaatatcaggaccgagatcaatccagtgttgacaccaagagcagcaggcactgagggttcattgattggtatccaaggatctaatcaggctggaaacaatttaactctgaaaggctggccgctcacgggacttgatcattttcgctctggaattctgcagcagaagccatttatgcaatctccacagcaatttcagcagctccagtttctgaccccacagcagcagcagcagcttttgctgcacgctcagcaaaatctgtcgtcctcgatgtcaagcgatgttgataccaggagattaaggatgcttcttaacaacaggaatgtggtccttggacaggatgggcagacaaatagcggcggtgatgttatcccaaatattggttcgccagggcaaagtggtggatcgcgtaatgatatagatatactaataaagaagaaatttgctcttctacagcagcagcagcagcagcaaagtcatagccagcagcagcagcttcagcaacctgcgctctctggacagcaatctcaaagttcaaaccagcttctccatcagcatggaaaaccaggagttgggagcttgcctattgatggaaacttgccaaactcttttggatttcctgaacaaggatcaaagaagagaaagaaacctgtctcatcctctggtagagctaatagttcaggaacagcgaacactgctgggccatctcctagctctgcaccctcaacaccatctactcacacgccaggagatgcaatgtccattccacagctgcagtataatggtggcccttcaaaaccattgatgatgtttggctctgatggcactggaagcttgacttctccagcaaacccgctgggtgatgttgaacgtctgttggaagatggttccttggatgaaaatgtagaatcttttttatcgcaagatgacatggatcctcgagaaacaatgggacgctgcatggattctagtaaagggttgggttttactgaggttgcaaaagcccgtgcgagtacaaacaaagttgtttgttgccatttctcattggatgggaaacttcttgccaccggagggcatgataaaaaggtcgttttatggtttacagatgtgctaaaacgtaaatccgcattagaagagcactcttccctaattacagatgtccgattcagccctggcatgacccgccttgccacatcttcctttgacaaaaccgtgcgggtttgggacgctgacaatattattcgctacgcacttttacaggtcattcagcatctgtcatgtcacttgattttcatccgaacaaagaagacatcgtttgttcgtgtgatagtgatggtgaagtgcggtgttggagcataaataatggtagttgtgtgacctgcgttagggttttcaatggaggagctactcggttaagatttcaacctcgccagggtaaatatctggcagctgcctcagaaaagggaatatccatactggatgcggagacattacaagtttgtagaactcctttgcagggccacgtacagattattcagtcagtatgttgggatgccgcgggcaactatctggcgtctgtcagtgaagattctgtcagggtgtggtcatttacctcagggaactacatcgaatgcatacatgagctgatctgcagcgggaacaagttccattcgtgtgtttttcacccaaattacccgaatttgcttataatcggttgttatgagtccctagagctttgggacataagggagaagaacacggtgacaatcagcaacgctcatgacggcatggttgctgccctagccgcgtcaagtgcatcggggctggttgcatcagtgagtcatgatcagctcgttaagctctggaggtgacactgaacacagcaacgctcgtctgtgtcattctcatttccagtgtcgtggcaaaagcgaaagggcagctgatctgatctcctaggttgatttgcgactgtggcatgcgcaaactattcaaatagttgtcagtaatgtgcttcccttatttctttgtttgtttatccatgccgggtgatactatgttacaattttatctatttagagaactgctattataatttgacctcccacttaggcctatttggctactctagtatttattccaatccatgtgtattgaagtgggttagggtgtaaattagtttaatttatacacaattcaactcaatacatgtggatttagttgaatactagggattaatgtaaatactatagtatccaaataaagtaggcttatgttcatttcatcccctagtccacggggattgaaggagattggagtggactgatagtg

SEQ ID NO: 32211 - DNA, 3963 bp, Zea Mays
cacaccttcgtcctccgtagcggctacttgctcatcgccgcagcccgctggtaccggcggtcgctcgccggccagaaacagaatgtttcgatcgatctacgagatggagtgcgtagctgcaacgacgatagagtttcgatgtcgcgtcggtccagtgcctgctccgggaccaggtcaagcggataccggatactttcacgtcatttgagagttacttggattcgtttacttggccgctgattgaagaagtacatgctgatgtattctcatcgctagatggttattctgaggcaaactttatagaagtaacacaggtgggaaatcttgatgctagtaaaccaatactcggttttcgagttgcagaaccagtgaaggatgagaagtcaagggagacatatgtaccagtggagaatgatataattgtcctgtcctcacataagccaaggcatgtgtctgatttgacacaaaacaagtcatcatttgtgttaggttcggtaattaaaactggagaagaagatgggttccctccggactggtgtgttgttcacttgtcatctgccattctcgttgaggcagactgtcatacaaaaattccaaaaaggccactgtttcttgtgttccttataaatatgaagacatacaatcgcatatggagatgccttcatttgggacaaaattgtagtaatctctttgagcttcagaacaaaaagagtagtggtcccgtaactaaggcgtgggagttcaagccaaagcccgcggaagcggaaagttcccaatgctcccaaccatctcaatgttttgatggtaggttgattgaatggcttggccttgagaaattcggtctaaatgattcacagttgaatgcagtgtcagattgtgtatcattaatggatagcaactcttcatctataaagctattatggggtccccctgggacaggtaaaactaaaactatcagctctatattatgggccatgctcatcaagggcaggaggacacttgcctgtgcacctacgaatactgctgtgttagagattgcggctcggatcgtcagtctaactgtgaagtcttcggatggcaccgtcttcctgaatgacattgttctgtttggaaacaaaaagaagatgaagatagataatgactattatctttcaaaggtgtatcttaactttcgtgctgagcgcctgttgccatgcttcaagtcaaatacaggctggaggcattgtttatgcgtgctgatagatcttcttgtcaattctgtgaccaagtaccagttgaacaatgaggataaaacattcaaacaacatttgaaagatgattacaataaactttctcggaatttacatagttacataactatactatacaatgatcatccaagaaacctggaaacaggacagagctttcaatgtatgctggaggtccgtgagttgctcaaaattcttcacactttgataaatgctggtaatggtggtgatatatggagcgatgaactgctcagaagcactatagaagaggaggtcaaccctgagctttggccttcacagctagcctgcatacggaccaactcatgcaataaatccaagtttgtggctgcaagatctttgtgtctgcaagaattaatatatctttgtaagaacatggagctcccaaattgttacagtgcacaagatgttcgactatacctgctgtcaagaactagattgattatctgtacagtttgtagctcattcaagttgtacaatatacctatgagaaattcttctccaagtttacatcagctgctaaacaaacccaaaatattgattcctctggagttgctgataattgatgaggctgctcagctcaaagagtgtgaaaccttaattcctctgcagttgcctggcataaggcatgctgttctcatcggcgatgagtatcaattaccttcccttgtgaagagcaaaatatctgatagtgctaactttggacgaagtgtttttgagaggttgagttccctaggctatagtaagcaccttctcaatatccagtacaggatgcatccagacattagcaggtttccagttggtacattttatgatggcaagctatctgatggccccaatgtcagtcacaaggactataataagatgtttttagcaggaaaactgtttaggccatattcatttataaatattgatggcagccatgaaacaaatgaaatgcatggtcggagccttaaaaactcattagaagtcgatgcagttgtgatgatagtgcagagtttgttaaaagagacgctttctacacgaagcaagctttctattggtgttgtgtgtccatacaatgctcaagttagagctatacaggaaaaggttgggaagccctgcaggaagtatgattatttctcagtgaaagtaaaatctgtggatggtttccaaggcgcggaggaagatataattatcatatcaacagtcaggagtaatggagctggtacagttgggtttctatcaaacttacagaggactaacgtggctctaacaagggccaagcattgcttatggattgtggggaatggaaccactctgttcaacagcaattccgtttggcagaagatcgtcaaggacacaagagatagaggttgtttttttaatgccactgatgagaaagagttgctgaatgcaattttcaagcctgctgttgagtatcctcatgctgacaatttagctaaacatgagcaacacggacagaatatatccgacttatcagctactgacacaattcagcaacttgcatgtcagtttacccctggaagtgatctcccaccaaagttctctatcacactcaatgttggttatactacaagaaaattcagttcatcaagcaccctgcttaacagctctcctttgcaactcacagcaacagcggtaccaaacgcagaaccagcttctcatggctcttcagctactggagcagttgaattgcctgtaaccgaagatgggcgcttggttgatgggaaaatctcctttcagaatactgtgaggagcactttgatcagaatcgaccacgaccctagacttgcatttgactttctggcagtagcaactacacgggagcaagcagcacctcttacccgggagcagtttaagaagcatgacagaatggtcgaatctcctgctccagttaccgctgagggttcggaatgctgcatcagactcaatgaacaggagcaagtagcacctcctaccaagctgcaatcgaagaagcgtggtagaaatgttaaagatcctgctgcagctactacaggggctttgaaatgcagcatcggactcgatgaaatagctacccgccagcaagcagcacctcctactcctgagcaatctaagaagcgtggtagaaagagcgaacctcttcctcaagttatcacagagggtttgagacgcagcagccgacttagtgaaaaaggcaagcaccatcaagtagcgccgtctcaggagcaagccaagaagcatggtagaaagggagcgacactttctccagttaccacagaggccctgagacgcagcagcagactgaatgaaaagggcacgcatcagcagatagcgctttctatcccagagcaagctaagaagtgtggtagaaaggccaaaaggcttcctcgagtaaccatagagggtttgaaacgcagcaaaagaatgagtagaaacaacagcgaagaattggctgatgtggattgcaatccataaatggcaaggaagcgacgcctacctgccgagtgccgactacatcaaaggaggttacaacagaattgtataggttgggacatgtctgcagcaagcaacatgatcgacccttctcgcactacaggaaactggttaaagaacgtgggtgaaaaaccgtcaaacttaatgtaataggccgtcgaacttaccgtaagaacgtgggtttaccgacgaatatagccgacggcgatttttggacgaa

SEQ ID NO: 32212 - DNA, 1144 bp, Zea Mays
cagtcaaacccaccgtcccttgcacgctcggcttggctgaagcggagagtttcctctgttcccccattccgtcgtgtcaccaccgccgccgccggagtgtgtcatcgccgattcgcctggtatggcagcaccgcccgggggagcggggatagtgtggcagacgccggccaacccgcccgagtcgcacgactacatcatccgcaacggtcggcgctacgtgaggccttactacttcgagttcatctcccatgtgaagaacagatgggctggaaagaccatcgttgacctcttcactgatgagttcaaagggcgttcccgcgattactatgttcatgcagtgaagtgtgggaggcttcaggttgatgggcaaatggttcacacagactatattgtgaaatcatcacaaaagataagccacttcttgcataggtcagttgctttgatcaattttgaaattattacccccactaaacaagtgttcgataatttcacttcataagttcaacatagattactccatacaaacaaatgttccaaagattaggagcagcataaatcttcacaattttctgcagatacattatcctttacatgcttatatcataaaaatggcaagtgaatcaacaggcacgagccacctgtcttggcgggtgatatttcaatacttaagaatgaagttgatgtcgtaactatttgcaaaccagcttctgttccagttcatccatgtggtcaataccgcaagaatactgtagttgggattctgcaggcagagcatgggttaacacccctatttctgcatcggttagatcgtttggtttcaggcctccttatatttgcaaaaaatgccgacagagctgaatgtttcaggcaacagattgaagctggtctgctgcaaaaagaatatgtggccaaggttgttggggtttttcctgatggtgagcaaaccgtcgatgccaatgtaaatttcaacgcacgggaaggaaggagtaccgtggagattagtggtggtgctggtgaagaaccaaatggaaaacaagcactcactaggtttcaaaggatttgcacggatgggactcacagtattgtcttgtgcaaacctgtgactggtcgaactcaccagggatgatgacatgatggattgatg

SEQ ID NO: 32213 - DNA, 2025 bp, Zea Mays
attggtttgtatcccgtatccgtccttcgctcctagtgaatgtggtgcacgacggtggaaactgagtcacgtaatccctactgttgtttctccgattctccttacgacccgccggcgttgggcaaaagcggccggtgctggtcctctcctcttgcagaaggcaaccggcggcgatccccatctacagcaaaaaaacgaccggcggggagcctcttccccggaaaataatttgacgagtgtatagaaaatgtcaaggttggagctagtgttcaaaagaccacatatacaatgaagagagacatgctcaccgctcacggagagaaggtcattcttcgtgcccttgaaattgagaaatcccggctgccacactcaaaggtaacaatctcaaagagcgaatttgtattccagatttagcagctagctcatttagttgagtatgtagctttgtgttcttccttttaatctcgtatttcaatgtaaattttatatgcaaatcggtgaaagtaatacataatcttatgtattatcttctgaacttccataggaagcatagacaaaatatttaactgttctttttgtcagggtatttgagtacctgtggatcttctgtatccataaaggatcagatcccaaaacccattggtcaaactactgaatgcagtaaacagggcatatcttatatctgagattatagatccaagatgcagatcagcggctttgtcacccctattggtcctttatctgaagaaaatcacacgatcgacaagaatttgttgccgctggagtgtgaagggacaatggaatgccacacacgagacaacgatgctgttgggttggatgcaagagcggaaggtgttgtctgtgagctcacagaccttcagaataacatacaagtttatgatatcgagttgactgttctaggaaactacacaggtcacggcttgccccttgatttccttgagagtaaaacgactggtggacccatcaagggctaccctgttgttgtggatgttttagaggattgttcttcagtgagtattcatgatcacctcccagtggctaggagagttgggaagaagaggcagagacgcagacatgatggaaggtggacgaagaggaccccgctacgttttccggctgcgtccacggctgtgcgtgccatttccaccaccgtgcagacaaaaaagaactcaaacaaggacccggtactcgaggaatgctccctgctattggctctagctgcgaaagcctccctgctgcatacatgaagacccctaggtgacgcagttgactccagcggcatagaagtgtatcatgtttcatgtgagaacgactgctgatttctttctggttcgtgtggctcacctttgccccttacacctgacgcgaggtcgaccaggagcagcaaggactgcaatgctgcacttctttgtaatttatgttctgcctcccctctgtgtgctcctgtgcgcttggtttagtgcagtcgtgaggataagttggggctagttatggttggaagaacatgaaagatcgaattttatttaaaacccagctgttttgcaggatatacagctgttaatggctagtttggtaactctattttttcaagatttttcttggaaaaatagaaatctcttgaaaaaaatgaggttgctaaattagcactaagatcttttctgttggaaattagggttgtacagtgttgttgactttgttaaaaacccagccttagagccgacttaagagattacacatatgatatgttattcagtgcccttttggttcatgcctcaattttaaaatctcattctacaatcccattagccaaatagtttcttatttttactagattttgtgccagaatcataccaagctgacaatatagttttgtcgacaggccccaaatttattgtgaagataaaataatgttctcatacaatacgacttcatatgacccatgaaacatcaatagccacttggccatgatcactggatcattttcgttacactaccaaaaaaaaa

SEQ ID NO: 32214 - DNA, 1481 bp, Zea Mays
  misc_feature (1480)..(1481): n is a, c, g, or t
gcctctagatcttattgggctttctgtcgcttcatcacccggcttggcaagaggatcagtgctggctgctgctgcttcattcatcctcgtcttgtgtttgttgcaagtcgcaaaggtttgcgccgcctgccgggcgtcgtcggctcatcgccgtcggcggtaggcttctgcctcccccgtctcgatacctctccttcggcgaagactcgcagggaggtccccacttcatcacctccgtttcctaccggaaaaggcaacttctgtcggccatctcagtactttttttggaagatggatccagaagactctagtgactttgaagaggaggacgacgaagaagaagatgatgacttaatgatattcatattgccagcgctatatctagcatctactggaattggaactctggatcaaacatctatggttagtgatggtactgcgattgaaactccaagtcaagtatcaaagtttaacgatgcagaaaggatttgtaaagtgcttgaagatgacagaggccaaggctatgataaacttcgtgtggagccccatgttctcctcgaactttcacgctatctgaggtcaaatgatcttttgaaaaataccagaggtgtttctgtagaagagaaaattggcatgtttatttacatgctatcccgaaatgctagttttcagaaactaagtgacagattcaagtacagtacagaaactattcacaggcatatcaaagcatgctttgatgcagtcacaccaatgactggtgaattcgtcaggccaccttcaattcaagcccaccggaaaatatcatctgatacacgttatgggccttactttgagaactgtattggagcaattgatggaatccatgtccctatgacaatatcggacagtgaagcagctccataccgaaatagacaagaatccctttcccaaaacaatatggatttgaagtcccaagaggaaagttctacctggttgatgggggttatgcgaacacgccatcttttcttgctccttttagtgaagtttcttaccatgctgaagagcaagatgagagcaatttccaaccaatagactatagggagcttttcaatcttcgccatgcacagctgtacagacatatcaagcgtgctgtaggcctactgaagatgcggtttccaattctaaatgtcgcaacatcataccgaaaagacactcaactgaaaattccttcagcggcagttgttatgcataacataattcagagacaaggaggtagtgaagagttgttatgtgagcaaacaattccatttgcgtcccgtaaaacagtgaatcttcctagtggtgatgacacgtatggttatgatgtttcagctttcaacagtgaatgcgacatgggtaatgctttgagagatggtattgcactgaggatgtgggcagattatgaaagtagtatgtatgtctgatttcagaatagaacaggctggccttaaagaatattgann

SEQ ID NO: 32215 - DNA, 142 bp, Zea Mays
atcctgacttaggttgcagggcaacgatcaagtctccactctccggggatataacggcgatccgaatcgatttactcagctgaggatctctaaccacacgacatatgtttctcataaaccttgcatgtctaccattcccacg

SEQ ID NO: 32216 - DNA, 2421 bp, Zea Mays
ttggattcgtccccaattctctgcctccgccgccaggacgacggcaaatccgcccacgcaaaatatcagcccaagtgcccatcgcccaagcttcctagctcacccgccgccacccactagccaaattccccatccctctcctgccgccacccatcagccacatctctccctcctactccctctccggcagccatcatcagacaagatccctcccccaccatcgagccatgtcgagtcgagtgcatcttctgcaagcacggccatcttacgaaaccctagctggctcgaaggaccactactgtccggcgccctgaacaacttggcatgatgccgacgaagggtggagcaaacaaatcacaatgacatcgggtagtagatccaccattgcatccctatgaagaggagcgccttagacaatgtatgaggaacaattcgaggttgcaacaacttggaattcctgctttagtcagcatgtgtgggaacataaattccatctctaggaacaaaaagccaaataacagggataatgaagattctgaatctgagtatgatccttcacatgacgattctattgaaggggatttgtttgaccatgatgatcataataagggctcaaaggacactaacagaagaactattcacatggctcctggtggaatcaagcctcgaactaagagagtttatgcagagcaacatactactagaaatacaaggtcaaagaaaagcattgctcagcctgacacaagtctaacacgaagtgacatctatgtgccaccaccctcgctatctcatttgacccaagttggagaagttgctcgtagcattgaaaaccatagaaagactagtgttgaagctaatggccctacccaggttgacaacacccacatggccaatcgagaagatggctttgaccaatttgatgacaacatgaccaaccaaggggaaggcattacccagcctggtggaaaaggagtaaatcagcatagagaaaggggacttaatatgggacttggtctccaaaggatgaaccgagctcggcgtggcaaactgccaattgtcattactgaaggaaggataaggcctgtggcaccaattgttgctgcaaagtttgcaactgagtgcaacattgcagttcggaatcatgtgcttgtgcttaagtcatggaaggaatacgagaagcatcctgggctctttaaattgtttacagcaaaacttagtgcaaagtttgatatcaatacagaagatgcgctagttaaaaatgcttgtttccaaatgatgaggaatgcactgcgccaacaacgatataagctgaagaaacaatattttgacccttttccgctacatctagtgaggaaaacatctcctatcaaatcgacaagtgatgaacaatggaatgaccttgtggaacattggaaaggtccaaaaaatatggcgacatgtgaacataacaaaggcaaccgaggcaaagttaagttccatcaaacaactggatctcgtagctatatggttcatgtagaaaatttgggggacaagtacatggatcaagaacctgatgcattggatctgttcaaggagtgccactacagtaagaaaaagcaaggctacacttccactgtacaactggctattactcaaatggaagacaagcgatctacaccaggagaaggtgaacaaccaatgtctacgactcaggttgtagctgatgtgcttgctgagaacacaaagaagaatcggtttcttcaaaatgtgggaatccaaaatgcacgacctagatctagtgtacaaaatattgaagcacaacttgaagtagagaggaaggcaaatgcagagcttcaatcacttgtcagcatccaacgtgagcgcatggatgtattattaaagcaagtgcatgaagcagaactggtaaggattagagagcaagaagagatgaagaagaagcaagatgccatggatgctcaacttgagcttatgctaagtcagattcaaccaagttaaagctaactagtatggggtgttaggctttgttggtacttctcttttgctgatgctattgcattctattgatggataaatacgtttcaatccattttttgtctattgtgctgctagagtagctttagcggcatgtgtggtgtgttggagtggcttacgtgtcagtggttggatacttgctgtaatgacatgctattggatacttgcatgtaatgacatgctggagtgtggtcagtattttttgtgatgagatgctggattaaaatctgagttgtgatgtaatagaattcaacattttgtcattatgttctggattataattaatatatatttaaattattgtgtttgcaaaagctgcgaagctgtccatgggctagaatgttaattgtaatgggctgaaacaaaatgggcaaaaattgcaataaaaag

SEQ ID NO: 32217 - DNA, 1491 bp, Zea Mays
ctttgtccggctagtttgaaacccacccaattactcggttgctcccgttgtcctctccgcggggcgcggcctggcttttcccttctcggcttctgccgttcgcgtgcggccgtgcggcctctctctttctttcccagcgccaccgccgacctagccaggtgaccaggtcttcgtcaggcccatagccagcgacgaacacctaagtacccaacagatgagttcgaagaaggttccgtaccacaagcatagggaggctgaggaggcgaggaagaagagggaggaagatgaagcagcacgtgtatatgcggaatttgttgagtccttcaaaggtgatagctcatctggggctaagtttatccgaggtggtgtgatcgaccccaatgcaaagctgaagactgactcggaaggtggaaaatccaaagatggggggtctgttccaaagaagggcagtaggtatgttccatccttcttgccaccatcatttgcaaaagagcctgagaaaaagaaggaaggggagaggccaaaggaaaaggaaaagggaaagccacgagtaatagatagattcttggaggaaatcaagcttgaacaagagcagcgagagaagcgccatcaagatcgagatcaccgccgtgaaggtcgccatggcgatagctccatgtcctcgagccggtttgatgaactaccagatgaatttgatccgactgggagatttccaggatcatttgatgatggtgatcctcaaaccaccaacttatatgttggcaatctatctcccaaggtcgatgagaattttcttttgaggacatttggtcggtttggacctattgctagtgtcaagattatgtggcctagaacagaagaggaacgcagaaggcaaagaaattgtggttttgttgccttcatgaatagaacagatggacaagcagcaaaggatgaaatgcaaggtgttattgtgtatgactatgaactcaagattgggtggggtaaatctgttgctcttccgtcacaggctttgcctgctcctcctccaggacacatggcaatcagaaataaggagggtggtacagctacagtcatactttctggtcctggtggccctgctgttgcatctattaaaccacaaacctcagagctggtccttacaccaaatgttcctgatattgtggttgctccacctgatgatgggcatcttcggcatgtgattgacacaatggctctgcacgtacttgatggtggatgtgcttttgaacaagctgtaatggagagagggcgaggaaatcctttatttgatttcttgttcaatcttaaatctaaagagcacacatattatgtttggaggctatactcatttgcccaggtacttgttgctgtctatagtacaaaattttaaagtgacatttcagtattctaatgcagaatatctccgttctttttattcgttcatatttgtcattcttagaagactatcaaaagtattatgcttcacttctg

SEQ ID NO: 32218 - DNA, 1685 bp, Zea Mays
cctccctccccacttccccagtccccagtcctcgcggccgaaacccttgctcccttccgcgatggccggccggggcgcctccccggccgcggcggccgccgtccaggtgcgctgcgccggctgccgcggcgtgctcgccgtggctcccggcatgaccgagttcatctgccccaagtgtcgcatggcgcagcgcctcccgccggagctcatgccgccctccccgcccaaggcctccccgactccgcctccctcaggtccaactccgcctccaccacctccaccttcgctgccgcctccgcctccgcctccgcctcagccagtgccgcaccctctgacccgccgctccgctccccgggcgcagggcgtggaccccaccaagatccagctcccctgcgcgcgctgcaaggccgtcctcaacgtgccccacggcctcgatcgcttccgctgcccgcagtgcggcgtcgacctcgctgttgacttgtccaagctccgccatttccttgcatctgctggcccaggcttttttccgcccccactcccacctcccccacccccgcaacccccagtgccaatgcctcatctgccctttctgccgatgatgccacgccttccattgcccatgctgccgatgctctctcctgctgagctaccggaggagatcaatgaggttgcagttgatgttgagcgcgacgaagatgaaagtggcacttttggggaaactttcattgattatagacctcccaagctatcttttggttttcctcatcctgaccctgtagtagaaacatcctccttgtcagcagtgcaacctccagaacctacttacaagttgactatcatgaaagaattggatgaaaccaatgcattatcttccttacagattgaaacaatagtgtatgcttgtcagaggcatcatcatcatcttccaactggagctagagcaggtttcttcatcggtgatggggctggtgttggtaaaggacgtaccgttgctggattgatctgggaaaattggcagcagggaaggcataaagctttgtggatatcaattggttcagacctgaaatatgacgctcgcagagatctggatgatgttggtgcaaaatgtgtggaagatggagttgtttttgtaacttatagcagcttgatagcatcctctgagaaccgttcccgtttgcaacagttggtacagtggtgcgggtctgagtttgatggtcttctggtgttcgacgagtgccacaaggccaaaaatctgattcctgaggcagggagccagcccacccgcactggtaaagctgttcttgagattcaggatatgttacctcaagcacgggttgtttattgttcagcgactggtgcatctgagcctcgaaatttaggttatatggttcggcttggtctctggggagatggaacatcgtttgagaatttcaaccaatttttaggtgctcttgagaaaggaggtgtgggtgctcttgaacttgttgctatggacatgaaagccaggggaatgtatgtttgccgtactctaagttacaagggtgctaactttgatatcctagaatcacttctggaggaaagaatgatggatatttttgttagtatgattgctcattgacatgaagtagtattcttttaaatttaattaacttggcgagaacaaagtggtagaaactgaaaggaga

SEQ ID NO: 32219 - DNA, 2134 bp, Zea Mays
taaaatttgaatatgaatattagaatgaataagctgatggagatagcttatggctcagcacattaatagtcaattttttttcttccccaaaaaagctgttgcctcgttgaggaatattccacatcccctcgtttccggcaaaccgcaatgaagtctctgacccccaccgccgctggctccgccgcagatttttccgactctctgccctccccgatctcccctgcggcggtgccatgccattccagccccggccgccactactacctcgccgtcgaccgcacccagttcaaaatgaggacactcttggagctcctgggggttgtcgcggatcgccgtggtgggctgccgattgcaacatgtgtttcctcccgtgatgagcttgatgccgtctgtgctgccgtcgcaaacctcccctttgtgtcagcgtcacctctggtagttcacaaacacaatttcacctccttagttgtaacttcctctatgcattttcatttgttctattttctctgaaattttttggtggcttggaagcaatatgccttcatctagtatgttttctctgaaaatatatgacgtttatcaccaacataaatatttttatgaacccataaattgttgcacaaggtcctaacaggtatatgatccttactattatgatgttcttacttcacatcaacctccagatattactaatggtcttctatgtacagtatagtgatcaagctgaagcagagcgtgcatctattcttgagaactttcgtcaagaaacaactcagtggaataaaactgctaaagctaccaatattgccgaaagttctaagcttgaaagtactggctctaaaataagcattatagttgcaacagatgcttgcttgcctcaggcagcgatggcagaggcaccccttatggctcgagtgctgataaactatgagcttcccacaaagaaggtgagctttaactatatttctgtgcatatttgttgcttttagtccattttatgcaaaaagcatgaatctgtgtatgctctctttcttatttgctactccctgtgtcccaaattataaggcattttggctattgtatagatatttttactatgtatcttgacatagtgtatatttaagtgtgtagcaaaagcgttaaaacaatgtatctagaaaaaccaaaacatcttatgctccgtttggatgttgatattgaatatgatggaattgaattgagttgaataccaaatcatgcatggtactgaaatgagatgcaattccaattctattgtttggatgtcactgaattgtacgttctaattccacgcaataccgaggggtgaggctttgtattgggagaggatgttctagttatagtctaattctagggaattaggcctctgattccaaatctcaattccacgagcaaccaaacaacagaatttagaaaaactgattctaattcccaattctgtgctccaatatctatatccaaccggggtgttagtattatgtagtttcactggctcttctagttgtgcttttatgatatcttttgtgacctgaagattaaatttgagtttttcaggaagcgtacttaagacgcatgtcaacatgtttggcggcaggtatattaatattgattcaatccaacccttatgctccttgattcagctgatggtctttgatggtgcagacggaattgtgattaacatggtcgttggttgtgaggtggttacactcaaggctttagaagagaacagtggtctgcttattgctgagatgccaatacatgtttcagaaatattatgaccgttccagttgtacaacatttcagaagttactgttctgattgcacactaactactcatggtttacttctactttaattttgaattgcttttcatgtttcagaatgttctcaaattatatctctaaagcattagaataatgctcattgcttcttttttcctctgtataagaaatgatagaatatagtcatggttcaacatccagcgacatgtttcttttactctgtgcatcgtatctatgttgatgcttacaagtccatgtatgaaggcaactaaaagtttaacatcaatccattattcttgcttatcactagtcaccataaatagtcagttgccaca
